United States Patent Application Publication US 2021/0170017 A1 - sequence listing, part 6

SEQ ID NO: 6802 - protein, 535 aa, Artificial Sequence
  derived and/or modified protein sequence (artificial) from HRSV(A2)__F_DSCav1_mut7
MELLILKANAITTILTAVTFCFASGQNITEEFYQSTCSAVSKGYLSALRTGWYTSVITIELSNIKENKCNGTDAKVKLIKQELDKYKNAVTELQMLMCSTPATGSGSAIASGVAVCKVLHLEGEVNKIKSALLSTNKAVVSLSNGVSVLTFKVLDLKNYIDKQLLPILNKQSCSISNIETVMEFQQKNNRLLEITREFSVNAGVTTPVSTYMLTNSELLSLINDMPITNDQKKLMSNNVQIVRQQSYSIMCIIKEEVLAYVVQLPLYGVIDTPCWKLHTSPLCTTNTKEGSNICLTRTDRGWYCDNAGSVSFFPQAETCKVCSNRVFCDTMNSLTLPSEVNLCNVDIFNPKYDCKIMTSKTDVSSSVITSLGAIVSCYGKTKCTASNKNKGIIKTFSNGCDYVSNKGVDTVSVGNTLYYVNKQEGKSLYVKGEPIINFYDPLVFPSDEFDASISQVNEKINQSLAFIRKSDELLHNVNAGKSTTNIMITTIIIVIIVILLSLIAVGLLLYCKARSTPVTLSKDQLSGINNIAFSN

SEQ ID NO: 6803 - RNA, 1608 nt, Artificial Sequence
  derived and/or modified CDS sequence (opt1) from HRSV(A2)__F_DSCav1_mut7
auggagcugcucauccugaaggccaacgccaucaccaccauccugacggcggugaccuucugcuucgccagcggccagaacaucaccgaggaguucuaccaguccacgugcagcgccgucuccaagggguaccucagcgcccugcggaccggcugguacaccuccgugaucaccaucgagcugagcaacaucaaggagaacaagugcaacgggaccgacgccaaggugaagcucaucaagcaggagcuggacaaguacaagaacgcggucacggagcugcagaugcugaugugcuccaccccggcaaccggcuccggcuccgccaucgcgagcggcgucgccgugugcaaggugcugcaccucgagggggaggucaacaagaucaagagcgcccugcuguccaccaacaaggccguggugagccucuccaacggcgucagcgugcugaccuucaaggugcuggaccucaagaacuacaucgacaagcagcugcugcccauccugaacaagcagagcugcuccaucagcaacaucgagacggugauggaguuccagcagaagaacaaccggcuccuggagaucacccgcgaguucagcgugaacgccggggucaccacccccguguccacguacaugcugaccaacagcgagcuccugucccugaucaacgacaugccgaucaccaacgaccagaagaagcucaugagcaacaacgugcagaucguccggcagcaguccuacagcaucaugugcaucaucaaggaggaggugcuggcguacgugguccagcugccccucuacggcgugaucgacacccccugcuggaagcugcacacgagcccccugugcaccaccaacaccaaggagggguccaacaucugccucacgcgcaccgaccggggcugguacugcgacaacgccggcagcgucuccuucuucccgcaggccgagaccugcaaggugugcagcaaccgcguguucugcgacaccaugaacucccugacgcugcccagcgagguaaaccucugcaacgucgacaucuucaaccccaaguacgacugcaagaucaugaccuccaagaccgacgugagcuccagcgugaucaccucccugggggccaucgucagcugcuacggcaagacgaagugcaccgccagcaacaagaacaaggggaucaucaagaccuucuccaacggcugcgacuacgugagcaacaagggcguggacaccguguccgucgggaacacccuguacuacgugaacaagcaggagggcaagagccucuacgugaagggggagcccaucaucaacuucuacgacccgcuggucuuccccuccgacgaguucgacgcgagcaucucccaggugaacgagaagaucaaccagagccuggccuucauccgcaaguccgacgagcugcuccacaacgugaacgccggcaagagcacgaccaacaucaugaucaccaccaucaucaucgucaucaucgugauccugcugucccucaucgccguggggcugcugcucuacugcaaggcccggagcacgcccgucacccuguccaaggaccagcugagcggcaucaacaacaucgcguucuccaacuga

SEQ ID NO: 6804 - RNA, 1608 nt, Artificial Sequence
  derived and/or modified CDS sequence (opt1) from HRSV(A2)__F_DSCav1_mut7
auggagcugcucauccugaaggccaacgccaucaccaccauccugacggcggugaccuucugcuucgccagcggccagaacaucaccgaggaguucuaccaguccacgugcagcgccgucuccaagggguaccucagcgcccugcgcaccggcugguacaccuccgugaucaccaucgagcugagcaacaucaaggagaacaagugcaacgggaccgacgccaaggugaagcucaucaagcaggagcuggacaaguacaagaacgcggucacggagcugcagaugcucaugugcuccacccccgccaccggcagcggguccgccaucgccagcggcguggcggugugcaagguccugcaccuggagggcgaggugaacaagaucaaguccgcccuccugagcaccaacaaggccguggucucccugagcaacgggguguccgugcucacguucaagguccuggaccugaagaacuacaucgacaagcagcuccugccgauccugaacaagcagagcugcuccaucagcaacaucgagaccgugauggaguuccagcagaagaacaaccggcuccuggagaucacccgcgaguucuccgugaacgccggcgucaccacgcccgugagcaccuacaugcugaccaacagcgagcuccugucccugaucaacgacaugcccaucaccaacgaccagaagaagcucaugagcaacaacgugcagaucguccggcagcaguccuacagcaucaugugcaucaucaaggaggaggugcuggccuacgugguccagcugccccucuacggggugaucgacacgccgugcuggaagcugcacaccagcccccugugcaccaccaacacgaaggagggcagcaacaucugccucacccgcaccgaccgggggugguacugcgacaacgcgggcuccgugagcuucuucccccaggccgagaccugcaaggucugcuccaaccgcguguucugcgacacgaugaacagccugacccugcccuccgaggucaaccucugcaacguggacaucuucaacccgaaguacgacugcaagaucaugaccagcaagaccgacguguccagcuccgucaucacgagccugggcgccaucguguccugcuacgggaagaccaagugcaccgccagcaacaagaacaagggcaucaucaagaccuucuccaacgggugcgacuacgugagcaacaagggcgucgacacggugagcgugggcaacacccuguacuacgucaacaagcaggaggggaagucccucuacgugaagggcgagcccaucaucaacuucuacgacccccugguguuccccagcgacgaguucgacgccuccaucagccaggucaacgagaagaucaaccagucccuggcguucauccggaaguccgacgagcuccugcacaacgugaacgccgggaaguccaccaccaacaucaugaucaccacgaucaucaucgugaucaucgucauccugcucagccugaucgccgugggccugcuccuguacugcaaggcccgcuccaccccggugacccugagcaaggaccagcuguccgggaucaacaacaucgccuucagcaacuga

SEQ ID NO: 6805 - RNA, 1608 nt, Artificial Sequence
  derived and/or modified CDS sequence (opt2) from HRSV(A2)__F_DSCav1_mut7
auggagcuccucauccucaaggccaacgccaucaccaccauccucaccgccgucaccuucugcuucgccuccggccagaacaucaccgaggaguucuaccaguccaccugcuccgccgucuccaagggcuaccucuccgcccuccgcaccggcugguacaccuccgucaucaccaucgagcucuccaacaucaaggagaacaagugcaacggcaccgacgccaaggucaagcucaucaagcaggagcucgacaaguacaagaacgccgucaccgagcuccagaugcucaugugcuccacccccgccaccggcuccggcuccgccaucgccuccggcgucgccgucugcaagguccuccaccucgagggcgaggucaacaagaucaaguccgcccuccucuccaccaacaaggccgucgucucccucuccaacggcgucuccguccucaccuucaagguccucgaccucaagaacuacaucgacaagcagcuccuccccauccucaacaagcaguccugcuccaucuccaacaucgagaccgucauggaguuccagcagaagaacaaccgccuccucgagaucacccgcgaguucuccgucaacgccggcgucaccacccccgucuccaccuacaugcucaccaacuccgagcuccucucccucaucaacgacaugcccaucaccaacgaccagaagaagcucauguccaacaacguccagaucguccgccagcaguccuacuccaucaugugcaucaucaaggaggagguccucgccuacgucguccagcucccccucuacggcgucaucgacacccccugcuggaagcuccacaccuccccccucugcaccaccaacaccaaggagggcuccaacaucugccucacccgcaccgaccgcggcugguacugcgacaacgccggcuccgucuccuucuucccccaggccgagaccugcaaggucugcuccaaccgcgucuucugcgacaccaugaacucccucacccuccccuccgaggucaaccucugcaacgucgacaucuucaaccccaaguacgacugcaagaucaugaccuccaagaccgacgucuccuccuccgucaucaccucccucggcgccaucgucuccugcuacggcaagaccaagugcaccgccuccaacaagaacaagggcaucaucaagaccuucuccaacggcugcgacuacgucuccaacaagggcgucgacaccgucuccgucggcaacacccucuacuacgucaacaagcaggagggcaagucccucuacgucaagggcgagcccaucaucaacuucuacgacccccucgucuuccccuccgacgaguucgacgccuccaucucccaggucaacgagaagaucaaccagucccucgccuucauccgcaaguccgacgagcuccuccacaacgucaacgccggcaaguccaccaccaacaucaugaucaccaccaucaucaucgucaucaucgucauccuccucucccucaucgccgucggccuccuccucuacugcaaggcccgcuccacccccgucacccucuccaaggaccagcucuccggcaucaacaacaucgccuucuccaacuga

SEQ ID NO: 6806 - RNA, 1608 nt, Artificial Sequence
  derived and/or modified CDS sequence (opt3) from HRSV(A2)__F_DSCav1_mut7
auggagcugcucauccuuaaggccaacgcuauuaccacaauacugacugcagugacguucugcuuugccagcggccagaauaucaccgaagaguucuaccaauccacauguucugcggucucaaaaggguauuugagugcuuuaagaacuggaugguacaccagcguuauuacaaucgaacuguccaacauuaaggagaauaaaugcaacgguaccgacgccaaggugaaacuaaucaagcaggaacucgauaaguauaaaaaugcaguaacugagcugcagaugcuuauguguucuacacccgccaccggcucggggucagcuauagcaagcggaguggccgucugcaaggugcugcacuuggagggcgaaguuaacaaaaucaagagugcucuccuguccacgaauaaagccguggucucucugagcaacgguguguccguacucacuuuuaagguuuuagaccugaagaauuacauugauaaacagcuuuugccuauccugaacaagcaaucauguaguauuagcaauaucgagaccgugauggaguuccagcagaaaaacaauaggcuacucgaaauaacacgggaguuuucugucaacgcgggggugacuaccccaguguccacauauaugcugaccaauucagaacuucugagcuugauuaacgacaugccgaucacgaacgaucagaagaaacucaugaguaauaacguccaaauuguucgccagcagucuuacuccaucaugugcaucauuaaggaggaagugcuggcauauguagugcaguuaccccuguacggagucauagacacuccuuguuggaaacuccauacaagcccacuuugcaccacuaauacaaaggagggcucgaacaucugucugacccgaacggaucguggcugguacugcgacaaugccgggucuguguccuucuuuccccaagcugaaaccuguaagguuugcucaaacagaguguucugcgauacaaugaauaguuugacucuaccuagcgaggucaaccuguguaauguggacauuuuuaacccaaaauaugauugcaagaucaugaccuccaaaacagacguaucuagcucaguuauaacuagccucggagccauuguguccuguuacgguaagaccaaaugcacagcaagcaauaagaacaagggcaucaucaaaaccuucucuaaugggugugauuaugucucaaacaagggaguggacacugucagugugggcaauacgcuguacuauguuaacaaacaggaggguaagagccuuuacgugaaaggggaacccauuaucaacuuuuaugacccucugguauucccauccgaugaguuugacgcuucuauuucgcaggucaaugaaaagauaaaccaaaguuuggccuucaucaggaaguccgaugagcuccugcacaaugugaacgcgggaaaaucaacaaccaauauuaugaucacuaccaucauuauaguuaucauugugaucuuacugagucuaauugccgucggccuccugcuuuacugcaaggcacggucuacaccggugaccuugagcaaagaccagcuguccggcaucaacaauauagcuuucucaaacuga

SEQ ID NO: 6807 - RNA, 1608 nt, Artificial Sequence
  derived and/or modified CDS sequence (opt4) from HRSV(A2)__F_DSCav1_mut7
auggagcugcugauccugaaggccaacgccaucaccaccauccugaccgccgugaccuucugcuucgccagcggccagaacaucaccgaggaguucuaccagagcaccugcagcgccgugagcaagggcuaccugagcgcccugagaaccggcugguacaccagcgugaucaccaucgagcugagcaacaucaaggagaacaagugcaacggcaccgacgccaaggugaagcugaucaagcaggagcuggacaaguacaagaacgccgugaccgagcugcagaugcugaugugcagcacccccgccaccggcagcggcagcgccaucgccagcggcguggccgugugcaaggugcugcaccuggagggcgaggugaacaagaucaagagcgcccugcugagcaccaacaaggccguggugagccugagcaacggcgugagcgugcugaccuucaaggugcuggaccugaagaacuacaucgacaagcagcugcugcccauccugaacaagcagagcugcagcaucagcaacaucgagaccgugauggaguuccagcagaagaacaacagacugcuggagaucaccagagaguucagcgugaacgccggcgugaccacccccgugagcaccuacaugcugaccaacagcgagcugcugagccugaucaacgacaugcccaucaccaacgaccagaagaagcugaugagcaacaacgugcagaucgugagacagcagagcuacagcaucaugugcaucaucaaggaggaggugcuggccuacguggugcagcugccccuguacggcgugaucgacacccccugcuggaagcugcacaccagcccccugugcaccaccaacaccaaggagggcagcaacaucugccugaccagaaccgacagaggcugguacugcgacaacgccggcagcgugagcuucuucccccaggccgagaccugcaaggugugcagcaacagaguguucugcgacaccaugaacagccugacccugcccagcgaggugaaccugugcaacguggacaucuucaaccccaaguacgacugcaagaucaugaccagcaagaccgacgugagcagcagcgugaucaccagccugggcgccaucgugagcugcuacggcaagaccaagugcaccgccagcaacaagaacaagggcaucaucaagaccuucagcaacggcugcgacuacgugagcaacaagggcguggacaccgugagcgugggcaacacccuguacuacgugaacaagcaggagggcaagagccuguacgugaagggcgagcccaucaucaacuucuacgacccccugguguuccccagcgacgaguucgacgccagcaucagccaggugaacgagaagaucaaccagagccuggccuucaucagaaagagcgacgagcugcugcacaacgugaacgccggcaagagcaccaccaacaucaugaucaccaccaucaucaucgugaucaucgugauccugcugagccugaucgccgugggccugcugcuguacugcaaggccagaagcacccccgugacccugagcaaggaccagcugagcggcaucaacaacaucgccuucagcaacuga

SEQ ID NO: 6808 - RNA, 1608 nt, Artificial Sequence
  derived and/or modified CDS sequence (opt5) from HRSV(A2)__F_DSCav1_mut7
auggagcugcucauccugaaggccaacgcuauuaccacaauccuuacggccgugaccuucugcuuugcgagcggccagaauauuacagaagaguucuaccaauccaccuguucugcugucagcaaaggguaucuguccgcccucagaacaggaugguacaccucuguuaucacaauugaacugagcaacaucaaggagaauaaaugcaacggcaccgacgccaaggugaaacuuaucaagcaggaacuggauaaguauaaaaaugcugugacggagcuccagaugcugauguguuccacccccgccacagggucuggaagcgcuauugccuccggcgucgcggugugcaagguucugcaccucgagggggaagugaacaaaaucaagagcgcccugcuuucuaccaauaaagcugucgugucccugagcaacggaguuucugugcucacauuuaagguccuggaccuuaagaauuacauugauaaacagcugcucccuauccugaacaagcaauccuguagcauuucuaauaucgagaccgugauggaguuccagcagaaaaacaaucggcugcucgaaauuacgcgcgaguuuuccgugaacgccggcgucacaaccccgguuagcacauauaugcugaccaauuccgaacuucugucucucaucaacgacaugcccaucaccaacgaucagaagaaacugaugagcaauaacgugcaaauugugagacagcaguccuacagcaucaugugcauuaucaaggaggaaguccuugcuuaugugguucagcugccucucuacggcgugauugacacacccuguuggaaacugcauacgucuccucugugcaccacaaauaccaaggagggguccaacaucugucucacacggaccgaucgcggaugguacugcgacaaugccggcagcgucucuuucuuuccccaagcggaaacguguaaggugugcagcaacagaguuuucugcgauacaaugaacucccugacccuuccuucugaggugaaucuguguaaugucgacaucuuuaacccgaaauaugauugcaagauuaugaccagcaaaacagacguguccagcucugucaucaccucccucggggccauugugagcuguuacggaaagacaaaaugcacggcuucuaauaagaacaagggcaucauuaaaaccuucuccaaugggugugauuauguuagcaacaagggaguggacacagucuccgugggcaauacccuguacuauguuaacaaacaggagggcaagucucuuuacgugaaaggggaacccaucaucaacuuuuaugacccucuggucuuccccagcgaugaguuugacgccuccauuucucaggugaaugaaaagaucaaccaaagccucgcuuucauucggaaguccgaugagcugcugcacaaugugaacgccggaaaaagcacaaccaauaucaugauuacgaccaucauuaucguuaucauugucauccuccugucucuuauugccgugggccugcuccuguacugcaaggcucgcuccacaccugugacccugagcaaagaccagcuuucugggaucaacaauauugcguucuccaacuga

SEQ ID NO: 6809 - RNA, 1608 nt, Artificial Sequence
  derived and/or modified CDS sequence (opt6) from HRSV(A2)__F_DSCav1_mut7
auggaauuacucauacucaaagcaaaugcaauuaccacuauacucacagcuguaacuuuuuguuucgccucaggacaaaacaucacagaagaauuuuaucaauccacaugcucugccguaucaaaaggcuaccuaucugcccuaagaacagguugguacacaucuguaauaacaaucgaauuauccaacaucaaagaaaacaaaugcaacggcacagacgcaaaagucaaacucaucaaacaagaauuagauaaauauaaaaacgcaguaacagaacuacaaaugcuaaugugcucuacacccgccacaggaucaggauccgcaaucgcuucuggaguagccguuugcaaaguauuacaccuagaaggagaaguaaauaaaauaaaauccgcacuacuaucaacuaauaaagcaguaguaucacuuucuaaugguguaucaguauuaacauucaaaguccucgaccuaaaaaauuacaucgacaaacaacuauuacccauccuuaauaaacaaucaugcuccauaucaaacauagaaacugucauggaauuucaacaaaaaaacaauagacuucuagaaaucacaagagaauuuucuguaaaugcaggaguaacuacaccaguaucaacauauauguuaaccaacuccgaacuacuaucacucauaaacgacaugccaauaacaaacgaccaaaaaaaacuaaugucaaauaacguucaaauaguaagacaacaaucauacucaaucaugugcauaauaaaagaagaaguuuuagcauacgucguacaacuuccccuauacggaguaauagacaccccuugcuggaaacuccacaccucaccacuaugcacuacaaacacaaaagaagguuccaacaucugcuuaacaagaaccgaucgaggaugguacugcgacaacgcugguuccguaucuuucuucccacaagcagaaacaugcaaaguaugcuccaauagaguauucugcgacaccaugaacucacuaacucuaccauccgaaguaaaccuaugcaacgucgacauauuuaauccaaaauaugacugcaaaauaaugacuucaaaaacagacguauccucaucaguaauaacauccuuaggagcaauaguaucauguuacggcaagacaaaauguacagccucaaacaaaaacaaagguaucauuaaaaccuucuccaacggcugcgacuacguaucaaauaaaggugucgauacaguaucaguaggaaacacacucuauuacguuaauaaacaagaaggaaagucauuauacguaaaaggagaaccaauaaucaauuucuacgauccccuagucuuucccucagaugaauuugacgcaagcaucucucaagucaacgaaaaaauaaaccaaucccuagccuucauaagaaaaucagaugaacuacuucauaacgucaacgccggaaaaucaacaaccaacauaaugaucacuacaaucauaauuguaauuauaguaauacuacuaucgcuaauugccguuggacuacuacuauauuguaaagcaagaucaacacccguuacucuauccaaagaucaauuaucaggaaucaacaacauagccuucucaaauuaa

SEQ ID NO: 6810 - RNA, 1608 nt, Artificial Sequence
  derived and/or modified CDS sequence (opt11) from HRSV(A2)__F_DSCav1_mut7
auggaacuacucauacuuaaagccaacgcaauaaccacaauccucaccgccgucacauucugcuucgccucgggacaaaacauaaccgaagaauuuuaccagucuaccugcuccgccgucuccaaggguuaccucuccgcgcuccgcaccgggugguacaccagcguuaucaccaucgaacuaucuaacauaaaagaaaacaagugcaacggaaccgacgcaaaagucaaacucaucaaacaagaacuagacaaauacaagaaugccgucaccgaacuacaaaugcucaugugcuccacccccgccaccggauccggcuccgccauugccuccggcgucgccguaugcaaaguccuucacuuggaaggagaaguuaacaaaauaaaaagcgcccuccugucgaccaacaaagcgguggucagccucuccaacggcgucucuguccucaccuucaaaguccucgaccucaagaacuacauagauaaacaacuacuccccauccuaaacaaacagucaugcagcauauccaacaucgaaaccgucauggaguuccaacagaaaaacaaccgccuccuugaaaucacccgcgaguucucugucaacgccggcgucaccacccccgucuccaccuacaugcucacaaacuccgaacuccucagccucaucaacgacaugccaaucaccaacgaccaaaagaaacucauguccaacaacguacaaaucguucgucaacaaucauacucaaucaugugcaucauuaaagaagaaguccucgcauacgucguccaacucccccucuauggggucaucgacaccccaugcuggaaacuccacaccucuccccuaugcaccaccaacaccaaagaaggcuccaacaucugccuaacccgaaccgaccgcggaugguacugcgacaacgccggcuccgucuccuucuucccccaggccgaaacauguaaagucugcuccaaccguguguucugcgacaccaugaacucacuaacccuccccuccgaagucaaccucugcaacgucgacaucuucaacccgaaauacgacugcaaaauaaugaccagcaaaacagacguauccucuagcgucauuaccagccuaggugcaaucguguccugcuacggcaaaacaaaaugcaccgccuccaacaaaaauaaaggaaucauaaaaaccuucuccaacggcugcgacuacgucagcaacaaaggagucgacaccgucuccguaggaaauacucuauacuaugucaacaaacaagaggguaaaucccucuacgucaaaggcgaacccaucaucaacuucuacgacccccucgucuuccccucugacgaguucgacgccagcauaucacaaguaaacgaaaagaucaaccaaucccucgcauucauucgcaaauccgacgaacuccuacacaacgucaacgccggaaaauccaccaccaacaucaugaucacuacuaucauuaucgucaucaucgucauccuccucucccucaucgcagucggccuucuacucuacugcaaggcacgcucuacacccguaacccugucuaaagaccaacucuccggcaucaacaacaucgcuuucuccaacuaa

SEQ ID NO: 6811 - RNA, 1884 nt, Artificial Sequence
  mRNA product Design a-1 comprising derived and/or modified sequence from HRSV(A2)__F_DSCav1_mut7 (opt1)
gggagagucccgcagucggcguccagcggcucugcuuguucgugugugugucguugcaggccuuauucaagcuuaccauggagcugcucauccugaaggccaacgccaucaccaccauccugacggcggugaccuucugcuucgccagcggccagaacaucaccgaggaguucuaccaguccacgugcagcgccgucuccaagggguaccucagcgcccugcggaccggcugguacaccuccgugaucaccaucgagcugagcaacaucaaggagaacaagugcaacgggaccgacgccaaggugaagcucaucaagcaggagcuggacaaguacaagaacgcggucacggagcugcagaugcugaugugcuccaccccggcaaccggcuccggcuccgccaucgcgagcggcgucgccgugugcaaggugcugcaccucgagggggaggucaacaagaucaagagcgcccugcuguccaccaacaaggccguggugagccucuccaacggcgucagcgugcugaccuucaaggugcuggaccucaagaacuacaucgacaagcagcugcugcccauccugaacaagcagagcugcuccaucagcaacaucgagacggugauggaguuccagcagaagaacaaccggcuccuggagaucacccgcgaguucagcgugaacgccggggucaccacccccguguccacguacaugcugaccaacagcgagcuccugucccugaucaacgacaugccgaucaccaacgaccagaagaagcucaugagcaacaacgugcagaucguccggcagcaguccuacagcaucaugugcaucaucaaggaggaggugcuggcguacgugguccagcugccccucuacggcgugaucgacacccccugcuggaagcugcacacgagcccccugugcaccaccaacaccaaggagggguccaacaucugccucacgcgcaccgaccggggcugguacugcgacaacgccggcagcgucuccuucuucccgcaggccgagaccugcaaggugugcagcaaccgcguguucugcgacaccaugaacucccugacgcugcccagcgagguaaaccucugcaacgucgacaucuucaaccccaaguacgacugcaagaucaugaccuccaagaccgacgugagcuccagcgugaucaccucccugggggccaucgucagcugcuacggcaagacgaagugcaccgccagcaacaagaacaaggggaucaucaagaccuucuccaacggcugcgacuacgugagcaacaagggcguggacaccguguccgucgggaacacccuguacuacgugaacaagcaggagggcaagagccucuacgugaagggggagcccaucaucaacuucuacgacccgcuggucuuccccuccgacgaguucgacgcgagcaucucccaggugaacgagaagaucaaccagagccuggccuucauccgcaaguccgacgagcugcuccacaacgugaacgccggcaagagcacgaccaacaucaugaucaccaccaucaucaucgucaucaucgugauccugcugucccucaucgccguggggcugcugcucuacugcaaggcccggagcacgcccgucacccuguccaaggaccagcugagcggcaucaacaacaucgcguucuccaacugaggacuagucccuguucccagagcccacuuuuuuuucuuuuuuugaaauaaaauagccugucuuucagaucuaaaaaaaaaaaaaaaaaaaaaaaaaaaaaaaaaaaaaaaaaaaaaaaaaaaaaaaaaaaaaaaaugcaucccccccccccccccccccccccccccccccaaaggcucuuuucagagccaccagaauu

SEQ ID NO: 6812 - RNA, 1884 nt, Artificial Sequence
  mRNA product Design a-1 comprising derived and/or modified sequence from HRSV(A2)__F_DSCav1_mut7 (opt1)
gggagagucccgcagucggcguccagcggcucugcuuguucgugugugugucguugcaggccuuauucaagcuuaccauggagcugcucauccugaaggccaacgccaucaccaccauccugacggcggugaccuucugcuucgccagcggccagaacaucaccgaggaguucuaccaguccacgugcagcgccgucuccaagggguaccucagcgcccugcgcaccggcugguacaccuccgugaucaccaucgagcugagcaacaucaaggagaacaagugcaacgggaccgacgccaaggugaagcucaucaagcaggagcuggacaaguacaagaacgcggucacggagcugcagaugcucaugugcuccacccccgccaccggcagcggguccgccaucgccagcggcguggcggugugcaagguccugcaccuggagggcgaggugaacaagaucaaguccgcccuccugagcaccaacaaggccguggucucccugagcaacgggguguccgugcucacguucaagguccuggaccugaagaacuacaucgacaagcagcuccugccgauccugaacaagcagagcugcuccaucagcaacaucgagaccgugauggaguuccagcagaagaacaaccggcuccuggagaucacccgcgaguucuccgugaacgccggcgucaccacgcccgugagcaccuacaugcugaccaacagcgagcuccugucccugaucaacgacaugcccaucaccaacgaccagaagaagcucaugagcaacaacgugcagaucguccggcagcaguccuacagcaucaugugcaucaucaaggaggaggugcuggccuacgugguccagcugccccucuacggggugaucgacacgccgugcuggaagcugcacaccagcccccugugcaccaccaacacgaaggagggcagcaacaucugccucacccgcaccgaccgggggugguacugcgacaacgcgggcuccgugagcuucuucccccaggccgagaccugcaaggucugcuccaaccgcguguucugcgacacgaugaacagccugacccugcccuccgaggucaaccucugcaacguggacaucuucaacccgaaguacgacugcaagaucaugaccagcaagaccgacguguccagcuccgucaucacgagccugggcgccaucguguccugcuacgggaagaccaagugcaccgccagcaacaagaacaagggcaucaucaagaccuucuccaacgggugcgacuacgugagcaacaagggcgucgacacggugagcgugggcaacacccuguacuacgucaacaagcaggaggggaagucccucuacgugaagggcgagcccaucaucaacuucuacgacccccugguguuccccagcgacgaguucgacgccuccaucagccaggucaacgagaagaucaaccagucccuggcguucauccggaaguccgacgagcuccugcacaacgugaacgccgggaaguccaccaccaacaucaugaucaccacgaucaucaucgugaucaucgucauccugcucagccugaucgccgugggccugcuccuguacugcaaggcccgcuccaccccggugacccugagcaaggaccagcuguccgggaucaacaacaucgccuucagcaacugaggacuagucccuguucccagagcccacuuuuuuuucuuuuuuugaaauaaaauagccugucuuucagaucuaaaaaaaaaaaaaaaaaaaaaaaaaaaaaaaaaaaaaaaaaaaaaaaaaaaaaaaaaaaaaaaaugcaucccccccccccccccccccccccccccccccaaaggcucuuuucagagccaccagaauu

SEQ ID NO: 6813 - RNA, 1884 nt, Artificial Sequence
  mRNA product Design a-1 comprising derived and/or modified sequence from HRSV(A2)__F_DSCav1_mut7 (opt2)
gggagagucccgcagucggcguccagcggcucugcuuguucgugugugugucguugcaggccuuauucaagcuuaccauggagcuccucauccucaaggccaacgccaucaccaccauccucaccgccgucaccuucugcuucgccuccggccagaacaucaccgaggaguucuaccaguccaccugcuccgccgucuccaagggcuaccucuccgcccuccgcaccggcugguacaccuccgucaucaccaucgagcucuccaacaucaaggagaacaagugcaacggcaccgacgccaaggucaagcucaucaagcaggagcucgacaaguacaagaacgccgucaccgagcuccagaugcucaugugcuccacccccgccaccggcuccggcuccgccaucgccuccggcgucgccgucugcaagguccuccaccucgagggcgaggucaacaagaucaaguccgcccuccucuccaccaacaaggccgucgucucccucuccaacggcgucuccguccucaccuucaagguccucgaccucaagaacuacaucgacaagcagcuccuccccauccucaacaagcaguccugcuccaucuccaacaucgagaccgucauggaguuccagcagaagaacaaccgccuccucgagaucacccgcgaguucuccgucaacgccggcgucaccacccccgucuccaccuacaugcucaccaacuccgagcuccucucccucaucaacgacaugcccaucaccaacgaccagaagaagcucauguccaacaacguccagaucguccgccagcaguccuacuccaucaugugcaucaucaaggaggagguccucgccuacgucguccagcucccccucuacggcgucaucgacacccccugcuggaagcuccacaccuccccccucugcaccaccaacaccaaggagggcuccaacaucugccucacccgcaccgaccgcggcugguacugcgacaacgccggcuccgucuccuucuucccccaggccgagaccugcaaggucugcuccaaccgcgucuucugcgacaccaugaacucccucacccuccccuccgaggucaaccucugcaacgucgacaucuucaaccccaaguacgacugcaagaucaugaccuccaagaccgacgucuccuccuccgucaucaccucccucggcgccaucgucuccugcuacggcaagaccaagugcaccgccuccaacaagaacaagggcaucaucaagaccuucuccaacggcugcgacuacgucuccaacaagggcgucgacaccgucuccgucggcaacacccucuacuacgucaacaagcaggagggcaagucccucuacgucaagggcgagcccaucaucaacuucuacgacccccucgucuuccccuccgacgaguucgacgccuccaucucccaggucaacgagaagaucaaccagucccucgccuucauccgcaaguccgacgagcuccuccacaacgucaacgccggcaaguccaccaccaacaucaugaucaccaccaucaucaucgucaucaucgucauccuccucucccucaucgccgucggccuccuccucuacugcaaggcccgcuccacccccgucacccucuccaaggaccagcucuccggcaucaacaacaucgccuucuccaacugaggacuagucccuguucccagagcccacuuuuuuuucuuuuuuugaaauaaaauagccugucuuucagaucuaaaaaaaaaaaaaaaaaaaaaaaaaaaaaaaaaaaaaaaaaaaaaaaaaaaaaaaaaaaaaaaaugcaucccccccccccccccccccccccccccccccaaaggcucuuuucagagccaccagaauu

SEQ ID NO: 6814 - RNA, 1884 nt, Artificial Sequence
  mRNA product Design a-1 comprising derived and/or modified sequence from HRSV(A2)__F_DSCav1_mut7 (opt3)
gggagagucccgcagucggcguccagcggcucugcuuguucgugugugugucguugcaggccuuauucaagcuuaccauggagcugcucauccuuaaggccaacgcuauuaccacaauacugacugcagugacguucugcuuugccagcggccagaauaucaccgaagaguucuaccaauccacauguucugcggucucaaaaggguauuugagugcuuuaagaacuggaugguacaccagcguuauuacaaucgaacuguccaacauuaaggagaauaaaugcaacgguaccgacgccaaggugaaacuaaucaagcaggaacucgauaaguauaaaaaugcaguaacugagcugcagaugcuuauguguucuacacccgccaccggcucggggucagcuauagcaagcggaguggccgucugcaaggugcugcacuuggagggcgaaguuaacaaaaucaagagugcucuccuguccacgaauaaagccguggucucucugagcaacgguguguccguacucacuuuuaagguuuuagaccugaagaauuacauugauaaacagcuuuugccuauccugaacaagcaaucauguaguauuagcaauaucgagaccgugauggaguuccagcagaaaaacaauaggcuacucgaaauaacacgggaguuuucugucaacgcgggggugacuaccccaguguccacauauaugcugaccaauucagaacuucugagcuugauuaacgacaugccgaucacgaacgaucagaagaaacucaugaguaauaacguccaaauuguucgccagcagucuuacuccaucaugugcaucauuaaggaggaagugcuggcauauguagugcaguuaccccuguacggagucauagacacuccuuguuggaaacuccauacaagcccacuuugcaccacuaauacaaaggagggcucgaacaucugucugacccgaacggaucguggcugguacugcgacaaugccgggucuguguccuucuuuccccaagcugaaaccuguaagguuugcucaaacagaguguucugcgauacaaugaauaguuugacucuaccuagcgaggucaaccuguguaauguggacauuuuuaacccaaaauaugauugcaagaucaugaccuccaaaacagacguaucuagcucaguuauaacuagccucggagccauuguguccuguuacgguaagaccaaaugcacagcaagcaauaagaacaagggcaucaucaaaaccuucucuaaugggugugauuaugucucaaacaagggaguggacacugucagugugggcaauacgcuguacuauguuaacaaacaggaggguaagagccuuuacgugaaaggggaacccauuaucaacuuuuaugacccucugguauucccauccgaugaguuugacgcuucuauuucgcaggucaaugaaaagauaaaccaaaguuuggccuucaucaggaaguccgaugagcuccugcacaaugugaacgcgggaaaaucaacaaccaauauuaugaucacuaccaucauuauaguuaucauugugaucuuacugagucuaauugccgucggccuccugcuuuacugcaaggcacggucuacaccggugaccuugagcaaagaccagcuguccggcaucaacaauauagcuuucucaaacugaggacuagucccuguucccagagcccacuuuuuuuucuuuuuuugaaauaaaauagccugucuuucagaucuaaaaaaaaaaaaaaaaaaaaaaaaaaaaaaaaaaaaaaaaaaaaaaaaaaaaaaaaaaaaaaaaugcaucccccccccccccccccccccccccccccccaaaggcucuuuucagagccaccagaauu

SEQ ID NO: 6815 - RNA, 1884 nt, Artificial Sequence
  mRNA product Design a-1 comprising derived and/or modified sequence from HRSV(A2)__F_DSCav1_mut7 (opt4)
gggagagucccgcagucggcguccagcggcucugcuuguucgugugugugucguugcaggccuuauucaagcuuaccauggagcugcugauccugaaggccaacgccaucaccaccauccugaccgccgugaccuucugcuucgccagcggccagaacaucaccgaggaguucuaccagagcaccugcagcgccgugagcaagggcuaccugagcgcccugagaaccggcugguacaccagcgugaucaccaucgagcugagcaacaucaaggagaacaagugcaacggcaccgacgccaaggugaagcugaucaagcaggagcuggacaaguacaagaacgccgugaccgagcugcagaugcugaugugcagcacccccgccaccggcagcggcagcgccaucgccagcggcguggccgugugcaaggugcugcaccuggagggcgaggugaacaagaucaagagcgcccugcugagcaccaacaaggccguggugagccugagcaacggcgugagcgugcugaccuucaaggugcuggaccugaagaacuacaucgacaagcagcugcugcccauccugaacaagcagagcugcagcaucagcaacaucgagaccgugauggaguuccagcagaagaacaacagacugcuggagaucaccagagaguucagcgugaacgccggcgugaccacccccgugagcaccuacaugcugaccaacagcgagcugcugagccugaucaacgacaugcccaucaccaacgaccagaagaagcugaugagcaacaacgugcagaucgugagacagcagagcuacagcaucaugugcaucaucaaggaggaggugcuggccuacguggugcagcugccccuguacggcgugaucgacacccccugcuggaagcugcacaccagcccccugugcaccaccaacaccaaggagggcagcaacaucugccugaccagaaccgacagaggcugguacugcgacaacgccggcagcgugagcuucuucccccaggccgagaccugcaaggugugcagcaacagaguguucugcgacaccaugaacagccugacccugcccagcgaggugaaccugugcaacguggacaucuucaaccccaaguacgacugcaagaucaugaccagcaagaccgacgugagcagcagcgugaucaccagccugggcgccaucgugagcugcuacggcaagaccaagugcaccgccagcaacaagaacaagggcaucaucaagaccuucagcaacggcugcgacuacgugagcaacaagggcguggacaccgugagcgugggcaacacccuguacuacgugaacaagcaggagggcaagagccuguacgugaagggcgagcccaucaucaacuucuacgacccccugguguuccccagcgacgaguucgacgccagcaucagccaggugaacgagaagaucaaccagagccuggccuucaucagaaagagcgacgagcugcugcacaacgugaacgccggcaagagcaccaccaacaucaugaucaccaccaucaucaucgugaucaucgugauccugcugagccugaucgccgugggccugcugcuguacugcaaggccagaagcacccccgugacccugagcaaggaccagcugagcggcaucaacaacaucgccuucagcaacugaggacuagucccuguucccagagcccacuuuuuuuucuuuuuuugaaauaaaauagccugucuuucagaucuaaaaaaaaaaaaaaaaaaaaaaaaaaaaaaaaaaaaaaaaaaaaaaaaaaaaaaaaaaaaaaaaugcaucccccccccccccccccccccccccccccccaaaggcucuuuucagagccaccagaauu

SEQ ID NO: 6816 - RNA, 1884 nt, Artificial Sequence
  mRNA product Design a-1 comprising derived and/or modified sequence from HRSV(A2)__F_DSCav1_mut7 (opt5)
gggagagucccgcagucggcguccagcggcucugcuuguucgugugugugucguugcaggccuuauucaagcuuaccauggagcugcucauccugaaggccaacgcuauuaccacaauccuuacggccgugaccuucugcuuugcgagcggccagaauauuacagaagaguucuaccaauccaccuguucugcugucagcaaaggguaucuguccgcccucagaacaggaugguacaccucuguuaucacaauugaacugagcaacaucaaggagaauaaaugcaacggcaccgacgccaaggugaaacuuaucaagcaggaacuggauaaguauaaaaaugcugugacggagcuccagaugcugauguguuccacccccgccacagggucuggaagcgcuauugccuccggcgucgcggugugcaagguucugcaccucgagggggaagugaacaaaaucaagagcgcccugcuuucuaccaauaaagcugucgugucccugagcaacggaguuucugugcucacauuuaagguccuggaccuuaagaauuacauugauaaacagcugcucccuauccugaacaagcaauccuguagcauuucuaauaucgagaccgugauggaguuccagcagaaaaacaaucggcugcucgaaauuacgcgcgaguuuuccgugaacgccggcgucacaaccccgguuagcacauauaugcugaccaauuccgaacuucugucucucaucaacgacaugcccaucaccaacgaucagaagaaacugaugagcaauaacgugcaaauugugagacagcaguccuacagcaucaugugcauuaucaaggaggaaguccuugcuuaugugguucagcugccucucuacggcgugauugacacacccuguuggaaacugcauacgucuccucugugcaccacaaauaccaaggagggguccaacaucugucucacacggaccgaucgcggaugguacugcgacaaugccggcagcgucucuuucuuuccccaagcggaaacguguaaggugugcagcaacagaguuuucugcgauacaaugaacucccugacccuuccuucugaggugaaucuguguaaugucgacaucuuuaacccgaaauaugauugcaagauuaugaccagcaaaacagacguguccagcucugucaucaccucccucggggccauugugagcuguuacggaaagacaaaaugcacggcuucuaauaagaacaagggcaucauuaaaaccuucuccaaugggugugauuauguuagcaacaagggaguggacacagucuccgugggcaauacccuguacuauguuaacaaacaggagggcaagucucuuuacgugaaaggggaacccaucaucaacuuuuaugacccucuggucuuccccagcgaugaguuugacgccuccauuucucaggugaaugaaaagaucaaccaaagccucgcuuucauucggaaguccgaugagcugcugcacaaugugaacgccggaaaaagcacaaccaauaucaugauuacgaccaucauuaucguuaucauugucauccuccugucucuuauugccgugggccugcuccuguacugcaaggcucgcuccacaccugugacccugagcaaagaccagcuuucugggaucaacaauauugcguucuccaacugaggacuagucccuguucccagagcccacuuuuuuuucuuuuuuugaaauaaaauagccugucuuucagaucuaaaaaaaaaaaaaaaaaaaaaaaaaaaaaaaaaaaaaaaaaaaaaaaaaaaaaaaaaaaaaaaaugcaucccccccccccccccccccccccccccccccaaaggcucuuuucagagccaccagaauu

SEQ ID NO: 6817 - RNA, 1884 nt, Artificial Sequence
  mRNA product Design a-1 comprising derived and/or modified sequence from HRSV(A2)__F_DSCav1_mut7 (opt6)
gggagagucccgcagucggcguccagcggcucugcuuguucgugugugugucguugcaggccuuauucaagcuuaccauggaauuacucauacucaaagcaaaugcaauuaccacuauacucacagcuguaacuuuuuguuucgccucaggacaaaacaucacagaagaauuuuaucaauccacaugcucugccguaucaaaaggcuaccuaucugcccuaagaacagguugguacacaucuguaauaacaaucgaauuauccaacaucaaagaaaacaaaugcaacggcacagacgcaaaagucaaacucaucaaacaagaauuagauaaauauaaaaacgcaguaacagaacuacaaaugcuaaugugcucuacacccgccacaggaucaggauccgcaaucgcuucuggaguagccguuugcaaaguauuacaccuagaaggagaaguaaauaaaauaaaauccgcacuacuaucaacuaauaaagcaguaguaucacuuucuaaugguguaucaguauuaacauucaaaguccucgaccuaaaaaauuacaucgacaaacaacuauuacccauccuuaauaaacaaucaugcuccauaucaaacauagaaacugucauggaauuucaacaaaaaaacaauagacuucuagaaaucacaagagaauuuucuguaaaugcaggaguaacuacaccaguaucaacauauauguuaaccaacuccgaacuacuaucacucauaaacgacaugccaauaacaaacgaccaaaaaaaacuaaugucaaauaacguucaaauaguaagacaacaaucauacucaaucaugugcauaauaaaagaagaaguuuuagcauacgucguacaacuuccccuauacggaguaauagacaccccuugcuggaaacuccacaccucaccacuaugcacuacaaacacaaaagaagguuccaacaucugcuuaacaagaaccgaucgaggaugguacugcgacaacgcugguuccguaucuuucuucccacaagcagaaacaugcaaaguaugcuccaauagaguauucugcgacaccaugaacucacuaacucuaccauccgaaguaaaccuaugcaacgucgacauauuuaauccaaaauaugacugcaaaauaaugacuucaaaaacagacguauccucaucaguaauaacauccuuaggagcaauaguaucauguuacggcaagacaaaauguacagccucaaacaaaaacaaagguaucauuaaaaccuucuccaacggcugcgacuacguaucaaauaaaggugucgauacaguaucaguaggaaacacacucuauuacguuaauaaacaagaaggaaagucauuauacguaaaaggagaaccaauaaucaauuucuacgauccccuagucuuucccucagaugaauuugacgcaagcaucucucaagucaacgaaaaaauaaaccaaucccuagccuucauaagaaaaucagaugaacuacuucauaacgucaacgccggaaaaucaacaaccaacauaaugaucacuacaaucauaauuguaauuauaguaauacuacuaucgcuaauugccguuggacuacuacuauauuguaaagcaagaucaacacccguuacucuauccaaagaucaauuaucaggaaucaacaacauagccuucucaaauuaaggacuagucccuguucccagagcccacuuuuuuuucuuuuuuugaaauaaaauagccugucuuucagaucuaaaaaaaaaaaaaaaaaaaaaaaaaaaaaaaaaaaaaaaaaaaaaaaaaaaaaaaaaaaaaaaaugcaucccccccccccccccccccccccccccccccaaaggcucuuuucagagccaccagaauu

SEQ ID NO: 6818 - RNA, 1884 nt, Artificial Sequence
  mRNA product Design a-1 comprising derived and/or modified sequence from HRSV(A2)__F_DSCav1_mut7 (opt11)
gggagagucccgcagucggcguccagcggcucugcuuguucgugugugugucguugcaggccuuauucaagcuuaccauggaacuacucauacuuaaagccaacgcaauaaccacaauccucaccgccgucacauucugcuucgccucgggacaaaacauaaccgaagaauuuuaccagucuaccugcuccgccgucuccaaggguuaccucuccgcgcuccgcaccgggugguacaccagcguuaucaccaucgaacuaucuaacauaaaagaaaacaagugcaacggaaccgacgcaaaagucaaacucaucaaacaagaacuagacaaauacaagaaugccgucaccgaacuacaaaugcucaugugcuccacccccgccaccggauccggcuccgccauugccuccggcgucgccguaugcaaaguccuucacuuggaaggagaaguuaacaaaauaaaaagcgcccuccugucgaccaacaaagcgguggucagccucuccaacggcgucucuguccucaccuucaaaguccucgaccucaagaacuacauagauaaacaacuacuccccauccuaaacaaacagucaugcagcauauccaacaucgaaaccgucauggaguuccaacagaaaaacaaccgccuccuugaaaucacccgcgaguucucugucaacgccggcgucaccacccccgucuccaccuacaugcucacaaacuccgaacuccucagccucaucaacgacaugccaaucaccaacgaccaaaagaaacucauguccaacaacguacaaaucguucgucaacaaucauacucaaucaugugcaucauuaaagaagaaguccucgcauacgucguccaacucccccucuauggggucaucgacaccccaugcuggaaacuccacaccucuccccuaugcaccaccaacaccaaagaaggcuccaacaucugccuaacccgaaccgaccgcggaugguacugcgacaacgccggcuccgucuccuucuucccccaggccgaaacauguaaagucugcuccaaccguguguucugcgacaccaugaacucacuaacccuccccuccgaagucaaccucugcaacgucgacaucuucaacccgaaauacgacugcaaaauaaugaccagcaaaacagacguauccucuagcgucauuaccagccuaggugcaaucguguccugcuacggcaaaacaaaaugcaccgccuccaacaaaaauaaaggaaucauaaaaaccuucuccaacggcugcgacuacgucagcaacaaaggagucgacaccgucuccguaggaaauacucuauacuaugucaacaaacaagaggguaaaucccucuacgucaaaggcgaacccaucaucaacuucuacgacccccucgucuuccccucugacgaguucgacgccagcauaucacaaguaaacgaaaagaucaaccaaucccucgcauucauucgcaaauccgacgaacuccuacacaacgucaacgccggaaaauccaccaccaacaucaugaucacuacuaucauuaucgucaucaucgucauccuccucucccucaucgcagucggccuucuacucuacugcaaggcacgcucuacacccguaacccugucuaaagaccaacucuccggcaucaacaacaucgcuuucuccaacuaaggacuagucccuguucccagagcccacuuuuuuuucuuuuuuugaaauaaaauagccugucuuucagaucuaaaaaaaaaaaaaaaaaaaaaaaaaaaaaaaaaaaaaaaaaaaaaaaaaaaaaaaaaaaaaaaaugcaucccccccccccccccccccccccccccccccaaaggcucuuuucagagccaccagaauu

SEQ ID NO: 6819 - RNA, 1903 nt, Artificial Sequence
  mRNA product Design a-2 comprising derived and/or modified sequence from HRSV(A2)__F_DSCav1_mut7 (opt1)
gggagaguccgcucagccagguugcagaagcggcuuagcguguguccuaaucuucucucugcguguagguaggccugugccgcaaacaagcuuaccauggagcugcucauccugaaggccaacgccaucaccaccauccugacggcggugaccuucugcuucgccagcggccagaacaucaccgaggaguucuaccaguccacgugcagcgccgucuccaagggguaccucagcgcccugcggaccggcugguacaccuccgugaucaccaucgagcugagcaacaucaaggagaacaagugcaacgggaccgacgccaaggugaagcucaucaagcaggagcuggacaaguacaagaacgcggucacggagcugcagaugcugaugugcuccaccccggcaaccggcuccggcuccgccaucgcgagcggcgucgccgugugcaaggugcugcaccucgagggggaggucaacaagaucaagagcgcccugcuguccaccaacaaggccguggugagccucuccaacggcgucagcgugcugaccuucaaggugcuggaccucaagaacuacaucgacaagcagcugcugcccauccugaacaagcagagcugcuccaucagcaacaucgagacggugauggaguuccagcagaagaacaaccggcuccuggagaucacccgcgaguucagcgugaacgccggggucaccacccccguguccacguacaugcugaccaacagcgagcuccugucccugaucaacgacaugccgaucaccaacgaccagaagaagcucaugagcaacaacgugcagaucguccggcagcaguccuacagcaucaugugcaucaucaaggaggaggugcuggcguacgugguccagcugccccucuacggcgugaucgacacccccugcuggaagcugcacacgagcccccugugcaccaccaacaccaaggagggguccaacaucugccucacgcgcaccgaccggggcugguacugcgacaacgccggcagcgucuccuucuucccgcaggccgagaccugcaaggugugcagcaaccgcguguucugcgacaccaugaacucccugacgcugcccagcgagguaaaccucugcaacgucgacaucuucaaccccaaguacgacugcaagaucaugaccuccaagaccgacgugagcuccagcgugaucaccucccugggggccaucgucagcugcuacggcaagacgaagugcaccgccagcaacaagaacaaggggaucaucaagaccuucuccaacggcugcgacuacgugagcaacaagggcguggacaccguguccgucgggaacacccuguacuacgugaacaagcaggagggcaagagccucuacgugaagggggagcccaucaucaacuucuacgacccgcuggucuuccccuccgacgaguucgacgcgagcaucucccaggugaacgagaagaucaaccagagccuggccuucauccgcaaguccgacgagcugcuccacaacgugaacgccggcaagagcacgaccaacaucaugaucaccaccaucaucaucgucaucaucgugauccugcugucccucaucgccguggggcugcugcucuacugcaaggcccggagcacgcccgucacccuguccaaggaccagcugagcggcaucaacaacaucgcguucuccaacugaggacuagucccuguucccagagcccacuuuuuuuucuuuuuuugaaauaaaauagccugucuuucagaucuaaaaaaaaaaaaaaaaaaaaaaaaaaaaaaaaaaaaaaaaaaaaaaaaaaaaaaaaaaaaaaaaugcaucccccccccccccccccccccccccccccccaaaggcucuuuucagagccaccagaauu

SEQ ID NO: 6820 - RNA, 1903 nt, Artificial Sequence
  mRNA product Design a-2 comprising derived and/or modified sequence from HRSV(A2)__F_DSCav1_mut7 (opt1)
gggagaguccgcucagccagguugcagaagcggcuuagcguguguccuaaucuucucucugcguguagguaggccugugccgcaaacaagcuuaccauggagcugcucauccugaaggccaacgccaucaccaccauccugacggcggugaccuucugcuucgccagcggccagaacaucaccgaggaguucuaccaguccacgugcagcgccgucuccaagggguaccucagcgcccugcgcaccggcugguacaccuccgugaucaccaucgagcugagcaacaucaaggagaacaagugcaacgggaccgacgccaaggugaagcucaucaagcaggagcuggacaaguacaagaacgcggucacggagcugcagaugcucaugugcuccacccccgccaccggcagcggguccgccaucgccagcggcguggcggugugcaagguccugcaccuggagggcgaggugaacaagaucaaguccgcccuccugagcaccaacaaggccguggucucccugagcaacgggguguccgugcucacguucaagguccuggaccugaagaacuacaucgacaagcagcuccugccgauccugaacaagcagagcugcuccaucagcaacaucgagaccgugauggaguuccagcagaagaacaaccggcuccuggagaucacccgcgaguucuccgugaacgccggcgucaccacgcccgugagcaccuacaugcugaccaacagcgagcuccugucccugaucaacgacaugcccaucaccaacgaccagaagaagcucaugagcaacaacgugcagaucguccggcagcaguccuacagcaucaugugcaucaucaaggaggaggugcuggccuacgugguccagcugccccucuacggggugaucgacacgccgugcuggaagcugcacaccagcccccugugcaccaccaacacgaaggagggcagcaacaucugccucacccgcaccgaccgggggugguacugcgacaacgcgggcuccgugagcuucuucccccaggccgagaccugcaaggucugcuccaaccgcguguucugcgacacgaugaacagccugacccugcccuccgaggucaaccucugcaacguggacaucuucaacccgaaguacgacugcaagaucaugaccagcaagaccgacguguccagcuccgucaucacgagccugggcgccaucguguccugcuacgggaagaccaagugcaccgccagcaacaagaacaagggcaucaucaagaccuucuccaacgggugcgacuacgugagcaacaagggcgucgacacggugagcgugggcaacacccuguacuacgucaacaagcaggaggggaagucccucuacgugaagggcgagcccaucaucaacuucuacgacccccugguguuccccagcgacgaguucgacgccuccaucagccaggucaacgagaagaucaaccagucccuggcguucauccggaaguccgacgagcuccugcacaacgugaacgccgggaaguccaccaccaacaucaugaucaccacgaucaucaucgugaucaucgucauccugcucagccugaucgccgugggccugcuccuguacugcaaggcccgcuccaccccggugacccugagcaaggaccagcuguccgggaucaacaacaucgccuucagcaacugaggacuagucccuguucccagagcccacuuuuuuuucuuuuuuugaaauaaaauagccugucuuucagaucuaaaaaaaaaaaaaaaaaaaaaaaaaaaaaaaaaaaaaaaaaaaaaaaaaaaaaaaaaaaaaaaaugcaucccccccccccccccccccccccccccccccaaaggcucuuuucagagccaccagaauu

SEQ ID NO: 6821 - RNA, 1903 nt, Artificial Sequence
  mRNA product Design a-2 comprising derived and/or modified sequence from HRSV(A2)__F_DSCav1_mut7 (opt2)
gggagaguccgcucagccagguugcagaagcggcuuagcguguguccuaaucuucucucugcguguagguaggccugugccgcaaacaagcuuaccauggagcuccucauccucaaggccaacgccaucaccaccauccucaccgccgucaccuucugcuucgccuccggccagaacaucaccgaggaguucuaccaguccaccugcuccgccgucuccaagggcuaccucuccgcccuccgcaccggcugguacaccuccgucaucaccaucgagcucuccaacaucaaggagaacaagugcaacggcaccgacgccaaggucaagcucaucaagcaggagcucgacaaguacaagaacgccgucaccgagcuccagaugcucaugugcuccacccccgccaccggcuccggcuccgccaucgccuccggcgucgccgucugcaagguccuccaccucgagggcgaggucaacaagaucaaguccgcccuccucuccaccaacaaggccgucgucucccucuccaacggcgucuccguccucaccuucaagguccucgaccucaagaacuacaucgacaagcagcuccuccccauccucaacaagcaguccugcuccaucuccaacaucgagaccgucauggaguuccagcagaagaacaaccgccuccucgagaucacccgcgaguucuccgucaacgccggcgucaccacccccgucuccaccuacaugcucaccaacuccgagcuccucucccucaucaacgacaugcccaucaccaacgaccagaagaagcucauguccaacaacguccagaucguccgccagcaguccuacuccaucaugugcaucaucaaggaggagguccucgccuacgucguccagcucccccucuacggcgucaucgacacccccugcuggaagcuccacaccuccccccucugcaccaccaacaccaaggagggcuccaacaucugccucacccgcaccgaccgcggcugguacugcgacaacgccggcuccgucuccuucuucccccaggccgagaccugcaaggucugcuccaaccgcgucuucugcgacaccaugaacucccucacccuccccuccgaggucaaccucugcaacgucgacaucuucaaccccaaguacgacugcaagaucaugaccuccaagaccgacgucuccuccuccgucaucaccucccucggcgccaucgucuccugcuacggcaagaccaagugcaccgccuccaacaagaacaagggcaucaucaagaccuucuccaacggcugcgacuacgucuccaacaagggcgucgacaccgucuccgucggcaacacccucuacuacgucaacaagcaggagggcaagucccucuacgucaagggcgagcccaucaucaacuucuacgacccccucgucuuccccuccgacgaguucgacgccuccaucucccaggucaacgagaagaucaaccagucccucgccuucauccgcaaguccgacgagcuccuccacaacgucaacgccggcaaguccaccaccaacaucaugaucaccaccaucaucaucgucaucaucgucauccuccucucccucaucgccgucggccuccuccucuacugcaaggcccgcuccacccccgucacccucuccaaggaccagcucuccggcaucaacaacaucgccuucuccaacugaggacuagucccuguucccagagcccacuuuuuuuucuuuuuuugaaauaaaauagccugucuuucagaucuaaaaaaaaaaaaaaaaaaaaaaaaaaaaaaaaaaaaaaaaaaaaaaaaaaaaaaaaaaaaaaaaugcaucccccccccccccccccccccccccccccccaaaggcucuuuucagagccaccagaauu

SEQ ID NO: 6822 - RNA, 1903 nt, Artificial Sequence
  mRNA product Design a-2 comprising derived and/or modified sequence from HRSV(A2)__F_DSCav1_mut7 (opt3)
gggagaguccgcucagccagguugcagaagcggcuuagcguguguccuaaucuucucucugcguguagguaggccugugccgcaaacaagcuuaccauggagcugcucauccuuaaggccaacgcuauuaccacaauacugacugcagugacguucugcuuugccagcggccagaauaucaccgaagaguucuaccaauccacauguucugcggucucaaaaggguauuugagugcuuuaagaacuggaugguacaccagcguuauuacaaucgaacuguccaacauuaaggagaauaaaugcaacgguaccgacgccaaggugaaacuaaucaagcaggaacucgauaaguauaaaaaugcaguaacugagcugcagaugcuuauguguucuacacccgccaccggcucggggucagcuauagcaagcggaguggccgucugcaaggugcugcacuuggagggcgaaguuaacaaaaucaagagugcucuccuguccacgaauaaagccguggucucucugagcaacgguguguccguacucacuuuuaagguuuuagaccugaagaauuacauugauaaacagcuuuugccuauccugaacaagcaaucauguaguauuagcaauaucgagaccgugauggaguuccagcagaaaaacaauaggcuacucgaaauaacacgggaguuuucugucaacgcgggggugacuaccccaguguccacauauaugcugaccaauucagaacuucugagcuugauuaacgacaugccgaucacgaacgaucagaagaaacucaugaguaauaacguccaaauuguucgccagcagucuuacuccaucaugugcaucauuaaggaggaagugcuggcauauguagugcaguuaccccuguacggagucauagacacuccuuguuggaaacuccauacaagcccacuuugcaccacuaauacaaaggagggcucgaacaucugucugacccgaacggaucguggcugguacugcgacaaugccgggucuguguccuucuuuccccaagcugaaaccuguaagguuugcucaaacagaguguucugcgauacaaugaauaguuugacucuaccuagcgaggucaaccuguguaauguggacauuuuuaacccaaaauaugauugcaagaucaugaccuccaaaacagacguaucuagcucaguuauaacuagccucggagccauuguguccuguuacgguaagaccaaaugcacagcaagcaauaagaacaagggcaucaucaaaaccuucucuaaugggugugauuaugucucaaacaagggaguggacacugucagugugggcaauacgcuguacuauguuaacaaacaggaggguaagagccuuuacgugaaaggggaacccauuaucaacuuuuaugacccucugguauucccauccgaugaguuugacgcuucuauuucgcaggucaaugaaaagauaaaccaaaguuuggccuucaucaggaaguccgaugagcuccugcacaaugugaacgcgggaaaaucaacaaccaauauuaugaucacuaccaucauuauaguuaucauugugaucuuacugagucuaauugccgucggccuccugcuuuacugcaaggcacggucuacaccggugaccuugagcaaagaccagcuguccggcaucaacaauauagcuuucucaaacugaggacuagucccuguucccagagcccacuuuuuuuucuuuuuuugaaauaaaauagccugucuuucagaucuaaaaaaaaaaaaaaaaaaaaaaaaaaaaaaaaaaaaaaaaaaaaaaaaaaaaaaaaaaaaaaaaugcaucccccccccccccccccccccccccccccccaaaggcucuuuucagagccaccagaauu

SEQ ID NO: 6823 - RNA, 1903 nt, Artificial Sequence
  mRNA product Design a-2 comprising derived and/or modified sequence from HRSV(A2)__F_DSCav1_mut7 (opt4)
gggagaguccgcucagccagguugcagaagcggcuuagcguguguccuaaucuucucucugcguguagguaggccugugccgcaaacaagcuuaccauggagcugcugauccugaaggccaacgccaucaccaccauccugaccgccgugaccuucugcuucgccagcggccagaacaucaccgaggaguucuaccagagcaccugcagcgccgugagcaagggcuaccugagcgcccugagaaccggcugguacaccagcgugaucaccaucgagcugagcaacaucaaggagaacaagugcaacggcaccgacgccaaggugaagcugaucaagcaggagcuggacaaguacaagaacgccgugaccgagcugcagaugcugaugugcagcacccccgccaccggcagcggcagcgccaucgccagcggcguggccgugugcaaggugcugcaccuggagggcgaggugaacaagaucaagagcgcccugcugagcaccaacaaggccguggugagccugagcaacggcgugagcgugcugaccuucaaggugcuggaccugaagaacuacaucgacaagcagcugcugcccauccugaacaagcagagcugcagcaucagcaacaucgagaccgugauggaguuccagcagaagaacaacagacugcuggagaucaccagagaguucagcgugaacgccggcgugaccacccccgugagcaccuacaugcugaccaacagcgagcugcugagccugaucaacgacaugcccaucaccaacgaccagaagaagcugaugagcaacaacgugcagaucgugagacagcagagcuacagcaucaugugcaucaucaaggaggaggugcuggccuacguggugcagcugccccuguacggcgugaucgacacccccugcuggaagcugcacaccagcccccugugcaccaccaacaccaaggagggcagcaacaucugccugaccagaaccgacagaggcugguacugcgacaacgccggcagcgugagcuucuucccccaggccgagaccugcaaggugugcagcaacagaguguucugcgacaccaugaacagccugacccugcccagcgaggugaaccugugcaacguggacaucuucaaccccaaguacgacugcaagaucaugaccagcaagaccgacgugagcagcagcgugaucaccagccugggcgccaucgugagcugcuacggcaagaccaagugcaccgccagcaacaagaacaagggcaucaucaagaccuucagcaacggcugcgacuacgugagcaacaagggcguggacaccgugagcgugggcaacacccuguacuacgugaacaagcaggagggcaagagccuguacgugaagggcgagcccaucaucaacuucuacgacccccugguguuccccagcgacgaguucgacgccagcaucagccaggugaacgagaagaucaaccagagccuggccuucaucagaaagagcgacgagcugcugcacaacgugaacgccggcaagagcaccaccaacaucaugaucaccaccaucaucaucgugaucaucgugauccugcugagccugaucgccgugggccugcugcuguacugcaaggccagaagcacccccgugacccugagcaaggaccagcugagcggcaucaacaacaucgccuucagcaacugaggacuagucccuguucccagagcccacuuuuuuuucuuuuuuugaaauaaaauagccugucuuucagaucuaaaaaaaaaaaaaaaaaaaaaaaaaaaaaaaaaaaaaaaaaaaaaaaaaaaaaaaaaaaaaaaaugcaucccccccccccccccccccccccccccccccaaaggcucuuuucagagccaccagaauu

SEQ ID NO: 6824 - RNA, 1903 nt, Artificial Sequence
  mRNA product Design a-2 comprising derived and/or modified sequence from HRSV(A2)__F_DSCav1_mut7 (opt5)
gggagaguccgcucagccagguugcagaagcggcuuagcguguguccuaaucuucucucugcguguagguaggccugugccgcaaacaagcuuaccauggagcugcucauccugaaggccaacgcuauuaccacaauccuuacggccgugaccuucugcuuugcgagcggccagaauauuacagaagaguucuaccaauccaccuguucugcugucagcaaaggguaucuguccgcccucagaacaggaugguacaccucuguuaucacaauugaacugagcaacaucaaggagaauaaaugcaacggcaccgacgccaaggugaaacuuaucaagcaggaacuggauaaguauaaaaaugcugugacggagcuccagaugcugauguguuccacccccgccacagggucuggaagcgcuauugccuccggcgucgcggugugcaagguucugcaccucgagggggaagugaacaaaaucaagagcgcccugcuuucuaccaauaaagcugucgugucccugagcaacggaguuucugugcucacauuuaagguccuggaccuuaagaauuacauugauaaacagcugcucccuauccugaacaagcaauccuguagcauuucuaauaucgagaccgugauggaguuccagcagaaaaacaaucggcugcucgaaauuacgcgcgaguuuuccgugaacgccggcgucacaaccccgguuagcacauauaugcugaccaauuccgaacuucugucucucaucaacgacaugcccaucaccaacgaucagaagaaacugaugagcaauaacgugcaaauugugagacagcaguccuacagcaucaugugcauuaucaaggaggaaguccuugcuuaugugguucagcugccucucuacggcgugauugacacacccuguuggaaacugcauacgucuccucugugcaccacaaauaccaaggagggguccaacaucugucucacacggaccgaucgcggaugguacugcgacaaugccggcagcgucucuuucuuuccccaagcggaaacguguaaggugugcagcaacagaguuuucugcgauacaaugaacucccugacccuuccuucugaggugaaucuguguaaugucgacaucuuuaacccgaaauaugauugcaagauuaugaccagcaaaacagacguguccagcucugucaucaccucccucggggccauugugagcuguuacggaaagacaaaaugcacggcuucuaauaagaacaagggcaucauuaaaaccuucuccaaugggugugauuauguuagcaacaagggaguggacacagucuccgugggcaauacccuguacuauguuaacaaacaggagggcaagucucuuuacgugaaaggggaacccaucaucaacuuuuaugacccucuggucuuccccagcgaugaguuugacgccuccauuucucaggugaaugaaaagaucaaccaaagccucgcuuucauucggaaguccgaugagcugcugcacaaugugaacgccggaaaaagcacaaccaauaucaugauuacgaccaucauuaucguuaucauugucauccuccugucucuuauugccgugggccugcuccuguacugcaaggcucgcuccacaccugugacccugagcaaagaccagcuuucugggaucaacaauauugcguucuccaacugaggacuagucccuguucccagagcccacuuuuuuuucuuuuuuugaaauaaaauagccugucuuucagaucuaaaaaaaaaaaaaaaaaaaaaaaaaaaaaaaaaaaaaaaaaaaaaaaaaaaaaaaaaaaaaaaaugcaucccccccccccccccccccccccccccccccaaaggcucuuuucagagccaccagaauu

SEQ ID NO: 6825 - RNA, 1903 nt, Artificial Sequence
  mRNA product Design a-2 comprising derived and/or modified sequence from HRSV(A2)__F_DSCav1_mut7 (opt6)
gggagaguccgcucagccagguugcagaagcggcuuagcguguguccuaaucuucucucugcguguagguaggccugugccgcaaacaagcuuaccauggaauuacucauacucaaagcaaaugcaauuaccacuauacucacagcuguaacuuuuuguuucgccucaggacaaaacaucacagaagaauuuuaucaauccacaugcucugccguaucaaaaggcuaccuaucugcccuaagaacagguugguacacaucuguaauaacaaucgaauuauccaacaucaaagaaaacaaaugcaacggcacagacgcaaaagucaaacucaucaaacaagaauuagauaaauauaaaaacgcaguaacagaacuacaaaugcuaaugugcucuacacccgccacaggaucaggauccgcaaucgcuucuggaguagccguuugcaaaguauuacaccuagaaggagaaguaaauaaaauaaaauccgcacuacuaucaacuaauaaagcaguaguaucacuuucuaaugguguaucaguauuaacauucaaaguccucgaccuaaaaaauuacaucgacaaacaacuauuacccauccuuaauaaacaaucaugcuccauaucaaacauagaaacugucauggaauuucaacaaaaaaacaauagacuucuagaaaucacaagagaauuuucuguaaaugcaggaguaacuacaccaguaucaacauauauguuaaccaacuccgaacuacuaucacucauaaacgacaugccaauaacaaacgaccaaaaaaaacuaaugucaaauaacguucaaauaguaagacaacaaucauacucaaucaugugcauaauaaaagaagaaguuuuagcauacgucguacaacuuccccuauacggaguaauagacaccccuugcuggaaacuccacaccucaccacuaugcacuacaaacacaaaagaagguuccaacaucugcuuaacaagaaccgaucgaggaugguacugcgacaacgcugguuccguaucuuucuucccacaagcagaaacaugcaaaguaugcuccaauagaguauucugcgacaccaugaacucacuaacucuaccauccgaaguaaaccuaugcaacgucgacauauuuaauccaaaauaugacugcaaaauaaugacuucaaaaacagacguauccucaucaguaauaacauccuuaggagcaauaguaucauguuacggcaagacaaaauguacagccucaaacaaaaacaaagguaucauuaaaaccuucuccaacggcugcgacuacguaucaaauaaaggugucgauacaguaucaguaggaaacacacucuauuacguuaauaaacaagaaggaaagucauuauacguaaaaggagaaccaauaaucaauuucuacgauccccuagucuuucccucagaugaauuugacgcaagcaucucucaagucaacgaaaaaauaaaccaaucccuagccuucauaagaaaaucagaugaacuacuucauaacgucaacgccggaaaaucaacaaccaacauaaugaucacuacaaucauaauuguaauuauaguaauacuacuaucgcuaauugccguuggacuacuacuauauuguaaagcaagaucaacacccguuacucuauccaaagaucaauuaucaggaaucaacaacauagccuucucaaauuaaggacuagucccuguucccagagcccacuuuuuuuucuuuuuuugaaauaaaauagccugucuuucagaucuaaaaaaaaaaaaaaaaaaaaaaaaaaaaaaaaaaaaaaaaaaaaaaaaaaaaaaaaaaaaaaaaugcaucccccccccccccccccccccccccccccccaaaggcucuuuucagagccaccagaauu

SEQ ID NO: 6826 - RNA, 1903 nt, Artificial Sequence
  mRNA product Design a-2 comprising derived and/or modified sequence from HRSV(A2)__F_DSCav1_mut7 (opt11)
gggagaguccgcucagccagguugcagaagcggcuuagcguguguccuaaucuucucucugcguguagguaggccugugccgcaaacaagcuuaccauggaacuacucauacuuaaagccaacgcaauaaccacaauccucaccgccgucacauucugcuucgccucgggacaaaacauaaccgaagaauuuuaccagucuaccugcuccgccgucuccaaggguuaccucuccgcgcuccgcaccgggugguacaccagcguuaucaccaucgaacuaucuaacauaaaagaaaacaagugcaacggaaccgacgcaaaagucaaacucaucaaacaagaacuagacaaauacaagaaugccgucaccgaacuacaaaugcucaugugcuccacccccgccaccggauccggcuccgccauugccuccggcgucgccguaugcaaaguccuucacuuggaaggagaaguuaacaaaauaaaaagcgcccuccugucgaccaacaaagcgguggucagccucuccaacggcgucucuguccucaccuucaaaguccucgaccucaagaacuacauagauaaacaacuacuccccauccuaaacaaacagucaugcagcauauccaacaucgaaaccgucauggaguuccaacagaaaaacaaccgccuccuugaaaucacccgcgaguucucugucaacgccggcgucaccacccccgucuccaccuacaugcucacaaacuccgaacuccucagccucaucaacgacaugccaaucaccaacgaccaaaagaaacucauguccaacaacguacaaaucguucgucaacaaucauacucaaucaugugcaucauuaaagaagaaguccucgcauacgucguccaacucccccucuauggggucaucgacaccccaugcuggaaacuccacaccucuccccuaugcaccaccaacaccaaagaaggcuccaacaucugccuaacccgaaccgaccgcggaugguacugcgacaacgccggcuccgucuccuucuucccccaggccgaaacauguaaagucugcuccaaccguguguucugcgacaccaugaacucacuaacccuccccuccgaagucaaccucugcaacgucgacaucuucaacccgaaauacgacugcaaaauaaugaccagcaaaacagacguauccucuagcgucauuaccagccuaggugcaaucguguccugcuacggcaaaacaaaaugcaccgccuccaacaaaaauaaaggaaucauaaaaaccuucuccaacggcugcgacuacgucagcaacaaaggagucgacaccgucuccguaggaaauacucuauacuaugucaacaaacaagaggguaaaucccucuacgucaaaggcgaacccaucaucaacuucuacgacccccucgucuuccccucugacgaguucgacgccagcauaucacaaguaaacgaaaagaucaaccaaucccucgcauucauucgcaaauccgacgaacuccuacacaacgucaacgccggaaaauccaccaccaacaucaugaucacuacuaucauuaucgucaucaucgucauccuccucucccucaucgcagucggccuucuacucuacugcaaggcacgcucuacacccguaacccugucuaaagaccaacucuccggcaucaacaacaucgcuuucuccaacuaaggacuagucccuguucccagagcccacuuuuuuuucuuuuuuugaaauaaaauagccugucuuucagaucuaaaaaaaaaaaaaaaaaaaaaaaaaaaaaaaaaaaaaaaaaaaaaaaaaaaaaaaaaaaaaaaaugcaucccccccccccccccccccccccccccccccaaaggcucuuuucagagccaccagaauu

SEQ ID NO: 6827 - RNA, 1981 nt, Artificial Sequence
  mRNA product Design a-3 comprising derived and/or modified sequence from HRSV(A2)__F_DSCav1_mut7 (opt1)
gggagagggcgcuuggcuugcaaggacccugagcugcggcauugaagcacacccaacccaacucgacugaagucagccucacugaaccggaucugagaaucuucucucucugggcuugccagggcucuccgaaccuagcuagcauccucuucaauuccaacuagaaagcuuaccauggagcugcucauccugaaggccaacgccaucaccaccauccugacggcggugaccuucugcuucgccagcggccagaacaucaccgaggaguucuaccaguccacgugcagcgccgucuccaagggguaccucagcgcccugcggaccggcugguacaccuccgugaucaccaucgagcugagcaacaucaaggagaacaagugcaacgggaccgacgccaaggugaagcucaucaagcaggagcuggacaaguacaagaacgcggucacggagcugcagaugcugaugugcuccaccccggcaaccggcuccggcuccgccaucgcgagcggcgucgccgugugcaaggugcugcaccucgagggggaggucaacaagaucaagagcgcccugcuguccaccaacaaggccguggugagccucuccaacggcgucagcgugcugaccuucaaggugcuggaccucaagaacuacaucgacaagcagcugcugcccauccugaacaagcagagcugcuccaucagcaacaucgagacggugauggaguuccagcagaagaacaaccggcuccuggagaucacccgcgaguucagcgugaacgccggggucaccacccccguguccacguacaugcugaccaacagcgagcuccugucccugaucaacgacaugccgaucaccaacgaccagaagaagcucaugagcaacaacgugcagaucguccggcagcaguccuacagcaucaugugcaucaucaaggaggaggugcuggcguacgugguccagcugccccucuacggcgugaucgacacccccugcuggaagcugcacacgagcccccugugcaccaccaacaccaaggagggguccaacaucugccucacgcgcaccgaccggggcugguacugcgacaacgccggcagcgucuccuucuucccgcaggccgagaccugcaaggugugcagcaaccgcguguucugcgacaccaugaacucccugacgcugcccagcgagguaaaccucugcaacgucgacaucuucaaccccaaguacgacugcaagaucaugaccuccaagaccgacgugagcuccagcgugaucaccucccugggggccaucgucagcugcuacggcaagacgaagugcaccgccagcaacaagaacaaggggaucaucaagaccuucuccaacggcugcgacuacgugagcaacaagggcguggacaccguguccgucgggaacacccuguacuacgugaacaagcaggagggcaagagccucuacgugaagggggagcccaucaucaacuucuacgacccgcuggucuuccccuccgacgaguucgacgcgagcaucucccaggugaacgagaagaucaaccagagccuggccuucauccgcaaguccgacgagcugcuccacaacgugaacgccggcaagagcacgaccaacaucaugaucaccaccaucaucaucgucaucaucgugauccugcugucccucaucgccguggggcugcugcucuacugcaaggcccggagcacgcccgucacccuguccaaggaccagcugagcggcaucaacaacaucgcguucuccaacugaggacuagucccuguucccagagcccacuuuuuuuucuuuuuuugaaauaaaauagccugucuuucagaucuaaaaaaaaaaaaaaaaaaaaaaaaaaaaaaaaaaaaaaaaaaaaaaaaaaaaaaaaaaaaaaaaugcaucccccccccccccccccccccccccccccccaaaggcucuuuucagagccaccagaauu

SEQ ID NO: 6828 - RNA, 1981 nt, Artificial Sequence
  mRNA product Design a-3 comprising derived and/or modified sequence from HRSV(A2)__F_DSCav1_mut7 (opt1)
gggagagggcgcuuggcuugcaaggacccugagcugcggcauugaagcacacccaacccaacucgacugaagucagccucacugaaccggaucugagaaucuucucucucugggcuugccagggcucuccgaaccuagcuagcauccucuucaauuccaacuagaaagcuuaccauggagcugcucauccugaaggccaacgccaucaccaccauccugacggcggugaccuucugcuucgccagcggccagaacaucaccgaggaguucuaccaguccacgugcagcgccgucuccaagggguaccucagcgcccugcgcaccggcugguacaccuccgugaucaccaucgagcugagcaacaucaaggagaacaagugcaacgggaccgacgccaaggugaagcucaucaagcaggagcuggacaaguacaagaacgcggucacggagcugcagaugcucaugugcuccacccccgccaccggcagcggguccgccaucgccagcggcguggcggugugcaagguccugcaccuggagggcgaggugaacaagaucaaguccgcccuccugagcaccaacaaggccguggucucccugagcaacgggguguccgugcucacguucaagguccuggaccugaagaacuacaucgacaagcagcuccugccgauccugaacaagcagagcugcuccaucagcaacaucgagaccgugauggaguuccagcagaagaacaaccggcuccuggagaucacccgcgaguucuccgugaacgccggcgucaccacgcccgugagcaccuacaugcugaccaacagcgagcuccugucccugaucaacgacaugcccaucaccaacgaccagaagaagcucaugagcaacaacgugcagaucguccggcagcaguccuacagcaucaugugcaucaucaaggaggaggugcuggccuacgugguccagcugccccucuacggggugaucgacacgccgugcuggaagcugcacaccagcccccugugcaccaccaacacgaaggagggcagcaacaucugccucacccgcaccgaccgggggugguacugcgacaacgcgggcuccgugagcuucuucccccaggccgagaccugcaaggucugcuccaaccgcguguucugcgacacgaugaacagccugacccugcccuccgaggucaaccucugcaacguggacaucuucaacccgaaguacgacugcaagaucaugaccagcaagaccgacguguccagcuccgucaucacgagccugggcgccaucguguccugcuacgggaagaccaagugcaccgccagcaacaagaacaagggcaucaucaagaccuucuccaacgggugcgacuacgugagcaacaagggcgucgacacggugagcgugggcaacacccuguacuacgucaacaagcaggaggggaagucccucuacgugaagggcgagcccaucaucaacuucuacgacccccugguguuccccagcgacgaguucgacgccuccaucagccaggucaacgagaagaucaaccagucccuggcguucauccggaaguccgacgagcuccugcacaacgugaacgccgggaaguccaccaccaacaucaugaucaccacgaucaucaucgugaucaucgucauccugcucagccugaucgccgugggccugcuccuguacugcaaggcccgcuccaccccggugacccugagcaaggaccagcuguccgggaucaacaacaucgccuucagcaacugaggacuagucccuguucccagagcccacuuuuuuuucuuuuuuugaaauaaaauagccugucuuucagaucuaaaaaaaaaaaaaaaaaaaaaaaaaaaaaaaaaaaaaaaaaaaaaaaaaaaaaaaaaaaaaaaaugcaucccccccccccccccccccccccccccccccaaaggcucuuuucagagccaccagaauu

SEQ ID NO: 6829 - RNA, 1981 nt, Artificial Sequence
  mRNA product Design a-3 comprising derived and/or modified sequence from HRSV(A2)__F_DSCav1_mut7 (opt2)
gggagagggcgcuuggcuugcaaggacccugagcugcggcauugaagcacacccaacccaacucgacugaagucagccucacugaaccggaucugagaaucuucucucucugggcuugccagggcucuccgaaccuagcuagcauccucuucaauuccaacuagaaagcuuaccauggagcuccucauccucaaggccaacgccaucaccaccauccucaccgccgucaccuucugcuucgccuccggccagaacaucaccgaggaguucuaccaguccaccugcuccgccgucuccaagggcuaccucuccgcccuccgcaccggcugguacaccuccgucaucaccaucgagcucuccaacaucaaggagaacaagugcaacggcaccgacgccaaggucaagcucaucaagcaggagcucgacaaguacaagaacgccgucaccgagcuccagaugcucaugugcuccacccccgccaccggcuccggcuccgccaucgccuccggcgucgccgucugcaagguccuccaccucgagggcgaggucaacaagaucaaguccgcccuccucuccaccaacaaggccgucgucucccucuccaacggcgucuccguccucaccuucaagguccucgaccucaagaacuacaucgacaagcagcuccuccccauccucaacaagcaguccugcuccaucuccaacaucgagaccgucauggaguuccagcagaagaacaaccgccuccucgagaucacccgcgaguucuccgucaacgccggcgucaccacccccgucuccaccuacaugcucaccaacuccgagcuccucucccucaucaacgacaugcccaucaccaacgaccagaagaagcucauguccaacaacguccagaucguccgccagcaguccuacuccaucaugugcaucaucaaggaggagguccucgccuacgucguccagcucccccucuacggcgucaucgacacccccugcuggaagcuccacaccuccccccucugcaccaccaacaccaaggagggcuccaacaucugccucacccgcaccgaccgcggcugguacugcgacaacgccggcuccgucuccuucuucccccaggccgagaccugcaaggucugcuccaaccgcgucuucugcgacaccaugaacucccucacccuccccuccgaggucaaccucugcaacgucgacaucuucaaccccaaguacgacugcaagaucaugaccuccaagaccgacgucuccuccuccgucaucaccucccucggcgccaucgucuccugcuacggcaagaccaagugcaccgccuccaacaagaacaagggcaucaucaagaccuucuccaacggcugcgacuacgucuccaacaagggcgucgacaccgucuccgucggcaacacccucuacuacgucaacaagcaggagggcaagucccucuacgucaagggcgagcccaucaucaacuucuacgacccccucgucuuccccuccgacgaguucgacgccuccaucucccaggucaacgagaagaucaaccagucccucgccuucauccgcaaguccgacgagcuccuccacaacgucaacgccggcaaguccaccaccaacaucaugaucaccaccaucaucaucgucaucaucgucauccuccucucccucaucgccgucggccuccuccucuacugcaaggcccgcuccacccccgucacccucuccaaggaccagcucuccggcaucaacaacaucgccuucuccaacugaggacuagucccuguucccagagcccacuuuuuuuucuuuuuuugaaauaaaauagccugucuuucagaucuaaaaaaaaaaaaaaaaaaaaaaaaaaaaaaaaaaaaaaaaaaaaaaaaaaaaaaaaaaaaaaaaugcaucccccccccccccccccccccccccccccccaaaggcucuuuucagagccaccagaauu

SEQ ID NO: 6830 - RNA, 1981 nt, Artificial Sequence
  mRNA product Design a-3 comprising derived and/or modified sequence from HRSV(A2)__F_DSCav1_mut7 (opt3)
gggagagggcgcuuggcuugcaaggacccugagcugcggcauugaagcacacccaacccaacucgacugaagucagccucacugaaccggaucugagaaucuucucucucugggcuugccagggcucuccgaaccuagcuagcauccucuucaauuccaacuagaaagcuuaccauggagcugcucauccuuaaggccaacgcuauuaccacaauacugacugcagugacguucugcuuugccagcggccagaauaucaccgaagaguucuaccaauccacauguucugcggucucaaaaggguauuugagugcuuuaagaacuggaugguacaccagcguuauuacaaucgaacuguccaacauuaaggagaauaaaugcaacgguaccgacgccaaggugaaacuaaucaagcaggaacucgauaaguauaaaaaugcaguaacugagcugcagaugcuuauguguucuacacccgccaccggcucggggucagcuauagcaagcggaguggccgucugcaaggugcugcacuuggagggcgaaguuaacaaaaucaagagugcucuccuguccacgaauaaagccguggucucucugagcaacgguguguccguacucacuuuuaagguuuuagaccugaagaauuacauugauaaacagcuuuugccuauccugaacaagcaaucauguaguauuagcaauaucgagaccgugauggaguuccagcagaaaaacaauaggcuacucgaaauaacacgggaguuuucugucaacgcgggggugacuaccccaguguccacauauaugcugaccaauucagaacuucugagcuugauuaacgacaugccgaucacgaacgaucagaagaaacucaugaguaauaacguccaaauuguucgccagcagucuuacuccaucaugugcaucauuaaggaggaagugcuggcauauguagugcaguuaccccuguacggagucauagacacuccuuguuggaaacuccauacaagcccacuuugcaccacuaauacaaaggagggcucgaacaucugucugacccgaacggaucguggcugguacugcgacaaugccgggucuguguccuucuuuccccaagcugaaaccuguaagguuugcucaaacagaguguucugcgauacaaugaauaguuugacucuaccuagcgaggucaaccuguguaauguggacauuuuuaacccaaaauaugauugcaagaucaugaccuccaaaacagacguaucuagcucaguuauaacuagccucggagccauuguguccuguuacgguaagaccaaaugcacagcaagcaauaagaacaagggcaucaucaaaaccuucucuaaugggugugauuaugucucaaacaagggaguggacacugucagugugggcaauacgcuguacuauguuaacaaacaggaggguaagagccuuuacgugaaaggggaacccauuaucaacuuuuaugacccucugguauucccauccgaugaguuugacgcuucuauuucgcaggucaaugaaaagauaaaccaaaguuuggccuucaucaggaaguccgaugagcuccugcacaaugugaacgcgggaaaaucaacaaccaauauuaugaucacuaccaucauuauaguuaucauugugaucuuacugagucuaauugccgucggccuccugcuuuacugcaaggcacggucuacaccggugaccuugagcaaagaccagcuguccggcaucaacaauauagcuuucucaaacugaggacuagucccuguucccagagcccacuuuuuuuucuuuuuuugaaauaaaauagccugucuuucagaucuaaaaaaaaaaaaaaaaaaaaaaaaaaaaaaaaaaaaaaaaaaaaaaaaaaaaaaaaaaaaaaaaugcaucccccccccccccccccccccccccccccccaaaggcucuuuucagagccaccagaauu

SEQ ID NO: 6831 - RNA, 1981 nt, Artificial Sequence
  mRNA product Design a-3 comprising derived and/or modified sequence from HRSV(A2)__F_DSCav1_mut7 (opt4)
gggagagggcgcuuggcuugcaaggacccugagcugcggcauugaagcacacccaacccaacucgacugaagucagccucacugaaccggaucugagaaucuucucucucugggcuugccagggcucuccgaaccuagcuagcauccucuucaauuccaacuagaaagcuuaccauggagcugcugauccugaaggccaacgccaucaccaccauccugaccgccgugaccuucugcuucgccagcggccagaacaucaccgaggaguucuaccagagcaccugcagcgccgugagcaagggcuaccugagcgcccugagaaccggcugguacaccagcgugaucaccaucgagcugagcaacaucaaggagaacaagugcaacggcaccgacgccaaggugaagcugaucaagcaggagcuggacaaguacaagaacgccgugaccgagcugcagaugcugaugugcagcacccccgccaccggcagcggcagcgccaucgccagcggcguggccgugugcaaggugcugcaccuggagggcgaggugaacaagaucaagagcgcccugcugagcaccaacaaggccguggugagccugagcaacggcgugagcgugcugaccuucaaggugcuggaccugaagaacuacaucgacaagcagcugcugcccauccugaacaagcagagcugcagcaucagcaacaucgagaccgugauggaguuccagcagaagaacaacagacugcuggagaucaccagagaguucagcgugaacgccggcgugaccacccccgugagcaccuacaugcugaccaacagcgagcugcugagccugaucaacgacaugcccaucaccaacgaccagaagaagcugaugagcaacaacgugcagaucgugagacagcagagcuacagcaucaugugcaucaucaaggaggaggugcuggccuacguggugcagcugccccuguacggcgugaucgacacccccugcuggaagcugcacaccagcccccugugcaccaccaacaccaaggagggcagcaacaucugccugaccagaaccgacagaggcugguacugcgacaacgccggcagcgugagcuucuucccccaggccgagaccugcaaggugugcagcaacagaguguucugcgacaccaugaacagccugacccugcccagcgaggugaaccugugcaacguggacaucuucaaccccaaguacgacugcaagaucaugaccagcaagaccgacgugagcagcagcgugaucaccagccugggcgccaucgugagcugcuacggcaagaccaagugcaccgccagcaacaagaacaagggcaucaucaagaccuucagcaacggcugcgacuacgugagcaacaagggcguggacaccgugagcgugggcaacacccuguacuacgugaacaagcaggagggcaagagccuguacgugaagggcgagcccaucaucaacuucuacgacccccugguguuccccagcgacgaguucgacgccagcaucagccaggugaacgagaagaucaaccagagccuggccuucaucagaaagagcgacgagcugcugcacaacgugaacgccggcaagagcaccaccaacaucaugaucaccaccaucaucaucgugaucaucgugauccugcugagccugaucgccgugggccugcugcuguacugcaaggccagaagcacccccgugacccugagcaaggaccagcugagcggcaucaacaacaucgccuucagcaacugaggacuagucccuguucccagagcccacuuuuuuuucuuuuuuugaaauaaaauagccugucuuucagaucuaaaaaaaaaaaaaaaaaaaaaaaaaaaaaaaaaaaaaaaaaaaaaaaaaaaaaaaaaaaaaaaaugcaucccccccccccccccccccccccccccccccaaaggcucuuuucagagccaccagaauu

SEQ ID NO: 6832 - RNA, 1981 nt, Artificial Sequence
  mRNA product Design a-3 comprising derived and/or modified sequence from HRSV(A2)__F_DSCav1_mut7 (opt5)
gggagagggcgcuuggcuugcaaggacccugagcugcggcauugaagcacacccaacccaacucgacugaagucagccucacugaaccggaucugagaaucuucucucucugggcuugccagggcucuccgaaccuagcuagcauccucuucaauuccaacuagaaagcuuaccauggagcugcucauccugaaggccaacgcuauuaccacaauccuuacggccgugaccuucugcuuugcgagcggccagaauauuacagaagaguucuaccaauccaccuguucugcugucagcaaaggguaucuguccgcccucagaacaggaugguacaccucuguuaucacaauugaacugagcaacaucaaggagaauaaaugcaacggcaccgacgccaaggugaaacuuaucaagcaggaacuggauaaguauaaaaaugcugugacggagcuccagaugcugauguguuccacccccgccacagggucuggaagcgcuauugccuccggcgucgcggugugcaagguucugcaccucgagggggaagugaacaaaaucaagagcgcccugcuuucuaccaauaaagcugucgugucccugagcaacggaguuucugugcucacauuuaagguccuggaccuuaagaauuacauugauaaacagcugcucccuauccugaacaagcaauccuguagcauuucuaauaucgagaccgugauggaguuccagcagaaaaacaaucggcugcucgaaauuacgcgcgaguuuuccgugaacgccggcgucacaaccccgguuagcacauauaugcugaccaauuccgaacuucugucucucaucaacgacaugcccaucaccaacgaucagaagaaacugaugagcaauaacgugcaaauugugagacagcaguccuacagcaucaugugcauuaucaaggaggaaguccuugcuuaugugguucagcugccucucuacggcgugauugacacacccuguuggaaacugcauacgucuccucugugcaccacaaauaccaaggagggguccaacaucugucucacacggaccgaucgcggaugguacugcgacaaugccggcagcgucucuuucuuuccccaagcggaaacguguaaggugugcagcaacagaguuuucugcgauacaaugaacucccugacccuuccuucugaggugaaucuguguaaugucgacaucuuuaacccgaaauaugauugcaagauuaugaccagcaaaacagacguguccagcucugucaucaccucccucggggccauugugagcuguuacggaaagacaaaaugcacggcuucuaauaagaacaagggcaucauuaaaaccuucuccaaugggugugauuauguuagcaacaagggaguggacacagucuccgugggcaauacccuguacuauguuaacaaacaggagggcaagucucuuuacgugaaaggggaacccaucaucaacuuuuaugacccucuggucuuccccagcgaugaguuugacgccuccauuucucaggugaaugaaaagaucaaccaaagccucgcuuucauucggaaguccgaugagcugcugcacaaugugaacgccggaaaaagcacaaccaauaucaugauuacgaccaucauuaucguuaucauugucauccuccugucucuuauugccgugggccugcuccuguacugcaaggcucgcuccacaccugugacccugagcaaagaccagcuuucugggaucaacaauauugcguucuccaacugaggacuagucccuguucccagagcccacuuuuuuuucuuuuuuugaaauaaaauagccugucuuucagaucuaaaaaaaaaaaaaaaaaaaaaaaaaaaaaaaaaaaaaaaaaaaaaaaaaaaaaaaaaaaaaaaaugcaucccccccccccccccccccccccccccccccaaaggcucuuuucagagccaccagaauu

SEQ ID NO: 6833 - RNA, 1981 nt, Artificial Sequence
  mRNA product Design a-3 comprising derived and/or modified sequence from HRSV(A2)__F_DSCav1_mut7 (opt6)
gggagagggcgcuuggcuugcaaggacccugagcugcggcauugaagcacacccaacccaacucgacugaagucagccucacugaaccggaucugagaaucuucucucucugggcuugccagggcucuccgaaccuagcuagcauccucuucaauuccaacuagaaagcuuaccauggaauuacucauacucaaagcaaaugcaauuaccacuauacucacagcuguaacuuuuuguuucgccucaggacaaaacaucacagaagaauuuuaucaauccacaugcucugccguaucaaaaggcuaccuaucugcccuaagaacagguugguacacaucuguaauaacaaucgaauuauccaacaucaaagaaaacaaaugcaacggcacagacgcaaaagucaaacucaucaaacaagaauuagauaaauauaaaaacgcaguaacagaacuacaaaugcuaaugugcucuacacccgccacaggaucaggauccgcaaucgcuucuggaguagccguuugcaaaguauuacaccuagaaggagaaguaaauaaaauaaaauccgcacuacuaucaacuaauaaagcaguaguaucacuuucuaaugguguaucaguauuaacauucaaaguccucgaccuaaaaaauuacaucgacaaacaacuauuacccauccuuaauaaacaaucaugcuccauaucaaacauagaaacugucauggaauuucaacaaaaaaacaauagacuucuagaaaucacaagagaauuuucuguaaaugcaggaguaacuacaccaguaucaacauauauguuaaccaacuccgaacuacuaucacucauaaacgacaugccaauaacaaacgaccaaaaaaaacuaaugucaaauaacguucaaauaguaagacaacaaucauacucaaucaugugcauaauaaaagaagaaguuuuagcauacgucguacaacuuccccuauacggaguaauagacaccccuugcuggaaacuccacaccucaccacuaugcacuacaaacacaaaagaagguuccaacaucugcuuaacaagaaccgaucgaggaugguacugcgacaacgcugguuccguaucuuucuucccacaagcagaaacaugcaaaguaugcuccaauagaguauucugcgacaccaugaacucacuaacucuaccauccgaaguaaaccuaugcaacgucgacauauuuaauccaaaauaugacugcaaaauaaugacuucaaaaacagacguauccucaucaguaauaacauccuuaggagcaauaguaucauguuacggcaagacaaaauguacagccucaaacaaaaacaaagguaucauuaaaaccuucuccaacggcugcgacuacguaucaaauaaaggugucgauacaguaucaguaggaaacacacucuauuacguuaauaaacaagaaggaaagucauuauacguaaaaggagaaccaauaaucaauuucuacgauccccuagucuuucccucagaugaauuugacgcaagcaucucucaagucaacgaaaaaauaaaccaaucccuagccuucauaagaaaaucagaugaacuacuucauaacgucaacgccggaaaaucaacaaccaacauaaugaucacuacaaucauaauuguaauuauaguaauacuacuaucgcuaauugccguuggacuacuacuauauuguaaagcaagaucaacacccguuacucuauccaaagaucaauuaucaggaaucaacaacauagccuucucaaauuaaggacuagucccuguucccagagcccacuuuuuuuucuuuuuuugaaauaaaauagccugucuuucagaucuaaaaaaaaaaaaaaaaaaaaaaaaaaaaaaaaaaaaaaaaaaaaaaaaaaaaaaaaaaaaaaaaugcaucccccccccccccccccccccccccccccccaaaggcucuuuucagagccaccagaauu

SEQ ID NO: 6834 - RNA, 1981 nt, Artificial Sequence
  mRNA product Design a-3 comprising derived and/or modified sequence from HRSV(A2)__F_DSCav1_mut7 (opt11)
gggagagggcgcuuggcuugcaaggacccugagcugcggcauugaagcacacccaacccaacucgacugaagucagccucacugaaccggaucugagaaucuucucucucugggcuugccagggcucuccgaaccuagcuagcauccucuucaauuccaacuagaaagcuuaccauggaacuacucauacuuaaagccaacgcaauaaccacaauccucaccgccgucacauucugcuucgccucgggacaaaacauaaccgaagaauuuuaccagucuaccugcuccgccgucuccaaggguuaccucuccgcgcuccgcaccgggugguacaccagcguuaucaccaucgaacuaucuaacauaaaagaaaacaagugcaacggaaccgacgcaaaagucaaacucaucaaacaagaacuagacaaauacaagaaugccgucaccgaacuacaaaugcucaugugcuccacccccgccaccggauccggcuccgccauugccuccggcgucgccguaugcaaaguccuucacuuggaaggagaaguuaacaaaauaaaaagcgcccuccugucgaccaacaaagcgguggucagccucuccaacggcgucucuguccucaccuucaaaguccucgaccucaagaacuacauagauaaacaacuacuccccauccuaaacaaacagucaugcagcauauccaacaucgaaaccgucauggaguuccaacagaaaaacaaccgccuccuugaaaucacccgcgaguucucugucaacgccggcgucaccacccccgucuccaccuacaugcucacaaacuccgaacuccucagccucaucaacgacaugccaaucaccaacgaccaaaagaaacucauguccaacaacguacaaaucguucgucaacaaucauacucaaucaugugcaucauuaaagaagaaguccucgcauacgucguccaacucccccucuauggggucaucgacaccccaugcuggaaacuccacaccucuccccuaugcaccaccaacaccaaagaaggcuccaacaucugccuaacccgaaccgaccgcggaugguacugcgacaacgccggcuccgucuccuucuucccccaggccgaaacauguaaagucugcuccaaccguguguucugcgacaccaugaacucacuaacccuccccuccgaagucaaccucugcaacgucgacaucuucaacccgaaauacgacugcaaaauaaugaccagcaaaacagacguauccucuagcgucauuaccagccuaggugcaaucguguccugcuacggcaaaacaaaaugcaccgccuccaacaaaaauaaaggaaucauaaaaaccuucuccaacggcugcgacuacgucagcaacaaaggagucgacaccgucuccguaggaaauacucuauacuaugucaacaaacaagaggguaaaucccucuacgucaaaggcgaacccaucaucaacuucuacgacccccucgucuuccccucugacgaguucgacgccagcauaucacaaguaaacgaaaagaucaaccaaucccucgcauucauucgcaaauccgacgaacuccuacacaacgucaacgccggaaaauccaccaccaacaucaugaucacuacuaucauuaucgucaucaucgucauccuccucucccucaucgcagucggccuucuacucuacugcaaggcacgcucuacacccguaacccugucuaaagaccaacucuccggcaucaacaacaucgcuuucuccaacuaaggacuagucccuguucccagagcccacuuuuuuuucuuuuuuugaaauaaaauagccugucuuucagaucuaaaaaaaaaaaaaaaaaaaaaaaaaaaaaaaaaaaaaaaaaaaaaaaaaaaaaaaaaaaaaaaaugcaucccccccccccccccccccccccccccccccaaaggcucuuuucagagccaccagaauu

SEQ ID NO: 6835 - RNA, 1930 nt, Artificial Sequence
  mRNA product Design a-4 comprising derived and/or modified sequence from HRSV(A2)__F_DSCav1_mut7 (opt1)
gggagacuccugucgggcggaaguaggaggaguagaguuuaaaaacaguacucuuuuuccgguucgggacguaguugaagcaacgacaagccggauaaccgcucuugagacaggaagcuuaccauggagcugcucauccugaaggccaacgccaucaccaccauccugacggcggugaccuucugcuucgccagcggccagaacaucaccgaggaguucuaccaguccacgugcagcgccgucuccaagggguaccucagcgcccugcggaccggcugguacaccuccgugaucaccaucgagcugagcaacaucaaggagaacaagugcaacgggaccgacgccaaggugaagcucaucaagcaggagcuggacaaguacaagaacgcggucacggagcugcagaugcugaugugcuccaccccggcaaccggcuccggcuccgccaucgcgagcggcgucgccgugugcaaggugcugcaccucgagggggaggucaacaagaucaagagcgcccugcuguccaccaacaaggccguggugagccucuccaacggcgucagcgugcugaccuucaaggugcuggaccucaagaacuacaucgacaagcagcugcugcccauccugaacaagcagagcugcuccaucagcaacaucgagacggugauggaguuccagcagaagaacaaccggcuccuggagaucacccgcgaguucagcgugaacgccggggucaccacccccguguccacguacaugcugaccaacagcgagcuccugucccugaucaacgacaugccgaucaccaacgaccagaagaagcucaugagcaacaacgugcagaucguccggcagcaguccuacagcaucaugugcaucaucaaggaggaggugcuggcguacgugguccagcugccccucuacggcgugaucgacacccccugcuggaagcugcacacgagcccccugugcaccaccaacaccaaggagggguccaacaucugccucacgcgcaccgaccggggcugguacugcgacaacgccggcagcgucuccuucuucccgcaggccgagaccugcaaggugugcagcaaccgcguguucugcgacaccaugaacucccugacgcugcccagcgagguaaaccucugcaacgucgacaucuucaaccccaaguacgacugcaagaucaugaccuccaagaccgacgugagcuccagcgugaucaccucccugggggccaucgucagcugcuacggcaagacgaagugcaccgccagcaacaagaacaaggggaucaucaagaccuucuccaacggcugcgacuacgugagcaacaagggcguggacaccguguccgucgggaacacccuguacuacgugaacaagcaggagggcaagagccucuacgugaagggggagcccaucaucaacuucuacgacccgcuggucuuccccuccgacgaguucgacgcgagcaucucccaggugaacgagaagaucaaccagagccuggccuucauccgcaaguccgacgagcugcuccacaacgugaacgccggcaagagcacgaccaacaucaugaucaccaccaucaucaucgucaucaucgugauccugcugucccucaucgccguggggcugcugcucuacugcaaggcccggagcacgcccgucacccuguccaaggaccagcugagcggcaucaacaacaucgcguucuccaacugaggacuagucccuguucccagagcccacuuuuuuuucuuuuuuugaaauaaaauagccugucuuucagaucuaaaaaaaaaaaaaaaaaaaaaaaaaaaaaaaaaaaaaaaaaaaaaaaaaaaaaaaaaaaaaaaaugcaucccccccccccccccccccccccccccccccaaaggcucuuuucagagccaccagaauu

SEQ ID NO: 6836 - RNA, 1930 nt, Artificial Sequence
  mRNA product Design a-4 comprising derived and/or modified sequence from HRSV(A2)__F_DSCav1_mut7 (opt1)
gggagacuccugucgggcggaaguaggaggaguagaguuuaaaaacaguacucuuuuuccgguucgggacguaguugaagcaacgacaagccggauaaccgcucuugagacaggaagcuuaccauggagcugcucauccugaaggccaacgccaucaccaccauccugacggcggugaccuucugcuucgccagcggccagaacaucaccgaggaguucuaccaguccacgugcagcgccgucuccaagggguaccucagcgcccugcgcaccggcugguacaccuccgugaucaccaucgagcugagcaacaucaaggagaacaagugcaacgggaccgacgccaaggugaagcucaucaagcaggagcuggacaaguacaagaacgcggucacggagcugcagaugcucaugugcuccacccccgccaccggcagcggguccgccaucgccagcggcguggcggugugcaagguccugcaccuggagggcgaggugaacaagaucaaguccgcccuccugagcaccaacaaggccguggucucccugagcaacgggguguccgugcucacguucaagguccuggaccugaagaacuacaucgacaagcagcuccugccgauccugaacaagcagagcugcuccaucagcaacaucgagaccgugauggaguuccagcagaagaacaaccggcuccuggagaucacccgcgaguucuccgugaacgccggcgucaccacgcccgugagcaccuacaugcugaccaacagcgagcuccugucccugaucaacgacaugcccaucaccaacgaccagaagaagcucaugagcaacaacgugcagaucguccggcagcaguccuacagcaucaugugcaucaucaaggaggaggugcuggccuacgugguccagcugccccucuacggggugaucgacacgccgugcuggaagcugcacaccagcccccugugcaccaccaacacgaaggagggcagcaacaucugccucacccgcaccgaccgggggugguacugcgacaacgcgggcuccgugagcuucuucccccaggccgagaccugcaaggucugcuccaaccgcguguucugcgacacgaugaacagccugacccugcccuccgaggucaaccucugcaacguggacaucuucaacccgaaguacgacugcaagaucaugaccagcaagaccgacguguccagcuccgucaucacgagccugggcgccaucguguccugcuacgggaagaccaagugcaccgccagcaacaagaacaagggcaucaucaagaccuucuccaacgggugcgacuacgugagcaacaagggcgucgacacggugagcgugggcaacacccuguacuacgucaacaagcaggaggggaagucccucuacgugaagggcgagcccaucaucaacuucuacgacccccugguguuccccagcgacgaguucgacgccuccaucagccaggucaacgagaagaucaaccagucccuggcguucauccggaaguccgacgagcuccugcacaacgugaacgccgggaaguccaccaccaacaucaugaucaccacgaucaucaucgugaucaucgucauccugcucagccugaucgccgugggccugcuccuguacugcaaggcccgcuccaccccggugacccugagcaaggaccagcuguccgggaucaacaacaucgccuucagcaacugaggacuagucccuguucccagagcccacuuuuuuuucuuuuuuugaaauaaaauagccugucuuucagaucuaaaaaaaaaaaaaaaaaaaaaaaaaaaaaaaaaaaaaaaaaaaaaaaaaaaaaaaaaaaaaaaaugcaucccccccccccccccccccccccccccccccaaaggcucuuuucagagccaccagaauu

SEQ ID NO: 6837 - RNA, 1930 nt, Artificial Sequence
  mRNA product Design a-4 comprising derived and/or modified sequence from HRSV(A2)__F_DSCav1_mut7 (opt2)
gggagacuccugucgggcggaaguaggaggaguagaguuuaaaaacaguacucuuuuuccgguucgggacguaguugaagcaacgacaagccggauaaccgcucuugagacaggaagcuuaccauggagcuccucauccucaaggccaacgccaucaccaccauccucaccgccgucaccuucugcuucgccuccggccagaacaucaccgaggaguucuaccaguccaccugcuccgccgucuccaagggcuaccucuccgcccuccgcaccggcugguacaccuccgucaucaccaucgagcucuccaacaucaaggagaacaagugcaacggcaccgacgccaaggucaagcucaucaagcaggagcucgacaaguacaagaacgccgucaccgagcuccagaugcucaugugcuccacccccgccaccggcuccggcuccgccaucgccuccggcgucgccgucugcaagguccuccaccucgagggcgaggucaacaagaucaaguccgcccuccucuccaccaacaaggccgucgucucccucuccaacggcgucuccguccucaccuucaagguccucgaccucaagaacuacaucgacaagcagcuccuccccauccucaacaagcaguccugcuccaucuccaacaucgagaccgucauggaguuccagcagaagaacaaccgccuccucgagaucacccgcgaguucuccgucaacgccggcgucaccacccccgucuccaccuacaugcucaccaacuccgagcuccucucccucaucaacgacaugcccaucaccaacgaccagaagaagcucauguccaacaacguccagaucguccgccagcaguccuacuccaucaugugcaucaucaaggaggagguccucgccuacgucguccagcucccccucuacggcgucaucgacacccccugcuggaagcuccacaccuccccccucugcaccaccaacaccaaggagggcuccaacaucugccucacccgcaccgaccgcggcugguacugcgacaacgccggcuccgucuccuucuucccccaggccgagaccugcaaggucugcuccaaccgcgucuucugcgacaccaugaacucccucacccuccccuccgaggucaaccucugcaacgucgacaucuucaaccccaaguacgacugcaagaucaugaccuccaagaccgacgucuccuccuccgucaucaccucccucggcgccaucgucuccugcuacggcaagaccaagugcaccgccuccaacaagaacaagggcaucaucaagaccuucuccaacggcugcgacuacgucuccaacaagggcgucgacaccgucuccgucggcaacacccucuacuacgucaacaagcaggagggcaagucccucuacgucaagggcgagcccaucaucaacuucuacgacccccucgucuuccccuccgacgaguucgacgccuccaucucccaggucaacgagaagaucaaccagucccucgccuucauccgcaaguccgacgagcuccuccacaacgucaacgccggcaaguccaccaccaacaucaugaucaccaccaucaucaucgucaucaucgucauccuccucucccucaucgccgucggccuccuccucuacugcaaggcccgcuccacccccgucacccucuccaaggaccagcucuccggcaucaacaacaucgccuucuccaacugaggacuagucccuguucccagagcccacuuuuuuuucuuuuuuugaaauaaaauagccugucuuucagaucuaaaaaaaaaaaaaaaaaaaaaaaaaaaaaaaaaaaaaaaaaaaaaaaaaaaaaaaaaaaaaaaaugcaucccccccccccccccccccccccccccccccaaaggcucuuuucagagccaccagaauu

SEQ ID NO: 6838 - RNA, 1930 nt, Artificial Sequence
  mRNA product Design a-4 comprising derived and/or modified sequence from HRSV(A2)__F_DSCav1_mut7 (opt3)
gggagacuccugucgggcggaaguaggaggaguagaguuuaaaaacaguacucuuuuuccgguucgggacguaguugaagcaacgacaagccggauaaccgcucuugagacaggaagcuuaccauggagcugcucauccuuaaggccaacgcuauuaccacaauacugacugcagugacguucugcuuugccagcggccagaauaucaccgaagaguucuaccaauccacauguucugcggucucaaaaggguauuugagugcuuuaagaacuggaugguacaccagcguuauuacaaucgaacuguccaacauuaaggagaauaaaugcaacgguaccgacgccaaggugaaacuaaucaagcaggaacucgauaaguauaaaaaugcaguaacugagcugcagaugcuuauguguucuacacccgccaccggcucggggucagcuauagcaagcggaguggccgucugcaaggugcugcacuuggagggcgaaguuaacaaaaucaagagugcucuccuguccacgaauaaagccguggucucucugagcaacgguguguccguacucacuuuuaagguuuuagaccugaagaauuacauugauaaacagcuuuugccuauccugaacaagcaaucauguaguauuagcaauaucgagaccgugauggaguuccagcagaaaaacaauaggcuacucgaaauaacacgggaguuuucugucaacgcgggggugacuaccccaguguccacauauaugcugaccaauucagaacuucugagcuugauuaacgacaugccgaucacgaacgaucagaagaaacucaugaguaauaacguccaaauuguucgccagcagucuuacuccaucaugugcaucauuaaggaggaagugcuggcauauguagugcaguuaccccuguacggagucauagacacuccuuguuggaaacuccauacaagcccacuuugcaccacuaauacaaaggagggcucgaacaucugucugacccgaacggaucguggcugguacugcgacaaugccgggucuguguccuucuuuccccaagcugaaaccuguaagguuugcucaaacagaguguucugcgauacaaugaauaguuugacucuaccuagcgaggucaaccuguguaauguggacauuuuuaacccaaaauaugauugcaagaucaugaccuccaaaacagacguaucuagcucaguuauaacuagccucggagccauuguguccuguuacgguaagaccaaaugcacagcaagcaauaagaacaagggcaucaucaaaaccuucucuaaugggugugauuaugucucaaacaagggaguggacacugucagugugggcaauacgcuguacuauguuaacaaacaggaggguaagagccuuuacgugaaaggggaacccauuaucaacuuuuaugacccucugguauucccauccgaugaguuugacgcuucuauuucgcaggucaaugaaaagauaaaccaaaguuuggccuucaucaggaaguccgaugagcuccugcacaaugugaacgcgggaaaaucaacaaccaauauuaugaucacuaccaucauuauaguuaucauugugaucuuacugagucuaauugccgucggccuccugcuuuacugcaaggcacggucuacaccggugaccuugagcaaagaccagcuguccggcaucaacaauauagcuuucucaaacugaggacuagucccuguucccagagcccacuuuuuuuucuuuuuuugaaauaaaauagccugucuuucagaucuaaaaaaaaaaaaaaaaaaaaaaaaaaaaaaaaaaaaaaaaaaaaaaaaaaaaaaaaaaaaaaaaugcaucccccccccccccccccccccccccccccccaaaggcucuuuucagagccaccagaauu

SEQ ID NO: 6839 - RNA, 1930 nt, Artificial Sequence
  mRNA product Design a-4 comprising derived and/or modified sequence from HRSV(A2)__F_DSCav1_mut7 (opt4)
gggagacuccugucgggcggaaguaggaggaguagaguuuaaaaacaguacucuuuuuccgguucgggacguaguugaagcaacgacaagccggauaaccgcucuugagacaggaagcuuaccauggagcugcugauccugaaggccaacgccaucaccaccauccugaccgccgugaccuucugcuucgccagcggccagaacaucaccgaggaguucuaccagagcaccugcagcgccgugagcaagggcuaccugagcgcccugagaaccggcugguacaccagcgugaucaccaucgagcugagcaacaucaaggagaacaagugcaacggcaccgacgccaaggugaagcugaucaagcaggagcuggacaaguacaagaacgccgugaccgagcugcagaugcugaugugcagcacccccgccaccggcagcggcagcgccaucgccagcggcguggccgugugcaaggugcugcaccuggagggcgaggugaacaagaucaagagcgcccugcugagcaccaacaaggccguggugagccugagcaacggcgugagcgugcugaccuucaaggugcuggaccugaagaacuacaucgacaagcagcugcugcccauccugaacaagcagagcugcagcaucagcaacaucgagaccgugauggaguuccagcagaagaacaacagacugcuggagaucaccagagaguucagcgugaacgccggcgugaccacccccgugagcaccuacaugcugaccaacagcgagcugcugagccugaucaacgacaugcccaucaccaacgaccagaagaagcugaugagcaacaacgugcagaucgugagacagcagagcuacagcaucaugugcaucaucaaggaggaggugcuggccuacguggugcagcugccccuguacggcgugaucgacacccccugcuggaagcugcacaccagcccccugugcaccaccaacaccaaggagggcagcaacaucugccugaccagaaccgacagaggcugguacugcgacaacgccggcagcgugagcuucuucccccaggccgagaccugcaaggugugcagcaacagaguguucugcgacaccaugaacagccugacccugcccagcgaggugaaccugugcaacguggacaucuucaaccccaaguacgacugcaagaucaugaccagcaagaccgacgugagcagcagcgugaucaccagccugggcgccaucgugagcugcuacggcaagaccaagugcaccgccagcaacaagaacaagggcaucaucaagaccuucagcaacggcugcgacuacgugagcaacaagggcguggacaccgugagcgugggcaacacccuguacuacgugaacaagcaggagggcaagagccuguacgugaagggcgagcccaucaucaacuucuacgacccccugguguuccccagcgacgaguucgacgccagcaucagccaggugaacgagaagaucaaccagagccuggccuucaucagaaagagcgacgagcugcugcacaacgugaacgccggcaagagcaccaccaacaucaugaucaccaccaucaucaucgugaucaucgugauccugcugagccugaucgccgugggccugcugcuguacugcaaggccagaagcacccccgugacccugagcaaggaccagcugagcggcaucaacaacaucgccuucagcaacugaggacuagucccuguucccagagcccacuuuuuuuucuuuuuuugaaauaaaauagccugucuuucagaucuaaaaaaaaaaaaaaaaaaaaaaaaaaaaaaaaaaaaaaaaaaaaaaaaaaaaaaaaaaaaaaaaugcaucccccccccccccccccccccccccccccccaaaggcucuuuucagagccaccagaauu

SEQ ID NO: 6840 - RNA, 1930 nt, Artificial Sequence
  mRNA product Design a-4 comprising derived and/or modified sequence from HRSV(A2)__F_DSCav1_mut7 (opt5)
gggagacuccugucgggcggaaguaggaggaguagaguuuaaaaacaguacucuuuuuccgguucgggacguaguugaagcaacgacaagccggauaaccgcucuugagacaggaagcuuaccauggagcugcucauccugaaggccaacgcuauuaccacaauccuuacggccgugaccuucugcuuugcgagcggccagaauauuacagaagaguucuaccaauccaccuguucugcugucagcaaaggguaucuguccgcccucagaacaggaugguacaccucuguuaucacaauugaacugagcaacaucaaggagaauaaaugcaacggcaccgacgccaaggugaaacuuaucaagcaggaacuggauaaguauaaaaaugcugugacggagcuccagaugcugauguguuccacccccgccacagggucuggaagcgcuauugccuccggcgucgcggugugcaagguucugcaccucgagggggaagugaacaaaaucaagagcgcccugcuuucuaccaauaaagcugucgugucccugagcaacggaguuucugugcucacauuuaagguccuggaccuuaagaauuacauugauaaacagcugcucccuauccugaacaagcaauccuguagcauuucuaauaucgagaccgugauggaguuccagcagaaaaacaaucggcugcucgaaauuacgcgcgaguuuuccgugaacgccggcgucacaaccccgguuagcacauauaugcugaccaauuccgaacuucugucucucaucaacgacaugcccaucaccaacgaucagaagaaacugaugagcaauaacgugcaaauugugagacagcaguccuacagcaucaugugcauuaucaaggaggaaguccuugcuuaugugguucagcugccucucuacggcgugauugacacacccuguuggaaacugcauacgucuccucugugcaccacaaauaccaaggagggguccaacaucugucucacacggaccgaucgcggaugguacugcgacaaugccggcagcgucucuuucuuuccccaagcggaaacguguaaggugugcagcaacagaguuuucugcgauacaaugaacucccugacccuuccuucugaggugaaucuguguaaugucgacaucuuuaacccgaaauaugauugcaagauuaugaccagcaaaacagacguguccagcucugucaucaccucccucggggccauugugagcuguuacggaaagacaaaaugcacggcuucuaauaagaacaagggcaucauuaaaaccuucuccaaugggugugauuauguuagcaacaagggaguggacacagucuccgugggcaauacccuguacuauguuaacaaacaggagggcaagucucuuuacgugaaaggggaacccaucaucaacuuuuaugacccucuggucuuccccagcgaugaguuugacgccuccauuucucaggugaaugaaaagaucaaccaaagccucgcuuucauucggaaguccgaugagcugcugcacaaugugaacgccggaaaaagcacaaccaauaucaugauuacgaccaucauuaucguuaucauugucauccuccugucucuuauugccgugggccugcuccuguacugcaaggcucgcuccacaccugugacccugagcaaagaccagcuuucugggaucaacaauauugcguucuccaacugaggacuagucccuguucccagagcccacuuuuuuuucuuuuuuugaaauaaaauagccugucuuucagaucuaaaaaaaaaaaaaaaaaaaaaaaaaaaaaaaaaaaaaaaaaaaaaaaaaaaaaaaaaaaaaaaaugcaucccccccccccccccccccccccccccccccaaaggcucuuuucagagccaccagaauu

SEQ ID NO: 6841 - RNA, 1930 nt, Artificial Sequence
  mRNA product Design a-4 comprising derived and/or modified sequence from HRSV(A2)__F_DSCav1_mut7 (opt6)
gggagacuccugucgggcggaaguaggaggaguagaguuuaaaaacaguacucuuuuuccgguucgggacguaguugaagcaacgacaagccggauaaccgcucuugagacaggaagcuuaccauggaauuacucauacucaaagcaaaugcaauuaccacuauacucacagcuguaacuuuuuguuucgccucaggacaaaacaucacagaagaauuuuaucaauccacaugcucugccguaucaaaaggcuaccuaucugcccuaagaacagguugguacacaucuguaauaacaaucgaauuauccaacaucaaagaaaacaaaugcaacggcacagacgcaaaagucaaacucaucaaacaagaauuagauaaauauaaaaacgcaguaacagaacuacaaaugcuaaugugcucuacacccgccacaggaucaggauccgcaaucgcuucuggaguagccguuugcaaaguauuacaccuagaaggagaaguaaauaaaauaaaauccgcacuacuaucaacuaauaaagcaguaguaucacuuucuaaugguguaucaguauuaacauucaaaguccucgaccuaaaaaauuacaucgacaaacaacuauuacccauccuuaauaaacaaucaugcuccauaucaaacauagaaacugucauggaauuucaacaaaaaaacaauagacuucuagaaaucacaagagaauuuucuguaaaugcaggaguaacuacaccaguaucaacauauauguuaaccaacuccgaacuacuaucacucauaaacgacaugccaauaacaaacgaccaaaaaaaacuaaugucaaauaacguucaaauaguaagacaacaaucauacucaaucaugugcauaauaaaagaagaaguuuuagcauacgucguacaacuuccccuauacggaguaauagacaccccuugcuggaaacuccacaccucaccacuaugcacuacaaacacaaaagaagguuccaacaucugcuuaacaagaaccgaucgaggaugguacugcgacaacgcugguuccguaucuuucuucccacaagcagaaacaugcaaaguaugcuccaauagaguauucugcgacaccaugaacucacuaacucuaccauccgaaguaaaccuaugcaacgucgacauauuuaauccaaaauaugacugcaaaauaaugacuucaaaaacagacguauccucaucaguaauaacauccuuaggagcaauaguaucauguuacggcaagacaaaauguacagccucaaacaaaaacaaagguaucauuaaaaccuucuccaacggcugcgacuacguaucaaauaaaggugucgauacaguaucaguaggaaacacacucuauuacguuaauaaacaagaaggaaagucauuauacguaaaaggagaaccaauaaucaauuucuacgauccccuagucuuucccucagaugaauuugacgcaagcaucucucaagucaacgaaaaaauaaaccaaucccuagccuucauaagaaaaucagaugaacuacuucauaacgucaacgccggaaaaucaacaaccaacauaaugaucacuacaaucauaauuguaauuauaguaauacuacuaucgcuaauugccguuggacuacuacuauauuguaaagcaagaucaacacccguuacucuauccaaagaucaauuaucaggaaucaacaacauagccuucucaaauuaaggacuagucccuguucccagagcccacuuuuuuuucuuuuuuugaaauaaaauagccugucuuucagaucuaaaaaaaaaaaaaaaaaaaaaaaaaaaaaaaaaaaaaaaaaaaaaaaaaaaaaaaaaaaaaaaaugcaucccccccccccccccccccccccccccccccaaaggcucuuuucagagccaccagaauu

SEQ ID NO: 6842 - RNA, 1930 nt, Artificial Sequence
  mRNA product Design a-4 comprising derived and/or modified sequence from HRSV(A2)__F_DSCav1_mut7 (opt11)
gggagacuccugucgggcggaaguaggaggaguagaguuuaaaaacaguacucuuuuuccgguucgggacguaguugaagcaacgacaagccggauaaccgcucuugagacaggaagcuuaccauggaacuacucauacuuaaagccaacgcaauaaccacaauccucaccgccgucacauucugcuucgccucgggacaaaacauaaccgaagaauuuuaccagucuaccugcuccgccgucuccaaggguuaccucuccgcgcuccgcaccgggugguacaccagcguuaucaccaucgaacuaucuaacauaaaagaaaacaagugcaacggaaccgacgcaaaagucaaacucaucaaacaagaacuagacaaauacaagaaugccgucaccgaacuacaaaugcucaugugcuccacccccgccaccggauccggcuccgccauugccuccggcgucgccguaugcaaaguccuucacuuggaaggagaaguuaacaaaauaaaaagcgcccuccugucgaccaacaaagcgguggucagccucuccaacggcgucucuguccucaccuucaaaguccucgaccucaagaacuacauagauaaacaacuacuccccauccuaaacaaacagucaugcagcauauccaacaucgaaaccgucauggaguuccaacagaaaaacaaccgccuccuugaaaucacccgcgaguucucugucaacgccggcgucaccacccccgucuccaccuacaugcucacaaacuccgaacuccucagccucaucaacgacaugccaaucaccaacgaccaaaagaaacucauguccaacaacguacaaaucguucgucaacaaucauacucaaucaugugcaucauuaaagaagaaguccucgcauacgucguccaacucccccucuauggggucaucgacaccccaugcuggaaacuccacaccucuccccuaugcaccaccaacaccaaagaaggcuccaacaucugccuaacccgaaccgaccgcggaugguacugcgacaacgccggcuccgucuccuucuucccccaggccgaaacauguaaagucugcuccaaccguguguucugcgacaccaugaacucacuaacccuccccuccgaagucaaccucugcaacgucgacaucuucaacccgaaauacgacugcaaaauaaugaccagcaaaacagacguauccucuagcgucauuaccagccuaggugcaaucguguccugcuacggcaaaacaaaaugcaccgccuccaacaaaaauaaaggaaucauaaaaaccuucuccaacggcugcgacuacgucagcaacaaaggagucgacaccgucuccguaggaaauacucuauacuaugucaacaaacaagaggguaaaucccucuacgucaaaggcgaacccaucaucaacuucuacgacccccucgucuuccccucugacgaguucgacgccagcauaucacaaguaaacgaaaagaucaaccaaucccucgcauucauucgcaaauccgacgaacuccuacacaacgucaacgccggaaaauccaccaccaacaucaugaucacuacuaucauuaucgucaucaucgucauccuccucucccucaucgcagucggccuucuacucuacugcaaggcacgcucuacacccguaacccugucuaaagaccaacucuccggcaucaacaacaucgcuuucuccaacuaaggacuagucccuguucccagagcccacuuuuuuuucuuuuuuugaaauaaaauagccugucuuucagaucuaaaaaaaaaaaaaaaaaaaaaaaaaaaaaaaaaaaaaaaaaaaaaaaaaaaaaaaaaaaaaaaaugcaucccccccccccccccccccccccccccccccaaaggcucuuuucagagccaccagaauu

SEQ ID NO: 6843 - RNA, 1876 nt, Artificial Sequence
  mRNA product Design a-5 comprising derived and/or modified sequence from HRSV(A2)__F_DSCav1_mut7 (opt1)
gggagacuuucccauucuguagcagaauuugguguugccuguggucuuggucccgcggagaagcuuaccauggagcugcucauccugaaggccaacgccaucaccaccauccugacggcggugaccuucugcuucgccagcggccagaacaucaccgaggaguucuaccaguccacgugcagcgccgucuccaagggguaccucagcgcccugcggaccggcugguacaccuccgugaucaccaucgagcugagcaacaucaaggagaacaagugcaacgggaccgacgccaaggugaagcucaucaagcaggagcuggacaaguacaagaacgcggucacggagcugcagaugcugaugugcuccaccccggcaaccggcuccggcuccgccaucgcgagcggcgucgccgugugcaaggugcugcaccucgagggggaggucaacaagaucaagagcgcccugcuguccaccaacaaggccguggugagccucuccaacggcgucagcgugcugaccuucaaggugcuggaccucaagaacuacaucgacaagcagcugcugcccauccugaacaagcagagcugcuccaucagcaacaucgagacggugauggaguuccagcagaagaacaaccggcuccuggagaucacccgcgaguucagcgugaacgccggggucaccacccccguguccacguacaugcugaccaacagcgagcuccugucccugaucaacgacaugccgaucaccaacgaccagaagaagcucaugagcaacaacgugcagaucguccggcagcaguccuacagcaucaugugcaucaucaaggaggaggugcuggcguacgugguccagcugccccucuacggcgugaucgacacccccugcuggaagcugcacacgagcccccugugcaccaccaacaccaaggagggguccaacaucugccucacgcgcaccgaccggggcugguacugcgacaacgccggcagcgucuccuucuucccgcaggccgagaccugcaaggugugcagcaaccgcguguucugcgacaccaugaacucccugacgcugcccagcgagguaaaccucugcaacgucgacaucuucaaccccaaguacgacugcaagaucaugaccuccaagaccgacgugagcuccagcgugaucaccucccugggggccaucgucagcugcuacggcaagacgaagugcaccgccagcaacaagaacaaggggaucaucaagaccuucuccaacggcugcgacuacgugagcaacaagggcguggacaccguguccgucgggaacacccuguacuacgugaacaagcaggagggcaagagccucuacgugaagggggagcccaucaucaacuucuacgacccgcuggucuuccccuccgacgaguucgacgcgagcaucucccaggugaacgagaagaucaaccagagccuggccuucauccgcaaguccgacgagcugcuccacaacgugaacgccggcaagagcacgaccaacaucaugaucaccaccaucaucaucgucaucaucgugauccugcugucccucaucgccguggggcugcugcucuacugcaaggcccggagcacgcccgucacccuguccaaggaccagcugagcggcaucaacaacaucgcguucuccaacugaggacuagucccuguucccagagcccacuuuuuuuucuuuuuuugaaauaaaauagccugucuuucagaucuaaaaaaaaaaaaaaaaaaaaaaaaaaaaaaaaaaaaaaaaaaaaaaaaaaaaaaaaaaaaaaaaugcaucccccccccccccccccccccccccccccccaaaggcucuuuucagagccaccagaauu

SEQ ID NO: 6844 - RNA, 1876 nt, Artificial Sequence
  mRNA product Design a-5 comprising derived and/or modified sequence from HRSV(A2)__F_DSCav1_mut7 (opt1)
gggagacuuucccauucuguagcagaauuugguguugccuguggucuuggucccgcggagaagcuuaccauggagcugcucauccugaaggccaacgccaucaccaccauccugacggcggugaccuucugcuucgccagcggccagaacaucaccgaggaguucuaccaguccacgugcagcgccgucuccaagggguaccucagcgcccugcgcaccggcugguacaccuccgugaucaccaucgagcugagcaacaucaaggagaacaagugcaacgggaccgacgccaaggugaagcucaucaagcaggagcuggacaaguacaagaacgcggucacggagcugcagaugcucaugugcuccacccccgccaccggcagcggguccgccaucgccagcggcguggcggugugcaagguccugcaccuggagggcgaggugaacaagaucaaguccgcccuccugagcaccaacaaggccguggucucccugagcaacgggguguccgugcucacguucaagguccuggaccugaagaacuacaucgacaagcagcuccugccgauccugaacaagcagagcugcuccaucagcaacaucgagaccgugauggaguuccagcagaagaacaaccggcuccuggagaucacccgcgaguucuccgugaacgccggcgucaccacgcccgugagcaccuacaugcugaccaacagcgagcuccugucccugaucaacgacaugcccaucaccaacgaccagaagaagcucaugagcaacaacgugcagaucguccggcagcaguccuacagcaucaugugcaucaucaaggaggaggugcuggccuacgugguccagcugccccucuacggggugaucgacacgccgugcuggaagcugcacaccagcccccugugcaccaccaacacgaaggagggcagcaacaucugccucacccgcaccgaccgggggugguacugcgacaacgcgggcuccgugagcuucuucccccaggccgagaccugcaaggucugcuccaaccgcguguucugcgacacgaugaacagccugacccugcccuccgaggucaaccucugcaacguggacaucuucaacccgaaguacgacugcaagaucaugaccagcaagaccgacguguccagcuccgucaucacgagccugggcgccaucguguccugcuacgggaagaccaagugcaccgccagcaacaagaacaagggcaucaucaagaccuucuccaacgggugcgacuacgugagcaacaagggcgucgacacggugagcgugggcaacacccuguacuacgucaacaagcaggaggggaagucccucuacgugaagggcgagcccaucaucaacuucuacgacccccugguguuccccagcgacgaguucgacgccuccaucagccaggucaacgagaagaucaaccagucccuggcguucauccggaaguccgacgagcuccugcacaacgugaacgccgggaaguccaccaccaacaucaugaucaccacgaucaucaucgugaucaucgucauccugcucagccugaucgccgugggccugcuccuguacugcaaggcccgcuccaccccggugacccugagcaaggaccagcuguccgggaucaacaacaucgccuucagcaacugaggacuagucccuguucccagagcccacuuuuuuuucuuuuuuugaaauaaaauagccugucuuucagaucuaaaaaaaaaaaaaaaaaaaaaaaaaaaaaaaaaaaaaaaaaaaaaaaaaaaaaaaaaaaaaaaaugcaucccccccccccccccccccccccccccccccaaaggcucuuuucagagccaccagaauu

SEQ ID NO: 6845 - RNA, 1876 nt, Artificial Sequence
  mRNA product Design a-5 comprising derived and/or modified sequence from HRSV(A2)__F_DSCav1_mut7 (opt2)
gggagacuuucccauucuguagcagaauuugguguugccuguggucuuggucccgcggagaagcuuaccauggagcuccucauccucaaggccaacgccaucaccaccauccucaccgccgucaccuucugcuucgccuccggccagaacaucaccgaggaguucuaccaguccaccugcuccgccgucuccaagggcuaccucuccgcccuccgcaccggcugguacaccuccgucaucaccaucgagcucuccaacaucaaggagaacaagugcaacggcaccgacgccaaggucaagcucaucaagcaggagcucgacaaguacaagaacgccgucaccgagcuccagaugcucaugugcuccacccccgccaccggcuccggcuccgccaucgccuccggcgucgccgucugcaagguccuccaccucgagggcgaggucaacaagaucaaguccgcccuccucuccaccaacaaggccgucgucucccucuccaacggcgucuccguccucaccuucaagguccucgaccucaagaacuacaucgacaagcagcuccuccccauccucaacaagcaguccugcuccaucuccaacaucgagaccgucauggaguuccagcagaagaacaaccgccuccucgagaucacccgcgaguucuccgucaacgccggcgucaccacccccgucuccaccuacaugcucaccaacuccgagcuccucucccucaucaacgacaugcccaucaccaacgaccagaagaagcucauguccaacaacguccagaucguccgccagcaguccuacuccaucaugugcaucaucaaggaggagguccucgccuacgucguccagcucccccucuacggcgucaucgacacccccugcuggaagcuccacaccuccccccucugcaccaccaacaccaaggagggcuccaacaucugccucacccgcaccgaccgcggcugguacugcgacaacgccggcuccgucuccuucuucccccaggccgagaccugcaaggucugcuccaaccgcgucuucugcgacaccaugaacucccucacccuccccuccgaggucaaccucugcaacgucgacaucuucaaccccaaguacgacugcaagaucaugaccuccaagaccgacgucuccuccuccgucaucaccucccucggcgccaucgucuccugcuacggcaagaccaagugcaccgccuccaacaagaacaagggcaucaucaagaccuucuccaacggcugcgacuacgucuccaacaagggcgucgacaccgucuccgucggcaacacccucuacuacgucaacaagcaggagggcaagucccucuacgucaagggcgagcccaucaucaacuucuacgacccccucgucuuccccuccgacgaguucgacgccuccaucucccaggucaacgagaagaucaaccagucccucgccuucauccgcaaguccgacgagcuccuccacaacgucaacgccggcaaguccaccaccaacaucaugaucaccaccaucaucaucgucaucaucgucauccuccucucccucaucgccgucggccuccuccucuacugcaaggcccgcuccacccccgucacccucuccaaggaccagcucuccggcaucaacaacaucgccuucuccaacugaggacuagucccuguucccagagcccacuuuuuuuucuuuuuuugaaauaaaauagccugucuuucagaucuaaaaaaaaaaaaaaaaaaaaaaaaaaaaaaaaaaaaaaaaaaaaaaaaaaaaaaaaaaaaaaaaugcaucccccccccccccccccccccccccccccccaaaggcucuuuucagagccaccagaauu

SEQ ID NO: 6846 - RNA, 1876 nt, Artificial Sequence
  mRNA product Design a-5 comprising derived and/or modified sequence from HRSV(A2)__F_DSCav1_mut7 (opt3)
gggagacuuucccauucuguagcagaauuugguguugccuguggucuuggucccgcggagaagcuuaccauggagcugcucauccuuaaggccaacgcuauuaccacaauacugacugcagugacguucugcuuugccagcggccagaauaucaccgaagaguucuaccaauccacauguucugcggucucaaaaggguauuugagugcuuuaagaacuggaugguacaccagcguuauuacaaucgaacuguccaacauuaaggagaauaaaugcaacgguaccgacgccaaggugaaacuaaucaagcaggaacucgauaaguauaaaaaugcaguaacugagcugcagaugcuuauguguucuacacccgccaccggcucggggucagcuauagcaagcggaguggccgucugcaaggugcugcacuuggagggcgaaguuaacaaaaucaagagugcucuccuguccacgaauaaagccguggucucucugagcaacgguguguccguacucacuuuuaagguuuuagaccugaagaauuacauugauaaacagcuuuugccuauccugaacaagcaaucauguaguauuagcaauaucgagaccgugauggaguuccagcagaaaaacaauaggcuacucgaaauaacacgggaguuuucugucaacgcgggggugacuaccccaguguccacauauaugcugaccaauucagaacuucugagcuugauuaacgacaugccgaucacgaacgaucagaagaaacucaugaguaauaacguccaaauuguucgccagcagucuuacuccaucaugugcaucauuaaggaggaagugcuggcauauguagugcaguuaccccuguacggagucauagacacuccuuguuggaaacuccauacaagcccacuuugcaccacuaauacaaaggagggcucgaacaucugucugacccgaacggaucguggcugguacugcgacaaugccgggucuguguccuucuuuccccaagcugaaaccuguaagguuugcucaaacagaguguucugcgauacaaugaauaguuugacucuaccuagcgaggucaaccuguguaauguggacauuuuuaacccaaaauaugauugcaagaucaugaccuccaaaacagacguaucuagcucaguuauaacuagccucggagccauuguguccuguuacgguaagaccaaaugcacagcaagcaauaagaacaagggcaucaucaaaaccuucucuaaugggugugauuaugucucaaacaagggaguggacacugucagugugggcaauacgcuguacuauguuaacaaacaggaggguaagagccuuuacgugaaaggggaacccauuaucaacuuuuaugacccucugguauucccauccgaugaguuugacgcuucuauuucgcaggucaaugaaaagauaaaccaaaguuuggccuucaucaggaaguccgaugagcuccugcacaaugugaacgcgggaaaaucaacaaccaauauuaugaucacuaccaucauuauaguuaucauugugaucuuacugagucuaauugccgucggccuccugcuuuacugcaaggcacggucuacaccggugaccuugagcaaagaccagcuguccggcaucaacaauauagcuuucucaaacugaggacuagucccuguucccagagcccacuuuuuuuucuuuuuuugaaauaaaauagccugucuuucagaucuaaaaaaaaaaaaaaaaaaaaaaaaaaaaaaaaaaaaaaaaaaaaaaaaaaaaaaaaaaaaaaaaugcaucccccccccccccccccccccccccccccccaaaggcucuuuucagagccaccagaauu

SEQ ID NO: 6847 - RNA, 1876 nt, Artificial Sequence
  mRNA product Design a-5 comprising derived and/or modified sequence from HRSV(A2)__F_DSCav1_mut7 (opt4)
gggagacuuucccauucuguagcagaauuugguguugccuguggucuuggucccgcggagaagcuuaccauggagcugcugauccugaaggccaacgccaucaccaccauccugaccgccgugaccuucugcuucgccagcggccagaacaucaccgaggaguucuaccagagcaccugcagcgccgugagcaagggcuaccugagcgcccugagaaccggcugguacaccagcgugaucaccaucgagcugagcaacaucaaggagaacaagugcaacggcaccgacgccaaggugaagcugaucaagcaggagcuggacaaguacaagaacgccgugaccgagcugcagaugcugaugugcagcacccccgccaccggcagcggcagcgccaucgccagcggcguggccgugugcaaggugcugcaccuggagggcgaggugaacaagaucaagagcgcccugcugagcaccaacaaggccguggugagccugagcaacggcgugagcgugcugaccuucaaggugcuggaccugaagaacuacaucgacaagcagcugcugcccauccugaacaagcagagcugcagcaucagcaacaucgagaccgugauggaguuccagcagaagaacaacagacugcuggagaucaccagagaguucagcgugaacgccggcgugaccacccccgugagcaccuacaugcugaccaacagcgagcugcugagccugaucaacgacaugcccaucaccaacgaccagaagaagcugaugagcaacaacgugcagaucgugagacagcagagcuacagcaucaugugcaucaucaaggaggaggugcuggccuacguggugcagcugccccuguacggcgugaucgacacccccugcuggaagcugcacaccagcccccugugcaccaccaacaccaaggagggcagcaacaucugccugaccagaaccgacagaggcugguacugcgacaacgccggcagcgugagcuucuucccccaggccgagaccugcaaggugugcagcaacagaguguucugcgacaccaugaacagccugacccugcccagcgaggugaaccugugcaacguggacaucuucaaccccaaguacgacugcaagaucaugaccagcaagaccgacgugagcagcagcgugaucaccagccugggcgccaucgugagcugcuacggcaagaccaagugcaccgccagcaacaagaacaagggcaucaucaagaccuucagcaacggcugcgacuacgugagcaacaagggcguggacaccgugagcgugggcaacacccuguacuacgugaacaagcaggagggcaagagccuguacgugaagggcgagcccaucaucaacuucuacgacccccugguguuccccagcgacgaguucgacgccagcaucagccaggugaacgagaagaucaaccagagccuggccuucaucagaaagagcgacgagcugcugcacaacgugaacgccggcaagagcaccaccaacaucaugaucaccaccaucaucaucgugaucaucgugauccugcugagccugaucgccgugggccugcugcuguacugcaaggccagaagcacccccgugacccugagcaaggaccagcugagcggcaucaacaacaucgccuucagcaacugaggacuagucccuguucccagagcccacuuuuuuuucuuuuuuugaaauaaaauagccugucuuucagaucuaaaaaaaaaaaaaaaaaaaaaaaaaaaaaaaaaaaaaaaaaaaaaaaaaaaaaaaaaaaaaaaaugcaucccccccccccccccccccccccccccccccaaaggcucuuuucagagccaccagaauu

SEQ ID NO: 6848 - RNA, 1876 nt, Artificial Sequence
  mRNA product Design a-5 comprising derived and/or modified sequence from HRSV(A2)__F_DSCav1_mut7 (opt5)
gggagacuuucccauucuguagcagaauuugguguugccuguggucuuggucccgcggagaagcuuaccauggagcugcucauccugaaggccaacgcuauuaccacaauccuuacggccgugaccuucugcuuugcgagcggccagaauauuacagaagaguucuaccaauccaccuguucugcugucagcaaaggguaucuguccgcccucagaacaggaugguacaccucuguuaucacaauugaacugagcaacaucaaggagaauaaaugcaacggcaccgacgccaaggugaaacuuaucaagcaggaacuggauaaguauaaaaaugcugugacggagcuccagaugcugauguguuccacccccgccacagggucuggaagcgcuauugccuccggcgucgcggugugcaagguucugcaccucgagggggaagugaacaaaaucaagagcgcccugcuuucuaccaauaaagcugucgugucccugagcaacggaguuucugugcucacauuuaagguccuggaccuuaagaauuacauugauaaacagcugcucccuauccugaacaagcaauccuguagcauuucuaauaucgagaccgugauggaguuccagcagaaaaacaaucggcugcucgaaauuacgcgcgaguuuuccgugaacgccggcgucacaaccccgguuagcacauauaugcugaccaauuccgaacuucugucucucaucaacgacaugcccaucaccaacgaucagaagaaacugaugagcaauaacgugcaaauugugagacagcaguccuacagcaucaugugcauuaucaaggaggaaguccuugcuuaugugguucagcugccucucuacggcgugauugacacacccuguuggaaacugcauacgucuccucugugcaccacaaauaccaaggagggguccaacaucugucucacacggaccgaucgcggaugguacugcgacaaugccggcagcgucucuuucuuuccccaagcggaaacguguaaggugugcagcaacagaguuuucugcgauacaaugaacucccugacccuuccuucugaggugaaucuguguaaugucgacaucuuuaacccgaaauaugauugcaagauuaugaccagcaaaacagacguguccagcucugucaucaccucccucggggccauugugagcuguuacggaaagacaaaaugcacggcuucuaauaagaacaagggcaucauuaaaaccuucuccaaugggugugauuauguuagcaacaagggaguggacacagucuccgugggcaauacccuguacuauguuaacaaacaggagggcaagucucuuuacgugaaaggggaacccaucaucaacuuuuaugacccucuggucuuccccagcgaugaguuugacgccuccauuucucaggugaaugaaaagaucaaccaaagccucgcuuucauucggaaguccgaugagcugcugcacaaugugaacgccggaaaaagcacaaccaauaucaugauuacgaccaucauuaucguuaucauugucauccuccugucucuuauugccgugggccugcuccuguacugcaaggcucgcuccacaccugugacccugagcaaagaccagcuuucugggaucaacaauauugcguucuccaacugaggacuagucccuguucccagagcccacuuuuuuuucuuuuuuugaaauaaaauagccugucuuucagaucuaaaaaaaaaaaaaaaaaaaaaaaaaaaaaaaaaaaaaaaaaaaaaaaaaaaaaaaaaaaaaaaaugcaucccccccccccccccccccccccccccccccaaaggcucuuuucagagccaccagaauu

SEQ ID NO: 6849 - RNA, 1876 nt, Artificial Sequence
  mRNA product Design a-5 comprising derived and/or modified sequence from HRSV(A2)__F_DSCav1_mut7 (opt6)
gggagacuuucccauucuguagcagaauuugguguugccuguggucuuggucccgcggagaagcuuaccauggaauuacucauacucaaagcaaaugcaauuaccacuauacucacagcuguaacuuuuuguuucgccucaggacaaaacaucacagaagaauuuuaucaauccacaugcucugccguaucaaaaggcuaccuaucugcccuaagaacagguugguacacaucuguaauaacaaucgaauuauccaacaucaaagaaaacaaaugcaacggcacagacgcaaaagucaaacucaucaaacaagaauuagauaaauauaaaaacgcaguaacagaacuacaaaugcuaaugugcucuacacccgccacaggaucaggauccgcaaucgcuucuggaguagccguuugcaaaguauuacaccuagaaggagaaguaaauaaaauaaaauccgcacuacuaucaacuaauaaagcaguaguaucacuuucuaaugguguaucaguauuaacauucaaaguccucgaccuaaaaaauuacaucgacaaacaacuauuacccauccuuaauaaacaaucaugcuccauaucaaacauagaaacugucauggaauuucaacaaaaaaacaauagacuucuagaaaucacaagagaauuuucuguaaaugcaggaguaacuacaccaguaucaacauauauguuaaccaacuccgaacuacuaucacucauaaacgacaugccaauaacaaacgaccaaaaaaaacuaaugucaaauaacguucaaauaguaagacaacaaucauacucaaucaugugcauaauaaaagaagaaguuuuagcauacgucguacaacuuccccuauacggaguaauagacaccccuugcuggaaacuccacaccucaccacuaugcacuacaaacacaaaagaagguuccaacaucugcuuaacaagaaccgaucgaggaugguacugcgacaacgcugguuccguaucuuucuucccacaagcagaaacaugcaaaguaugcuccaauagaguauucugcgacaccaugaacucacuaacucuaccauccgaaguaaaccuaugcaacgucgacauauuuaauccaaaauaugacugcaaaauaaugacuucaaaaacagacguauccucaucaguaauaacauccuuaggagcaauaguaucauguuacggcaagacaaaauguacagccucaaacaaaaacaaagguaucauuaaaaccuucuccaacggcugcgacuacguaucaaauaaaggugucgauacaguaucaguaggaaacacacucuauuacguuaauaaacaagaaggaaagucauuauacguaaaaggagaaccaauaaucaauuucuacgauccccuagucuuucccucagaugaauuugacgcaagcaucucucaagucaacgaaaaaauaaaccaaucccuagccuucauaagaaaaucagaugaacuacuucauaacgucaacgccggaaaaucaacaaccaacauaaugaucacuacaaucauaauuguaauuauaguaauacuacuaucgcuaauugccguuggacuacuacuauauuguaaagcaagaucaacacccguuacucuauccaaagaucaauuaucaggaaucaacaacauagccuucucaaauuaaggacuagucccuguucccagagcccacuuuuuuuucuuuuuuugaaauaaaauagccugucuuucagaucuaaaaaaaaaaaaaaaaaaaaaaaaaaaaaaaaaaaaaaaaaaaaaaaaaaaaaaaaaaaaaaaaugcaucccccccccccccccccccccccccccccccaaaggcucuuuucagagccaccagaauu

SEQ ID NO: 6850 - RNA, 1876 nt, Artificial Sequence
  mRNA product Design a-5 comprising derived and/or modified sequence from HRSV(A2)__F_DSCav1_mut7 (opt11)
gggagacuuucccauucuguagcagaauuugguguugccuguggucuuggucccgcggagaagcuuaccauggaacuacucauacuuaaagccaacgcaauaaccacaauccucaccgccgucacauucugcuucgccucgggacaaaacauaaccgaagaauuuuaccagucuaccugcuccgccgucuccaaggguuaccucuccgcgcuccgcaccgggugguacaccagcguuaucaccaucgaacuaucuaacauaaaagaaaacaagugcaacggaaccgacgcaaaagucaaacucaucaaacaagaacuagacaaauacaagaaugccgucaccgaacuacaaaugcucaugugcuccacccccgccaccggauccggcuccgccauugccuccggcgucgccguaugcaaaguccuucacuuggaaggagaaguuaacaaaauaaaaagcgcccuccugucgaccaacaaagcgguggucagccucuccaacggcgucucuguccucaccuucaaaguccucgaccucaagaacuacauagauaaacaacuacuccccauccuaaacaaacagucaugcagcauauccaacaucgaaaccgucauggaguuccaacagaaaaacaaccgccuccuugaaaucacccgcgaguucucugucaacgccggcgucaccacccccgucuccaccuacaugcucacaaacuccgaacuccucagccucaucaacgacaugccaaucaccaacgaccaaaagaaacucauguccaacaacguacaaaucguucgucaacaaucauacucaaucaugugcaucauuaaagaagaaguccucgcauacgucguccaacucccccucuauggggucaucgacaccccaugcuggaaacuccacaccucuccccuaugcaccaccaacaccaaagaaggcuccaacaucugccuaacccgaaccgaccgcggaugguacugcgacaacgccggcuccgucuccuucuucccccaggccgaaacauguaaagucugcuccaaccguguguucugcgacaccaugaacucacuaacccuccccuccgaagucaaccucugcaacgucgacaucuucaacccgaaauacgacugcaaaauaaugaccagcaaaacagacguauccucuagcgucauuaccagccuaggugcaaucguguccugcuacggcaaaacaaaaugcaccgccuccaacaaaaauaaaggaaucauaaaaaccuucuccaacggcugcgacuacgucagcaacaaaggagucgacaccgucuccguaggaaauacucuauacuaugucaacaaacaagaggguaaaucccucuacgucaaaggcgaacccaucaucaacuucuacgacccccucgucuuccccucugacgaguucgacgccagcauaucacaaguaaacgaaaagaucaaccaaucccucgcauucauucgcaaauccgacgaacuccuacacaacgucaacgccggaaaauccaccaccaacaucaugaucacuacuaucauuaucgucaucaucgucauccuccucucccucaucgcagucggccuucuacucuacugcaaggcacgcucuacacccguaacccugucuaaagaccaacucuccggcaucaacaacaucgcuuucuccaacuaaggacuagucccuguucccagagcccacuuuuuuuucuuuuuuugaaauaaaauagccugucuuucagaucuaaaaaaaaaaaaaaaaaaaaaaaaaaaaaaaaaaaaaaaaaaaaaaaaaaaaaaaaaaaaaaaaugcaucccccccccccccccccccccccccccccccaaaggcucuuuucagagccaccagaauu

SEQ ID NO: 6851 - RNA, 2057 nt, Artificial Sequence
  mRNA product Design b-1 comprising derived and/or modified sequence from HRSV(A2)__F_DSCav1_mut7 (opt1)
gggagacggagacggccugcaggaccugcucucucagcccucagccgaggccuacgccgagccgagugcgcagccgacgaccgggaggagccgcagccuucaacucugagguacugugauccgcgcugcccgccgggccgccccaguccgcugcugcggcaccuccuucccucgcgcccucuucgcucgccagcgccuucccugugagccugcgucaccgcggccgccaagcuuaccauggagcugcucauccugaaggccaacgccaucaccaccauccugacggcggugaccuucugcuucgccagcggccagaacaucaccgaggaguucuaccaguccacgugcagcgccgucuccaagggguaccucagcgcccugcggaccggcugguacaccuccgugaucaccaucgagcugagcaacaucaaggagaacaagugcaacgggaccgacgccaaggugaagcucaucaagcaggagcuggacaaguacaagaacgcggucacggagcugcagaugcugaugugcuccaccccggcaaccggcuccggcuccgccaucgcgagcggcgucgccgugugcaaggugcugcaccucgagggggaggucaacaagaucaagagcgcccugcuguccaccaacaaggccguggugagccucuccaacggcgucagcgugcugaccuucaaggugcuggaccucaagaacuacaucgacaagcagcugcugcccauccugaacaagcagagcugcuccaucagcaacaucgagacggugauggaguuccagcagaagaacaaccggcuccuggagaucacccgcgaguucagcgugaacgccggggucaccacccccguguccacguacaugcugaccaacagcgagcuccugucccugaucaacgacaugccgaucaccaacgaccagaagaagcucaugagcaacaacgugcagaucguccggcagcaguccuacagcaucaugugcaucaucaaggaggaggugcuggcguacgugguccagcugccccucuacggcgugaucgacacccccugcuggaagcugcacacgagcccccugugcaccaccaacaccaaggagggguccaacaucugccucacgcgcaccgaccggggcugguacugcgacaacgccggcagcgucuccuucuucccgcaggccgagaccugcaaggugugcagcaaccgcguguucugcgacaccaugaacucccugacgcugcccagcgagguaaaccucugcaacgucgacaucuucaaccccaaguacgacugcaagaucaugaccuccaagaccgacgugagcuccagcgugaucaccucccugggggccaucgucagcugcuacggcaagacgaagugcaccgccagcaacaagaacaaggggaucaucaagaccuucuccaacggcugcgacuacgugagcaacaagggcguggacaccguguccgucgggaacacccuguacuacgugaacaagcaggagggcaagagccucuacgugaagggggagcccaucaucaacuucuacgacccgcuggucuuccccuccgacgaguucgacgcgagcaucucccaggugaacgagaagaucaaccagagccuggccuucauccgcaaguccgacgagcugcuccacaacgugaacgccggcaagagcacgaccaacaucaugaucaccaccaucaucaucgucaucaucgugauccugcugucccucaucgccguggggcugcugcucuacugcaaggcccggagcacgcccgucacccuguccaaggaccagcugagcggcaucaacaacaucgcguucuccaacugaggacuaguguccaccugucccuccugggcugcuggauugucucguuuuccugccaaauaaacaggaucagcgcuuuacagaucuaaaaaaaaaaaaaaaaaaaaaaaaaaaaaaaaaaaaaaaaaaaaaaaaaaaaaaaaaaaaaaaaugcaucccccccccccccccccccccccccccccccaaaggcucuuuucagagccaccagaauu

SEQ ID NO: 6852 - RNA, 2057 nt, Artificial Sequence
  mRNA product Design b-1 comprising derived and/or modified sequence from HRSV(A2)__F_DSCav1_mut7 (opt1)
gggagacggagacggccugcaggaccugcucucucagcccucagccgaggccuacgccgagccgagugcgcagccgacgaccgggaggagccgcagccuucaacucugagguacugugauccgcgcugcccgccgggccgccccaguccgcugcugcggcaccuccuucccucgcgcccucuucgcucgccagcgccuucccugugagccugcgucaccgcggccgccaagcuuaccauggagcugcucauccugaaggccaacgccaucaccaccauccugacggcggugaccuucugcuucgccagcggccagaacaucaccgaggaguucuaccaguccacgugcagcgccgucuccaagggguaccucagcgcccugcgcaccggcugguacaccuccgugaucaccaucgagcugagcaacaucaaggagaacaagugcaacgggaccgacgccaaggugaagcucaucaagcaggagcuggacaaguacaagaacgcggucacggagcugcagaugcucaugugcuccacccccgccaccggcagcggguccgccaucgccagcggcguggcggugugcaagguccugcaccuggagggcgaggugaacaagaucaaguccgcccuccugagcaccaacaaggccguggucucccugagcaacgggguguccgugcucacguucaagguccuggaccugaagaacuacaucgacaagcagcuccugccgauccugaacaagcagagcugcuccaucagcaacaucgagaccgugauggaguuccagcagaagaacaaccggcuccuggagaucacccgcgaguucuccgugaacgccggcgucaccacgcccgugagcaccuacaugcugaccaacagcgagcuccugucccugaucaacgacaugcccaucaccaacgaccagaagaagcucaugagcaacaacgugcagaucguccggcagcaguccuacagcaucaugugcaucaucaaggaggaggugcuggccuacgugguccagcugccccucuacggggugaucgacacgccgugcuggaagcugcacaccagcccccugugcaccaccaacacgaaggagggcagcaacaucugccucacccgcaccgaccgggggugguacugcgacaacgcgggcuccgugagcuucuucccccaggccgagaccugcaaggucugcuccaaccgcguguucugcgacacgaugaacagccugacccugcccuccgaggucaaccucugcaacguggacaucuucaacccgaaguacgacugcaagaucaugaccagcaagaccgacguguccagcuccgucaucacgagccugggcgccaucguguccugcuacgggaagaccaagugcaccgccagcaacaagaacaagggcaucaucaagaccuucuccaacgggugcgacuacgugagcaacaagggcgucgacacggugagcgugggcaacacccuguacuacgucaacaagcaggaggggaagucccucuacgugaagggcgagcccaucaucaacuucuacgacccccugguguuccccagcgacgaguucgacgccuccaucagccaggucaacgagaagaucaaccagucccuggcguucauccggaaguccgacgagcuccugcacaacgugaacgccgggaaguccaccaccaacaucaugaucaccacgaucaucaucgugaucaucgucauccugcucagccugaucgccgugggccugcuccuguacugcaaggcccgcuccaccccggugacccugagcaaggaccagcuguccgggaucaacaacaucgccuucagcaacugaggacuaguguccaccugucccuccugggcugcuggauugucucguuuuccugccaaauaaacaggaucagcgcuuuacagaucuaaaaaaaaaaaaaaaaaaaaaaaaaaaaaaaaaaaaaaaaaaaaaaaaaaaaaaaaaaaaaaaaugcaucccccccccccccccccccccccccccccccaaaggcucuuuucagagccaccagaauu

SEQ ID NO: 6853 - RNA, 2057 nt, Artificial Sequence
  mRNA product Design b-1 comprising derived and/or modified sequence from HRSV(A2)__F_DSCav1_mut7 (opt2)
gggagacggagacggccugcaggaccugcucucucagcccucagccgaggccuacgccgagccgagugcgcagccgacgaccgggaggagccgcagccuucaacucugagguacugugauccgcgcugcccgccgggccgccccaguccgcugcugcggcaccuccuucccucgcgcccucuucgcucgccagcgccuucccugugagccugcgucaccgcggccgccaagcuuaccauggagcuccucauccucaaggccaacgccaucaccaccauccucaccgccgucaccuucugcuucgccuccggccagaacaucaccgaggaguucuaccaguccaccugcuccgccgucuccaagggcuaccucuccgcccuccgcaccggcugguacaccuccgucaucaccaucgagcucuccaacaucaaggagaacaagugcaacggcaccgacgccaaggucaagcucaucaagcaggagcucgacaaguacaagaacgccgucaccgagcuccagaugcucaugugcuccacccccgccaccggcuccggcuccgccaucgccuccggcgucgccgucugcaagguccuccaccucgagggcgaggucaacaagaucaaguccgcccuccucuccaccaacaaggccgucgucucccucuccaacggcgucuccguccucaccuucaagguccucgaccucaagaacuacaucgacaagcagcuccuccccauccucaacaagcaguccugcuccaucuccaacaucgagaccgucauggaguuccagcagaagaacaaccgccuccucgagaucacccgcgaguucuccgucaacgccggcgucaccacccccgucuccaccuacaugcucaccaacuccgagcuccucucccucaucaacgacaugcccaucaccaacgaccagaagaagcucauguccaacaacguccagaucguccgccagcaguccuacuccaucaugugcaucaucaaggaggagguccucgccuacgucguccagcucccccucuacggcgucaucgacacccccugcuggaagcuccacaccuccccccucugcaccaccaacaccaaggagggcuccaacaucugccucacccgcaccgaccgcggcugguacugcgacaacgccggcuccgucuccuucuucccccaggccgagaccugcaaggucugcuccaaccgcgucuucugcgacaccaugaacucccucacccuccccuccgaggucaaccucugcaacgucgacaucuucaaccccaaguacgacugcaagaucaugaccuccaagaccgacgucuccuccuccgucaucaccucccucggcgccaucgucuccugcuacggcaagaccaagugcaccgccuccaacaagaacaagggcaucaucaagaccuucuccaacggcugcgacuacgucuccaacaagggcgucgacaccgucuccgucggcaacacccucuacuacgucaacaagcaggagggcaagucccucuacgucaagggcgagcccaucaucaacuucuacgacccccucgucuuccccuccgacgaguucgacgccuccaucucccaggucaacgagaagaucaaccagucccucgccuucauccgcaaguccgacgagcuccuccacaacgucaacgccggcaaguccaccaccaacaucaugaucaccaccaucaucaucgucaucaucgucauccuccucucccucaucgccgucggccuccuccucuacugcaaggcccgcuccacccccgucacccucuccaaggaccagcucuccggcaucaacaacaucgccuucuccaacugaggacuaguguccaccugucccuccugggcugcuggauugucucguuuuccugccaaauaaacaggaucagcgcuuuacagaucuaaaaaaaaaaaaaaaaaaaaaaaaaaaaaaaaaaaaaaaaaaaaaaaaaaaaaaaaaaaaaaaaugcaucccccccccccccccccccccccccccccccaaaggcucuuuucagagccaccagaauu

SEQ ID NO: 6854 - RNA, 2057 nt, Artificial Sequence
  mRNA product Design b-1 comprising derived and/or modified sequence from HRSV(A2)__F_DSCav1_mut7 (opt3)
gggagacggagacggccugcaggaccugcucucucagcccucagccgaggccuacgccgagccgagugcgcagccgacgaccgggaggagccgcagccuucaacucugagguacugugauccgcgcugcccgccgggccgccccaguccgcugcugcggcaccuccuucccucgcgcccucuucgcucgccagcgccuucccugugagccugcgucaccgcggccgccaagcuuaccauggagcugcucauccuuaaggccaacgcuauuaccacaauacugacugcagugacguucugcuuugccagcggccagaauaucaccgaagaguucuaccaauccacauguucugcggucucaaaaggguauuugagugcuuuaagaacuggaugguacaccagcguuauuacaaucgaacuguccaacauuaaggagaauaaaugcaacgguaccgacgccaaggugaaacuaaucaagcaggaacucgauaaguauaaaaaugcaguaacugagcugcagaugcuuauguguucuacacccgccaccggcucggggucagcuauagcaagcggaguggccgucugcaaggugcugcacuuggagggcgaaguuaacaaaaucaagagugcucuccuguccacgaauaaagccguggucucucugagcaacgguguguccguacucacuuuuaagguuuuagaccugaagaauuacauugauaaacagcuuuugccuauccugaacaagcaaucauguaguauuagcaauaucgagaccgugauggaguuccagcagaaaaacaauaggcuacucgaaauaacacgggaguuuucugucaacgcgggggugacuaccccaguguccacauauaugcugaccaauucagaacuucugagcuugauuaacgacaugccgaucacgaacgaucagaagaaacucaugaguaauaacguccaaauuguucgccagcagucuuacuccaucaugugcaucauuaaggaggaagugcuggcauauguagugcaguuaccccuguacggagucauagacacuccuuguuggaaacuccauacaagcccacuuugcaccacuaauacaaaggagggcucgaacaucugucugacccgaacggaucguggcugguacugcgacaaugccgggucuguguccuucuuuccccaagcugaaaccuguaagguuugcucaaacagaguguucugcgauacaaugaauaguuugacucuaccuagcgaggucaaccuguguaauguggacauuuuuaacccaaaauaugauugcaagaucaugaccuccaaaacagacguaucuagcucaguuauaacuagccucggagccauuguguccuguuacgguaagaccaaaugcacagcaagcaauaagaacaagggcaucaucaaaaccuucucuaaugggugugauuaugucucaaacaagggaguggacacugucagugugggcaauacgcuguacuauguuaacaaacaggaggguaagagccuuuacgugaaaggggaacccauuaucaacuuuuaugacccucugguauucccauccgaugaguuugacgcuucuauuucgcaggucaaugaaaagauaaaccaaaguuuggccuucaucaggaaguccgaugagcuccugcacaaugugaacgcgggaaaaucaacaaccaauauuaugaucacuaccaucauuauaguuaucauugugaucuuacugagucuaauugccgucggccuccugcuuuacugcaaggcacggucuacaccggugaccuugagcaaagaccagcuguccggcaucaacaauauagcuuucucaaacugaggacuaguguccaccugucccuccugggcugcuggauugucucguuuuccugccaaauaaacaggaucagcgcuuuacagaucuaaaaaaaaaaaaaaaaaaaaaaaaaaaaaaaaaaaaaaaaaaaaaaaaaaaaaaaaaaaaaaaaugcaucccccccccccccccccccccccccccccccaaaggcucuuuucagagccaccagaauu

SEQ ID NO: 6855 - RNA, 2057 nt, Artificial Sequence
  mRNA product Design b-1 comprising derived and/or modified sequence from HRSV(A2)__F_DSCav1_mut7 (opt4)
gggagacggagacggccugcaggaccugcucucucagcccucagccgaggccuacgccgagccgagugcgcagccgacgaccgggaggagccgcagccuucaacucugagguacugugauccgcgcugcccgccgggccgccccaguccgcugcugcggcaccuccuucccucgcgcccucuucgcucgccagcgccuucccugugagccugcgucaccgcggccgccaagcuuaccauggagcugcugauccugaaggccaacgccaucaccaccauccugaccgccgugaccuucugcuucgccagcggccagaacaucaccgaggaguucuaccagagcaccugcagcgccgugagcaagggcuaccugagcgcccugagaaccggcugguacaccagcgugaucaccaucgagcugagcaacaucaaggagaacaagugcaacggcaccgacgccaaggugaagcugaucaagcaggagcuggacaaguacaagaacgccgugaccgagcugcagaugcugaugugcagcacccccgccaccggcagcggcagcgccaucgccagcggcguggccgugugcaaggugcugcaccuggagggcgaggugaacaagaucaagagcgcccugcugagcaccaacaaggccguggugagccugagcaacggcgugagcgugcugaccuucaaggugcuggaccugaagaacuacaucgacaagcagcugcugcccauccugaacaagcagagcugcagcaucagcaacaucgagaccgugauggaguuccagcagaagaacaacagacugcuggagaucaccagagaguucagcgugaacgccggcgugaccacccccgugagcaccuacaugcugaccaacagcgagcugcugagccugaucaacgacaugcccaucaccaacgaccagaagaagcugaugagcaacaacgugcagaucgugagacagcagagcuacagcaucaugugcaucaucaaggaggaggugcuggccuacguggugcagcugccccuguacggcgugaucgacacccccugcuggaagcugcacaccagcccccugugcaccaccaacaccaaggagggcagcaacaucugccugaccagaaccgacagaggcugguacugcgacaacgccggcagcgugagcuucuucccccaggccgagaccugcaaggugugcagcaacagaguguucugcgacaccaugaacagccugacccugcccagcgaggugaaccugugcaacguggacaucuucaaccccaaguacgacugcaagaucaugaccagcaagaccgacgugagcagcagcgugaucaccagccugggcgccaucgugagcugcuacggcaagaccaagugcaccgccagcaacaagaacaagggcaucaucaagaccuucagcaacggcugcgacuacgugagcaacaagggcguggacaccgugagcgugggcaacacccuguacuacgugaacaagcaggagggcaagagccuguacgugaagggcgagcccaucaucaacuucuacgacccccugguguuccccagcgacgaguucgacgccagcaucagccaggugaacgagaagaucaaccagagccuggccuucaucagaaagagcgacgagcugcugcacaacgugaacgccggcaagagcaccaccaacaucaugaucaccaccaucaucaucgugaucaucgugauccugcugagccugaucgccgugggccugcugcuguacugcaaggccagaagcacccccgugacccugagcaaggaccagcugagcggcaucaacaacaucgccuucagcaacugaggacuaguguccaccugucccuccugggcugcuggauugucucguuuuccugccaaauaaacaggaucagcgcuuuacagaucuaaaaaaaaaaaaaaaaaaaaaaaaaaaaaaaaaaaaaaaaaaaaaaaaaaaaaaaaaaaaaaaaugcaucccccccccccccccccccccccccccccccaaaggcucuuuucagagccaccagaauu

SEQ ID NO: 6856 - RNA, 2057 nt, Artificial Sequence
  mRNA product Design b-1 comprising derived and/or modified sequence from HRSV(A2)__F_DSCav1_mut7 (opt5)
gggagacggagacggccugcaggaccugcucucucagcccucagccgaggccuacgccgagccgagugcgcagccgacgaccgggaggagccgcagccuucaacucugagguacugugauccgcgcugcccgccgggccgccccaguccgcugcugcggcaccuccuucccucgcgcccucuucgcucgccagcgccuucccugugagccugcgucaccgcggccgccaagcuuaccauggagcugcucauccugaaggccaacgcuauuaccacaauccuuacggccgugaccuucugcuuugcgagcggccagaauauuacagaagaguucuaccaauccaccuguucugcugucagcaaaggguaucuguccgcccucagaacaggaugguacaccucuguuaucacaauugaacugagcaacaucaaggagaauaaaugcaacggcaccgacgccaaggugaaacuuaucaagcaggaacuggauaaguauaaaaaugcugugacggagcuccagaugcugauguguuccacccccgccacagggucuggaagcgcuauugccuccggcgucgcggugugcaagguucugcaccucgagggggaagugaacaaaaucaagagcgcccugcuuucuaccaauaaagcugucgugucccugagcaacggaguuucugugcucacauuuaagguccuggaccuuaagaauuacauugauaaacagcugcucccuauccugaacaagcaauccuguagcauuucuaauaucgagaccgugauggaguuccagcagaaaaacaaucggcugcucgaaauuacgcgcgaguuuuccgugaacgccggcgucacaaccccgguuagcacauauaugcugaccaauuccgaacuucugucucucaucaacgacaugcccaucaccaacgaucagaagaaacugaugagcaauaacgugcaaauugugagacagcaguccuacagcaucaugugcauuaucaaggaggaaguccuugcuuaugugguucagcugccucucuacggcgugauugacacacccuguuggaaacugcauacgucuccucugugcaccacaaauaccaaggagggguccaacaucugucucacacggaccgaucgcggaugguacugcgacaaugccggcagcgucucuuucuuuccccaagcggaaacguguaaggugugcagcaacagaguuuucugcgauacaaugaacucccugacccuuccuucugaggugaaucuguguaaugucgacaucuuuaacccgaaauaugauugcaagauuaugaccagcaaaacagacguguccagcucugucaucaccucccucggggccauugugagcuguuacggaaagacaaaaugcacggcuucuaauaagaacaagggcaucauuaaaaccuucuccaaugggugugauuauguuagcaacaagggaguggacacagucuccgugggcaauacccuguacuauguuaacaaacaggagggcaagucucuuuacgugaaaggggaacccaucaucaacuuuuaugacccucuggucuuccccagcgaugaguuugacgccuccauuucucaggugaaugaaaagaucaaccaaagccucgcuuucauucggaaguccgaugagcugcugcacaaugugaacgccggaaaaagcacaaccaauaucaugauuacgaccaucauuaucguuaucauugucauccuccugucucuuauugccgugggccugcuccuguacugcaaggcucgcuccacaccugugacccugagcaaagaccagcuuucugggaucaacaauauugcguucuccaacugaggacuaguguccaccugucccuccugggcugcuggauugucucguuuuccugccaaauaaacaggaucagcgcuuuacagaucuaaaaaaaaaaaaaaaaaaaaaaaaaaaaaaaaaaaaaaaaaaaaaaaaaaaaaaaaaaaaaaaaugcaucccccccccccccccccccccccccccccccaaaggcucuuuucagagccaccagaauu

SEQ ID NO: 6857 - RNA, 2057 nt, Artificial Sequence
  mRNA product Design b-1 comprising derived and/or modified sequence from HRSV(A2)__F_DSCav1_mut7 (opt6)
gggagacggagacggccugcaggaccugcucucucagcccucagccgaggccuacgccgagccgagugcgcagccgacgaccgggaggagccgcagccuucaacucugagguacugugauccgcgcugcccgccgggccgccccaguccgcugcugcggcaccuccuucccucgcgcccucuucgcucgccagcgccuucccugugagccugcgucaccgcggccgccaagcuuaccauggaauuacucauacucaaagcaaaugcaauuaccacuauacucacagcuguaacuuuuuguuucgccucaggacaaaacaucacagaagaauuuuaucaauccacaugcucugccguaucaaaaggcuaccuaucugcccuaagaacagguugguacacaucuguaauaacaaucgaauuauccaacaucaaagaaaacaaaugcaacggcacagacgcaaaagucaaacucaucaaacaagaauuagauaaauauaaaaacgcaguaacagaacuacaaaugcuaaugugcucuacacccgccacaggaucaggauccgcaaucgcuucuggaguagccguuugcaaaguauuacaccuagaaggagaaguaaauaaaauaaaauccgcacuacuaucaacuaauaaagcaguaguaucacuuucuaaugguguaucaguauuaacauucaaaguccucgaccuaaaaaauuacaucgacaaacaacuauuacccauccuuaauaaacaaucaugcuccauaucaaacauagaaacugucauggaauuucaacaaaaaaacaauagacuucuagaaaucacaagagaauuuucuguaaaugcaggaguaacuacaccaguaucaacauauauguuaaccaacuccgaacuacuaucacucauaaacgacaugccaauaacaaacgaccaaaaaaaacuaaugucaaauaacguucaaauaguaagacaacaaucauacucaaucaugugcauaauaaaagaagaaguuuuagcauacgucguacaacuuccccuauacggaguaauagacaccccuugcuggaaacuccacaccucaccacuaugcacuacaaacacaaaagaagguuccaacaucugcuuaacaagaaccgaucgaggaugguacugcgacaacgcugguuccguaucuuucuucccacaagcagaaacaugcaaaguaugcuccaauagaguauucugcgacaccaugaacucacuaacucuaccauccgaaguaaaccuaugcaacgucgacauauuuaauccaaaauaugacugcaaaauaaugacuucaaaaacagacguauccucaucaguaauaacauccuuaggagcaauaguaucauguuacggcaagacaaaauguacagccucaaacaaaaacaaagguaucauuaaaaccuucuccaacggcugcgacuacguaucaaauaaaggugucgauacaguaucaguaggaaacacacucuauuacguuaauaaacaagaaggaaagucauuauacguaaaaggagaaccaauaaucaauuucuacgauccccuagucuuucccucagaugaauuugacgcaagcaucucucaagucaacgaaaaaauaaaccaaucccuagccuucauaagaaaaucagaugaacuacuucauaacgucaacgccggaaaaucaacaaccaacauaaugaucacuacaaucauaauuguaauuauaguaauacuacuaucgcuaauugccguuggacuacuacuauauuguaaagcaagaucaacacccguuacucuauccaaagaucaauuaucaggaaucaacaacauagccuucucaaauuaaggacuaguguccaccugucccuccugggcugcuggauugucucguuuuccugccaaauaaacaggaucagcgcuuuacagaucuaaaaaaaaaaaaaaaaaaaaaaaaaaaaaaaaaaaaaaaaaaaaaaaaaaaaaaaaaaaaaaaaugcaucccccccccccccccccccccccccccccccaaaggcucuuuucagagccaccagaauu

SEQ ID NO: 6858 - RNA, 2057 nt, Artificial Sequence
  mRNA product Design b-1 comprising derived and/or modified sequence from HRSV(A2)__F_DSCav1_mut7 (opt11)
gggagacggagacggccugcaggaccugcucucucagcccucagccgaggccuacgccgagccgagugcgcagccgacgaccgggaggagccgcagccuucaacucugagguacugugauccgcgcugcccgccgggccgccccaguccgcugcugcggcaccuccuucccucgcgcccucuucgcucgccagcgccuucccugugagccugcgucaccgcggccgccaagcuuaccauggaacuacucauacuuaaagccaacgcaauaaccacaauccucaccgccgucacauucugcuucgccucgggacaaaacauaaccgaagaauuuuaccagucuaccugcuccgccgucuccaaggguuaccucuccgcgcuccgcaccgggugguacaccagcguuaucaccaucgaacuaucuaacauaaaagaaaacaagugcaacggaaccgacgcaaaagucaaacucaucaaacaagaacuagacaaauacaagaaugccgucaccgaacuacaaaugcucaugugcuccacccccgccaccggauccggcuccgccauugccuccggcgucgccguaugcaaaguccuucacuuggaaggagaaguuaacaaaauaaaaagcgcccuccugucgaccaacaaagcgguggucagccucuccaacggcgucucuguccucaccuucaaaguccucgaccucaagaacuacauagauaaacaacuacuccccauccuaaacaaacagucaugcagcauauccaacaucgaaaccgucauggaguuccaacagaaaaacaaccgccuccuugaaaucacccgcgaguucucugucaacgccggcgucaccacccccgucuccaccuacaugcucacaaacuccgaacuccucagccucaucaacgacaugccaaucaccaacgaccaaaagaaacucauguccaacaacguacaaaucguucgucaacaaucauacucaaucaugugcaucauuaaagaagaaguccucgcauacgucguccaacucccccucuauggggucaucgacaccccaugcuggaaacuccacaccucuccccuaugcaccaccaacaccaaagaaggcuccaacaucugccuaacccgaaccgaccgcggaugguacugcgacaacgccggcuccgucuccuucuucccccaggccgaaacauguaaagucugcuccaaccguguguucugcgacaccaugaacucacuaacccuccccuccgaagucaaccucugcaacgucgacaucuucaacccgaaauacgacugcaaaauaaugaccagcaaaacagacguauccucuagcgucauuaccagccuaggugcaaucguguccugcuacggcaaaacaaaaugcaccgccuccaacaaaaauaaaggaaucauaaaaaccuucuccaacggcugcgacuacgucagcaacaaaggagucgacaccgucuccguaggaaauacucuauacuaugucaacaaacaagaggguaaaucccucuacgucaaaggcgaacccaucaucaacuucuacgacccccucgucuuccccucugacgaguucgacgccagcauaucacaaguaaacgaaaagaucaaccaaucccucgcauucauucgcaaauccgacgaacuccuacacaacgucaacgccggaaaauccaccaccaacaucaugaucacuacuaucauuaucgucaucaucgucauccuccucucccucaucgcagucggccuucuacucuacugcaaggcacgcucuacacccguaacccugucuaaagaccaacucuccggcaucaacaacaucgcuuucuccaacuaaggacuaguguccaccugucccuccugggcugcuggauugucucguuuuccugccaaauaaacaggaucagcgcuuuacagaucuaaaaaaaaaaaaaaaaaaaaaaaaaaaaaaaaaaaaaaaaaaaaaaaaaaaaaaaaaaaaaaaaugcaucccccccccccccccccccccccccccccccaaaggcucuuuucagagccaccagaauu

SEQ ID NO: 6859 - RNA, 1877 nt, Artificial Sequence
  mRNA product Design b-2 comprising derived and/or modified sequence from HRSV(A2)__F_DSCav1_mut7 (opt1)
gggagagccucugcuggaguccggggaguggcguuggcugcuagagcgaagcuuaccauggagcugcucauccugaaggccaacgccaucaccaccauccugacggcggugaccuucugcuucgccagcggccagaacaucaccgaggaguucuaccaguccacgugcagcgccgucuccaagggguaccucagcgcccugcggaccggcugguacaccuccgugaucaccaucgagcugagcaacaucaaggagaacaagugcaacgggaccgacgccaaggugaagcucaucaagcaggagcuggacaaguacaagaacgcggucacggagcugcagaugcugaugugcuccaccccggcaaccggcuccggcuccgccaucgcgagcggcgucgccgugugcaaggugcugcaccucgagggggaggucaacaagaucaagagcgcccugcuguccaccaacaaggccguggugagccucuccaacggcgucagcgugcugaccuucaaggugcuggaccucaagaacuacaucgacaagcagcugcugcccauccugaacaagcagagcugcuccaucagcaacaucgagacggugauggaguuccagcagaagaacaaccggcuccuggagaucacccgcgaguucagcgugaacgccggggucaccacccccguguccacguacaugcugaccaacagcgagcuccugucccugaucaacgacaugccgaucaccaacgaccagaagaagcucaugagcaacaacgugcagaucguccggcagcaguccuacagcaucaugugcaucaucaaggaggaggugcuggcguacgugguccagcugccccucuacggcgugaucgacacccccugcuggaagcugcacacgagcccccugugcaccaccaacaccaaggagggguccaacaucugccucacgcgcaccgaccggggcugguacugcgacaacgccggcagcgucuccuucuucccgcaggccgagaccugcaaggugugcagcaaccgcguguucugcgacaccaugaacucccugacgcugcccagcgagguaaaccucugcaacgucgacaucuucaaccccaaguacgacugcaagaucaugaccuccaagaccgacgugagcuccagcgugaucaccucccugggggccaucgucagcugcuacggcaagacgaagugcaccgccagcaacaagaacaaggggaucaucaagaccuucuccaacggcugcgacuacgugagcaacaagggcguggacaccguguccgucgggaacacccuguacuacgugaacaagcaggagggcaagagccucuacgugaagggggagcccaucaucaacuucuacgacccgcuggucuuccccuccgacgaguucgacgcgagcaucucccaggugaacgagaagaucaaccagagccuggccuucauccgcaaguccgacgagcugcuccacaacgugaacgccggcaagagcacgaccaacaucaugaucaccaccaucaucaucgucaucaucgugauccugcugucccucaucgccguggggcugcugcucuacugcaaggcccggagcacgcccgucacccuguccaaggaccagcugagcggcaucaacaacaucgcguucuccaacugaggacuaguguccaccugucccuccugggcugcuggauugucucguuuuccugccaaauaaacaggaucagcgcuuuacagaucuaaaaaaaaaaaaaaaaaaaaaaaaaaaaaaaaaaaaaaaaaaaaaaaaaaaaaaaaaaaaaaaaugcaucccccccccccccccccccccccccccccccaaaggcucuuuucagagccaccagaauu

SEQ ID NO: 6860 - RNA, 1877 nt, Artificial Sequence
  mRNA product Design b-2 comprising derived and/or modified sequence from HRSV(A2)__F_DSCav1_mut7 (opt1)
gggagagccucugcuggaguccggggaguggcguuggcugcuagagcgaagcuuaccauggagcugcucauccugaaggccaacgccaucaccaccauccugacggcggugaccuucugcuucgccagcggccagaacaucaccgaggaguucuaccaguccacgugcagcgccgucuccaagggguaccucagcgcccugcgcaccggcugguacaccuccgugaucaccaucgagcugagcaacaucaaggagaacaagugcaacgggaccgacgccaaggugaagcucaucaagcaggagcuggacaaguacaagaacgcggucacggagcugcagaugcucaugugcuccacccccgccaccggcagcggguccgccaucgccagcggcguggcggugugcaagguccugcaccuggagggcgaggugaacaagaucaaguccgcccuccugagcaccaacaaggccguggucucccugagcaacgggguguccgugcucacguucaagguccuggaccugaagaacuacaucgacaagcagcuccugccgauccugaacaagcagagcugcuccaucagcaacaucgagaccgugauggaguuccagcagaagaacaaccggcuccuggagaucacccgcgaguucuccgugaacgccggcgucaccacgcccgugagcaccuacaugcugaccaacagcgagcuccugucccugaucaacgacaugcccaucaccaacgaccagaagaagcucaugagcaacaacgugcagaucguccggcagcaguccuacagcaucaugugcaucaucaaggaggaggugcuggccuacgugguccagcugccccucuacggggugaucgacacgccgugcuggaagcugcacaccagcccccugugcaccaccaacacgaaggagggcagcaacaucugccucacccgcaccgaccgggggugguacugcgacaacgcgggcuccgugagcuucuucccccaggccgagaccugcaaggucugcuccaaccgcguguucugcgacacgaugaacagccugacccugcccuccgaggucaaccucugcaacguggacaucuucaacccgaaguacgacugcaagaucaugaccagcaagaccgacguguccagcuccgucaucacgagccugggcgccaucguguccugcuacgggaagaccaagugcaccgccagcaacaagaacaagggcaucaucaagaccuucuccaacgggugcgacuacgugagcaacaagggcgucgacacggugagcgugggcaacacccuguacuacgucaacaagcaggaggggaagucccucuacgugaagggcgagcccaucaucaacuucuacgacccccugguguuccccagcgacgaguucgacgccuccaucagccaggucaacgagaagaucaaccagucccuggcguucauccggaaguccgacgagcuccugcacaacgugaacgccgggaaguccaccaccaacaucaugaucaccacgaucaucaucgugaucaucgucauccugcucagccugaucgccgugggccugcuccuguacugcaaggcccgcuccaccccggugacccugagcaaggaccagcuguccgggaucaacaacaucgccuucagcaacugaggacuaguguccaccugucccuccugggcugcuggauugucucguuuuccugccaaauaaacaggaucagcgcuuuacagaucuaaaaaaaaaaaaaaaaaaaaaaaaaaaaaaaaaaaaaaaaaaaaaaaaaaaaaaaaaaaaaaaaugcaucccccccccccccccccccccccccccccccaaaggcucuuuucagagccaccagaauu

SEQ ID NO: 6861 - RNA, 1877 nt, Artificial Sequence
  mRNA product Design b-2 comprising derived and/or modified sequence from HRSV(A2)__F_DSCav1_mut7 (opt2)
gggagagccucugcuggaguccggggaguggcguuggcugcuagagcgaagcuuaccauggagcuccucauccucaaggccaacgccaucaccaccauccucaccgccgucaccuucugcuucgccuccggccagaacaucaccgaggaguucuaccaguccaccugcuccgccgucuccaagggcuaccucuccgcccuccgcaccggcugguacaccuccgucaucaccaucgagcucuccaacaucaaggagaacaagugcaacggcaccgacgccaaggucaagcucaucaagcaggagcucgacaaguacaagaacgccgucaccgagcuccagaugcucaugugcuccacccccgccaccggcuccggcuccgccaucgccuccggcgucgccgucugcaagguccuccaccucgagggcgaggucaacaagaucaaguccgcccuccucuccaccaacaaggccgucgucucccucuccaacggcgucuccguccucaccuucaagguccucgaccucaagaacuacaucgacaagcagcuccuccccauccucaacaagcaguccugcuccaucuccaacaucgagaccgucauggaguuccagcagaagaacaaccgccuccucgagaucacccgcgaguucuccgucaacgccggcgucaccacccccgucuccaccuacaugcucaccaacuccgagcuccucucccucaucaacgacaugcccaucaccaacgaccagaagaagcucauguccaacaacguccagaucguccgccagcaguccuacuccaucaugugcaucaucaaggaggagguccucgccuacgucguccagcucccccucuacggcgucaucgacacccccugcuggaagcuccacaccuccccccucugcaccaccaacaccaaggagggcuccaacaucugccucacccgcaccgaccgcggcugguacugcgacaacgccggcuccgucuccuucuucccccaggccgagaccugcaaggucugcuccaaccgcgucuucugcgacaccaugaacucccucacccuccccuccgaggucaaccucugcaacgucgacaucuucaaccccaaguacgacugcaagaucaugaccuccaagaccgacgucuccuccuccgucaucaccucccucggcgccaucgucuccugcuacggcaagaccaagugcaccgccuccaacaagaacaagggcaucaucaagaccuucuccaacggcugcgacuacgucuccaacaagggcgucgacaccgucuccgucggcaacacccucuacuacgucaacaagcaggagggcaagucccucuacgucaagggcgagcccaucaucaacuucuacgacccccucgucuuccccuccgacgaguucgacgccuccaucucccaggucaacgagaagaucaaccagucccucgccuucauccgcaaguccgacgagcuccuccacaacgucaacgccggcaaguccaccaccaacaucaugaucaccaccaucaucaucgucaucaucgucauccuccucucccucaucgccgucggccuccuccucuacugcaaggcccgcuccacccccgucacccucuccaaggaccagcucuccggcaucaacaacaucgccuucuccaacugaggacuaguguccaccugucccuccugggcugcuggauugucucguuuuccugccaaauaaacaggaucagcgcuuuacagaucuaaaaaaaaaaaaaaaaaaaaaaaaaaaaaaaaaaaaaaaaaaaaaaaaaaaaaaaaaaaaaaaaugcaucccccccccccccccccccccccccccccccaaaggcucuuuucagagccaccagaauu

SEQ ID NO: 6862 - RNA, 1877 nt, Artificial Sequence
  mRNA product Design b-2 comprising derived and/or modified sequence from HRSV(A2)__F_DSCav1_mut7 (opt3)
gggagagccucugcuggaguccggggaguggcguuggcugcuagagcgaagcuuaccauggagcugcucauccuuaaggccaacgcuauuaccacaauacugacugcagugacguucugcuuugccagcggccagaauaucaccgaagaguucuaccaauccacauguucugcggucucaaaaggguauuugagugcuuuaagaacuggaugguacaccagcguuauuacaaucgaacuguccaacauuaaggagaauaaaugcaacgguaccgacgccaaggugaaacuaaucaagcaggaacucgauaaguauaaaaaugcaguaacugagcugcagaugcuuauguguucuacacccgccaccggcucggggucagcuauagcaagcggaguggccgucugcaaggugcugcacuuggagggcgaaguuaacaaaaucaagagugcucuccuguccacgaauaaagccguggucucucugagcaacgguguguccguacucacuuuuaagguuuuagaccugaagaauuacauugauaaacagcuuuugccuauccugaacaagcaaucauguaguauuagcaauaucgagaccgugauggaguuccagcagaaaaacaauaggcuacucgaaauaacacgggaguuuucugucaacgcgggggugacuaccccaguguccacauauaugcugaccaauucagaacuucugagcuugauuaacgacaugccgaucacgaacgaucagaagaaacucaugaguaauaacguccaaauuguucgccagcagucuuacuccaucaugugcaucauuaaggaggaagugcuggcauauguagugcaguuaccccuguacggagucauagacacuccuuguuggaaacuccauacaagcccacuuugcaccacuaauacaaaggagggcucgaacaucugucugacccgaacggaucguggcugguacugcgacaaugccgggucuguguccuucuuuccccaagcugaaaccuguaagguuugcucaaacagaguguucugcgauacaaugaauaguuugacucuaccuagcgaggucaaccuguguaauguggacauuuuuaacccaaaauaugauugcaagaucaugaccuccaaaacagacguaucuagcucaguuauaacuagccucggagccauuguguccuguuacgguaagaccaaaugcacagcaagcaauaagaacaagggcaucaucaaaaccuucucuaaugggugugauuaugucucaaacaagggaguggacacugucagugugggcaauacgcuguacuauguuaacaaacaggaggguaagagccuuuacgugaaaggggaacccauuaucaacuuuuaugacccucugguauucccauccgaugaguuugacgcuucuauuucgcaggucaaugaaaagauaaaccaaaguuuggccuucaucaggaaguccgaugagcuccugcacaaugugaacgcgggaaaaucaacaaccaauauuaugaucacuaccaucauuauaguuaucauugugaucuuacugagucuaauugccgucggccuccugcuuuacugcaaggcacggucuacaccggugaccuugagcaaagaccagcuguccggcaucaacaauauagcuuucucaaacugaggacuaguguccaccugucccuccugggcugcuggauugucucguuuuccugccaaauaaacaggaucagcgcuuuacagaucuaaaaaaaaaaaaaaaaaaaaaaaaaaaaaaaaaaaaaaaaaaaaaaaaaaaaaaaaaaaaaaaaugcaucccccccccccccccccccccccccccccccaaaggcucuuuucagagccaccagaauu

SEQ ID NO: 6863 - RNA, 1877 nt, Artificial Sequence
  mRNA product Design b-2 comprising derived and/or modified sequence from HRSV(A2)__F_DSCav1_mut7 (opt4)
gggagagccucugcuggaguccggggaguggcguuggcugcuagagcgaagcuuaccauggagcugcugauccugaaggccaacgccaucaccaccauccugaccgccgugaccuucugcuucgccagcggccagaacaucaccgaggaguucuaccagagcaccugcagcgccgugagcaagggcuaccugagcgcccugagaaccggcugguacaccagcgugaucaccaucgagcugagcaacaucaaggagaacaagugcaacggcaccgacgccaaggugaagcugaucaagcaggagcuggacaaguacaagaacgccgugaccgagcugcagaugcugaugugcagcacccccgccaccggcagcggcagcgccaucgccagcggcguggccgugugcaaggugcugcaccuggagggcgaggugaacaagaucaagagcgcccugcugagcaccaacaaggccguggugagccugagcaacggcgugagcgugcugaccuucaaggugcuggaccugaagaacuacaucgacaagcagcugcugcccauccugaacaagcagagcugcagcaucagcaacaucgagaccgugauggaguuccagcagaagaacaacagacugcuggagaucaccagagaguucagcgugaacgccggcgugaccacccccgugagcaccuacaugcugaccaacagcgagcugcugagccugaucaacgacaugcccaucaccaacgaccagaagaagcugaugagcaacaacgugcagaucgugagacagcagagcuacagcaucaugugcaucaucaaggaggaggugcuggccuacguggugcagcugccccuguacggcgugaucgacacccccugcuggaagcugcacaccagcccccugugcaccaccaacaccaaggagggcagcaacaucugccugaccagaaccgacagaggcugguacugcgacaacgccggcagcgugagcuucuucccccaggccgagaccugcaaggugugcagcaacagaguguucugcgacaccaugaacagccugacccugcccagcgaggugaaccugugcaacguggacaucuucaaccccaaguacgacugcaagaucaugaccagcaagaccgacgugagcagcagcgugaucaccagccugggcgccaucgugagcugcuacggcaagaccaagugcaccgccagcaacaagaacaagggcaucaucaagaccuucagcaacggcugcgacuacgugagcaacaagggcguggacaccgugagcgugggcaacacccuguacuacgugaacaagcaggagggcaagagccuguacgugaagggcgagcccaucaucaacuucuacgacccccugguguuccccagcgacgaguucgacgccagcaucagccaggugaacgagaagaucaaccagagccuggccuucaucagaaagagcgacgagcugcugcacaacgugaacgccggcaagagcaccaccaacaucaugaucaccaccaucaucaucgugaucaucgugauccugcugagccugaucgccgugggccugcugcuguacugcaaggccagaagcacccccgugacccugagcaaggaccagcugagcggcaucaacaacaucgccuucagcaacugaggacuaguguccaccugucccuccugggcugcuggauugucucguuuuccugccaaauaaacaggaucagcgcuuuacagaucuaaaaaaaaaaaaaaaaaaaaaaaaaaaaaaaaaaaaaaaaaaaaaaaaaaaaaaaaaaaaaaaaugcaucccccccccccccccccccccccccccccccaaaggcucuuuucagagccaccagaauu

SEQ ID NO: 6864 - RNA, 1877 nt, Artificial Sequence
  mRNA product Design b-2 comprising derived and/or modified sequence from HRSV(A2)__F_DSCav1_mut7 (opt5)
gggagagccucugcuggaguccggggaguggcguuggcugcuagagcgaagcuuaccauggagcugcucauccugaaggccaacgcuauuaccacaauccuuacggccgugaccuucugcuuugcgagcggccagaauauuacagaagaguucuaccaauccaccuguucugcugucagcaaaggguaucuguccgcccucagaacaggaugguacaccucuguuaucacaauugaacugagcaacaucaaggagaauaaaugcaacggcaccgacgccaaggugaaacuuaucaagcaggaacuggauaaguauaaaaaugcugugacggagcuccagaugcugauguguuccacccccgccacagggucuggaagcgcuauugccuccggcgucgcggugugcaagguucugcaccucgagggggaagugaacaaaaucaagagcgcccugcuuucuaccaauaaagcugucgugucccugagcaacggaguuucugugcucacauuuaagguccuggaccuuaagaauuacauugauaaacagcugcucccuauccugaacaagcaauccuguagcauuucuaauaucgagaccgugauggaguuccagcagaaaaacaaucggcugcucgaaauuacgcgcgaguuuuccgugaacgccggcgucacaaccccgguuagcacauauaugcugaccaauuccgaacuucugucucucaucaacgacaugcccaucaccaacgaucagaagaaacugaugagcaauaacgugcaaauugugagacagcaguccuacagcaucaugugcauuaucaaggaggaaguccuugcuuaugugguucagcugccucucuacggcgugauugacacacccuguuggaaacugcauacgucuccucugugcaccacaaauaccaaggagggguccaacaucugucucacacggaccgaucgcggaugguacugcgacaaugccggcagcgucucuuucuuuccccaagcggaaacguguaaggugugcagcaacagaguuuucugcgauacaaugaacucccugacccuuccuucugaggugaaucuguguaaugucgacaucuuuaacccgaaauaugauugcaagauuaugaccagcaaaacagacguguccagcucugucaucaccucccucggggccauugugagcuguuacggaaagacaaaaugcacggcuucuaauaagaacaagggcaucauuaaaaccuucuccaaugggugugauuauguuagcaacaagggaguggacacagucuccgugggcaauacccuguacuauguuaacaaacaggagggcaagucucuuuacgugaaaggggaacccaucaucaacuuuuaugacccucuggucuuccccagcgaugaguuugacgccuccauuucucaggugaaugaaaagaucaaccaaagccucgcuuucauucggaaguccgaugagcugcugcacaaugugaacgccggaaaaagcacaaccaauaucaugauuacgaccaucauuaucguuaucauugucauccuccugucucuuauugccgugggccugcuccuguacugcaaggcucgcuccacaccugugacccugagcaaagaccagcuuucugggaucaacaauauugcguucuccaacugaggacuaguguccaccugucccuccugggcugcuggauugucucguuuuccugccaaauaaacaggaucagcgcuuuacagaucuaaaaaaaaaaaaaaaaaaaaaaaaaaaaaaaaaaaaaaaaaaaaaaaaaaaaaaaaaaaaaaaaugcaucccccccccccccccccccccccccccccccaaaggcucuuuucagagccaccagaauu

SEQ ID NO: 6865 - RNA, 1877 nt, Artificial Sequence
  mRNA product Design b-2 comprising derived and/or modified sequence from HRSV(A2)__F_DSCav1_mut7 (opt6)
gggagagccucugcuggaguccggggaguggcguuggcugcuagagcgaagcuuaccauggaauuacucauacucaaagcaaaugcaauuaccacuauacucacagcuguaacuuuuuguuucgccucaggacaaaacaucacagaagaauuuuaucaauccacaugcucugccguaucaaaaggcuaccuaucugcccuaagaacagguugguacacaucuguaauaacaaucgaauuauccaacaucaaagaaaacaaaugcaacggcacagacgcaaaagucaaacucaucaaacaagaauuagauaaauauaaaaacgcaguaacagaacuacaaaugcuaaugugcucuacacccgccacaggaucaggauccgcaaucgcuucuggaguagccguuugcaaaguauuacaccuagaaggagaaguaaauaaaauaaaauccgcacuacuaucaacuaauaaagcaguaguaucacuuucuaaugguguaucaguauuaacauucaaaguccucgaccuaaaaaauuacaucgacaaacaacuauuacccauccuuaauaaacaaucaugcuccauaucaaacauagaaacugucauggaauuucaacaaaaaaacaauagacuucuagaaaucacaagagaauuuucuguaaaugcaggaguaacuacaccaguaucaacauauauguuaaccaacuccgaacuacuaucacucauaaacgacaugccaauaacaaacgaccaaaaaaaacuaaugucaaauaacguucaaauaguaagacaacaaucauacucaaucaugugcauaauaaaagaagaaguuuuagcauacgucguacaacuuccccuauacggaguaauagacaccccuugcuggaaacuccacaccucaccacuaugcacuacaaacacaaaagaagguuccaacaucugcuuaacaagaaccgaucgaggaugguacugcgacaacgcugguuccguaucuuucuucccacaagcagaaacaugcaaaguaugcuccaauagaguauucugcgacaccaugaacucacuaacucuaccauccgaaguaaaccuaugcaacgucgacauauuuaauccaaaauaugacugcaaaauaaugacuucaaaaacagacguauccucaucaguaauaacauccuuaggagcaauaguaucauguuacggcaagacaaaauguacagccucaaacaaaaacaaagguaucauuaaaaccuucuccaacggcugcgacuacguaucaaauaaaggugucgauacaguaucaguaggaaacacacucuauuacguuaauaaacaagaaggaaagucauuauacguaaaaggagaaccaauaaucaauuucuacgauccccuagucuuucccucagaugaauuugacgcaagcaucucucaagucaacgaaaaaauaaaccaaucccuagccuucauaagaaaaucagaugaacuacuucauaacgucaacgccggaaaaucaacaaccaacauaaugaucacuacaaucauaauuguaauuauaguaauacuacuaucgcuaauugccguuggacuacuacuauauuguaaagcaagaucaacacccguuacucuauccaaagaucaauuaucaggaaucaacaacauagccuucucaaauuaaggacuaguguccaccugucccuccugggcugcuggauugucucguuuuccugccaaauaaacaggaucagcgcuuuacagaucuaaaaaaaaaaaaaaaaaaaaaaaaaaaaaaaaaaaaaaaaaaaaaaaaaaaaaaaaaaaaaaaaugcaucccccccccccccccccccccccccccccccaaaggcucuuuucagagccaccagaauu

SEQ ID NO: 6866 - RNA, 1877 nt, Artificial Sequence
  mRNA product Design b-2 comprising derived and/or modified sequence from HRSV(A2)__F_DSCav1_mut7 (opt11)
gggagagccucugcuggaguccggggaguggcguuggcugcuagagcgaagcuuaccauggaacuacucauacuuaaagccaacgcaauaaccacaauccucaccgccgucacauucugcuucgccucgggacaaaacauaaccgaagaauuuuaccagucuaccugcuccgccgucuccaaggguuaccucuccgcgcuccgcaccgggugguacaccagcguuaucaccaucgaacuaucuaacauaaaagaaaacaagugcaacggaaccgacgcaaaagucaaacucaucaaacaagaacuagacaaauacaagaaugccgucaccgaacuacaaaugcucaugugcuccacccccgccaccggauccggcuccgccauugccuccggcgucgccguaugcaaaguccuucacuuggaaggagaaguuaacaaaauaaaaagcgcccuccugucgaccaacaaagcgguggucagccucuccaacggcgucucuguccucaccuucaaaguccucgaccucaagaacuacauagauaaacaacuacuccccauccuaaacaaacagucaugcagcauauccaacaucgaaaccgucauggaguuccaacagaaaaacaaccgccuccuugaaaucacccgcgaguucucugucaacgccggcgucaccacccccgucuccaccuacaugcucacaaacuccgaacuccucagccucaucaacgacaugccaaucaccaacgaccaaaagaaacucauguccaacaacguacaaaucguucgucaacaaucauacucaaucaugugcaucauuaaagaagaaguccucgcauacgucguccaacucccccucuauggggucaucgacaccccaugcuggaaacuccacaccucuccccuaugcaccaccaacaccaaagaaggcuccaacaucugccuaacccgaaccgaccgcggaugguacugcgacaacgccggcuccgucuccuucuucccccaggccgaaacauguaaagucugcuccaaccguguguucugcgacaccaugaacucacuaacccuccccuccgaagucaaccucugcaacgucgacaucuucaacccgaaauacgacugcaaaauaaugaccagcaaaacagacguauccucuagcgucauuaccagccuaggugcaaucguguccugcuacggcaaaacaaaaugcaccgccuccaacaaaaauaaaggaaucauaaaaaccuucuccaacggcugcgacuacgucagcaacaaaggagucgacaccgucuccguaggaaauacucuauacuaugucaacaaacaagaggguaaaucccucuacgucaaaggcgaacccaucaucaacuucuacgacccccucgucuuccccucugacgaguucgacgccagcauaucacaaguaaacgaaaagaucaaccaaucccucgcauucauucgcaaauccgacgaacuccuacacaacgucaacgccggaaaauccaccaccaacaucaugaucacuacuaucauuaucgucaucaucgucauccuccucucccucaucgcagucggccuucuacucuacugcaaggcacgcucuacacccguaacccugucuaaagaccaacucuccggcaucaacaacaucgcuuucuccaacuaaggacuaguguccaccugucccuccugggcugcuggauugucucguuuuccugccaaauaaacaggaucagcgcuuuacagaucuaaaaaaaaaaaaaaaaaaaaaaaaaaaaaaaaaaaaaaaaaaaaaaaaaaaaaaaaaaaaaaaaugcaucccccccccccccccccccccccccccccccaaaggcucuuuucagagccaccagaauu

SEQ ID NO: 6867 - RNA, 1897 nt, Artificial Sequence
  mRNA product Design b-3 comprising derived and/or modified sequence from HRSV(A2)__F_DSCav1_mut7 (opt1)
gggagagucccgcagucggcguccagcggcucugcuuguucgugugugugucguugcaggccuuauucaagcuuaccauggagcugcucauccugaaggccaacgccaucaccaccauccugacggcggugaccuucugcuucgccagcggccagaacaucaccgaggaguucuaccaguccacgugcagcgccgucuccaagggguaccucagcgcccugcggaccggcugguacaccuccgugaucaccaucgagcugagcaacaucaaggagaacaagugcaacgggaccgacgccaaggugaagcucaucaagcaggagcuggacaaguacaagaacgcggucacggagcugcagaugcugaugugcuccaccccggcaaccggcuccggcuccgccaucgcgagcggcgucgccgugugcaaggugcugcaccucgagggggaggucaacaagaucaagagcgcccugcuguccaccaacaaggccguggugagccucuccaacggcgucagcgugcugaccuucaaggugcuggaccucaagaacuacaucgacaagcagcugcugcccauccugaacaagcagagcugcuccaucagcaacaucgagacggugauggaguuccagcagaagaacaaccggcuccuggagaucacccgcgaguucagcgugaacgccggggucaccacccccguguccacguacaugcugaccaacagcgagcuccugucccugaucaacgacaugccgaucaccaacgaccagaagaagcucaugagcaacaacgugcagaucguccggcagcaguccuacagcaucaugugcaucaucaaggaggaggugcuggcguacgugguccagcugccccucuacggcgugaucgacacccccugcuggaagcugcacacgagcccccugugcaccaccaacaccaaggagggguccaacaucugccucacgcgcaccgaccggggcugguacugcgacaacgccggcagcgucuccuucuucccgcaggccgagaccugcaaggugugcagcaaccgcguguucugcgacaccaugaacucccugacgcugcccagcgagguaaaccucugcaacgucgacaucuucaaccccaaguacgacugcaagaucaugaccuccaagaccgacgugagcuccagcgugaucaccucccugggggccaucgucagcugcuacggcaagacgaagugcaccgccagcaacaagaacaaggggaucaucaagaccuucuccaacggcugcgacuacgugagcaacaagggcguggacaccguguccgucgggaacacccuguacuacgugaacaagcaggagggcaagagccucuacgugaagggggagcccaucaucaacuucuacgacccgcuggucuuccccuccgacgaguucgacgcgagcaucucccaggugaacgagaagaucaaccagagccuggccuucauccgcaaguccgacgagcugcuccacaacgugaacgccggcaagagcacgaccaacaucaugaucaccaccaucaucaucgucaucaucgugauccugcugucccucaucgccguggggcugcugcucuacugcaaggcccggagcacgcccgucacccuguccaaggaccagcugagcggcaucaacaacaucgcguucuccaacugaggacuaguguccaccugucccuccugggcugcuggauugucucguuuuccugccaaauaaacaggaucagcgcuuuacagaucuaaaaaaaaaaaaaaaaaaaaaaaaaaaaaaaaaaaaaaaaaaaaaaaaaaaaaaaaaaaaaaaaugcaucccccccccccccccccccccccccccccccaaaggcucuuuucagagccaccagaauu

SEQ ID NO: 6868 - RNA, 1897 nt, Artificial Sequence
  mRNA product Design b-3 comprising derived and/or modified sequence from HRSV(A2)__F_DSCav1_mut7 (opt1)
gggagagucccgcagucggcguccagcggcucugcuuguucgugugugugucguugcaggccuuauucaagcuuaccauggagcugcucauccugaaggccaacgccaucaccaccauccugacggcggugaccuucugcuucgccagcggccagaacaucaccgaggaguucuaccaguccacgugcagcgccgucuccaagggguaccucagcgcccugcgcaccggcugguacaccuccgugaucaccaucgagcugagcaacaucaaggagaacaagugcaacgggaccgacgccaaggugaagcucaucaagcaggagcuggacaaguacaagaacgcggucacggagcugcagaugcucaugugcuccacccccgccaccggcagcggguccgccaucgccagcggcguggcggugugcaagguccugcaccuggagggcgaggugaacaagaucaaguccgcccuccugagcaccaacaaggccguggucucccugagcaacgggguguccgugcucacguucaagguccuggaccugaagaacuacaucgacaagcagcuccugccgauccugaacaagcagagcugcuccaucagcaacaucgagaccgugauggaguuccagcagaagaacaaccggcuccuggagaucacccgcgaguucuccgugaacgccggcgucaccacgcccgugagcaccuacaugcugaccaacagcgagcuccugucccugaucaacgacaugcccaucaccaacgaccagaagaagcucaugagcaacaacgugcagaucguccggcagcaguccuacagcaucaugugcaucaucaaggaggaggugcuggccuacgugguccagcugccccucuacggggugaucgacacgccgugcuggaagcugcacaccagcccccugugcaccaccaacacgaaggagggcagcaacaucugccucacccgcaccgaccgggggugguacugcgacaacgcgggcuccgugagcuucuucccccaggccgagaccugcaaggucugcuccaaccgcguguucugcgacacgaugaacagccugacccugcccuccgaggucaaccucugcaacguggacaucuucaacccgaaguacgacugcaagaucaugaccagcaagaccgacguguccagcuccgucaucacgagccugggcgccaucguguccugcuacgggaagaccaagugcaccgccagcaacaagaacaagggcaucaucaagaccuucuccaacgggugcgacuacgugagcaacaagggcgucgacacggugagcgugggcaacacccuguacuacgucaacaagcaggaggggaagucccucuacgugaagggcgagcccaucaucaacuucuacgacccccugguguuccccagcgacgaguucgacgccuccaucagccaggucaacgagaagaucaaccagucccuggcguucauccggaaguccgacgagcuccugcacaacgugaacgccgggaaguccaccaccaacaucaugaucaccacgaucaucaucgugaucaucgucauccugcucagccugaucgccgugggccugcuccuguacugcaaggcccgcuccaccccggugacccugagcaaggaccagcuguccgggaucaacaacaucgccuucagcaacugaggacuaguguccaccugucccuccugggcugcuggauugucucguuuuccugccaaauaaacaggaucagcgcuuuacagaucuaaaaaaaaaaaaaaaaaaaaaaaaaaaaaaaaaaaaaaaaaaaaaaaaaaaaaaaaaaaaaaaaugcaucccccccccccccccccccccccccccccccaaaggcucuuuucagagccaccagaauu

SEQ ID NO: 6869 - RNA, 1897 nt, Artificial Sequence
  mRNA product Design b-3 comprising derived and/or modified sequence from HRSV(A2)__F_DSCav1_mut7 (opt2)
gggagagucccgcagucggcguccagcggcucugcuuguucgugugugugucguugcaggccuuauucaagcuuaccauggagcuccucauccucaaggccaacgccaucaccaccauccucaccgccgucaccuucugcuucgccuccggccagaacaucaccgaggaguucuaccaguccaccugcuccgccgucuccaagggcuaccucuccgcccuccgcaccggcugguacaccuccgucaucaccaucgagcucuccaacaucaaggagaacaagugcaacggcaccgacgccaaggucaagcucaucaagcaggagcucgacaaguacaagaacgccgucaccgagcuccagaugcucaugugcuccacccccgccaccggcuccggcuccgccaucgccuccggcgucgccgucugcaagguccuccaccucgagggcgaggucaacaagaucaaguccgcccuccucuccaccaacaaggccgucgucucccucuccaacggcgucuccguccucaccuucaagguccucgaccucaagaacuacaucgacaagcagcuccuccccauccucaacaagcaguccugcuccaucuccaacaucgagaccgucauggaguuccagcagaagaacaaccgccuccucgagaucacccgcgaguucuccgucaacgccggcgucaccacccccgucuccaccuacaugcucaccaacuccgagcuccucucccucaucaacgacaugcccaucaccaacgaccagaagaagcucauguccaacaacguccagaucguccgccagcaguccuacuccaucaugugcaucaucaaggaggagguccucgccuacgucguccagcucccccucuacggcgucaucgacacccccugcuggaagcuccacaccuccccccucugcaccaccaacaccaaggagggcuccaacaucugccucacccgcaccgaccgcggcugguacugcgacaacgccggcuccgucuccuucuucccccaggccgagaccugcaaggucugcuccaaccgcgucuucugcgacaccaugaacucccucacccuccccuccgaggucaaccucugcaacgucgacaucuucaaccccaaguacgacugcaagaucaugaccuccaagaccgacgucuccuccuccgucaucaccucccucggcgccaucgucuccugcuacggcaagaccaagugcaccgccuccaacaagaacaagggcaucaucaagaccuucuccaacggcugcgacuacgucuccaacaagggcgucgacaccgucuccgucggcaacacccucuacuacgucaacaagcaggagggcaagucccucuacgucaagggcgagcccaucaucaacuucuacgacccccucgucuuccccuccgacgaguucgacgccuccaucucccaggucaacgagaagaucaaccagucccucgccuucauccgcaaguccgacgagcuccuccacaacgucaacgccggcaaguccaccaccaacaucaugaucaccaccaucaucaucgucaucaucgucauccuccucucccucaucgccgucggccuccuccucuacugcaaggcccgcuccacccccgucacccucuccaaggaccagcucuccggcaucaacaacaucgccuucuccaacugaggacuaguguccaccugucccuccugggcugcuggauugucucguuuuccugccaaauaaacaggaucagcgcuuuacagaucuaaaaaaaaaaaaaaaaaaaaaaaaaaaaaaaaaaaaaaaaaaaaaaaaaaaaaaaaaaaaaaaaugcaucccccccccccccccccccccccccccccccaaaggcucuuuucagagccaccagaauu

SEQ ID NO: 6870 - RNA, 1897 nt, Artificial Sequence
  mRNA product Design b-3 comprising derived and/or modified sequence from HRSV(A2)__F_DSCav1_mut7 (opt3)
gggagagucccgcagucggcguccagcggcucugcuuguucgugugugugucguugcaggccuuauucaagcuuaccauggagcugcucauccuuaaggccaacgcuauuaccacaauacugacugcagugacguucugcuuugccagcggccagaauaucaccgaagaguucuaccaauccacauguucugcggucucaaaaggguauuugagugcuuuaagaacuggaugguacaccagcguuauuacaaucgaacuguccaacauuaaggagaauaaaugcaacgguaccgacgccaaggugaaacuaaucaagcaggaacucgauaaguauaaaaaugcaguaacugagcugcagaugcuuauguguucuacacccgccaccggcucggggucagcuauagcaagcggaguggccgucugcaaggugcugcacuuggagggcgaaguuaacaaaaucaagagugcucuccuguccacgaauaaagccguggucucucugagcaacgguguguccguacucacuuuuaagguuuuagaccugaagaauuacauugauaaacagcuuuugccuauccugaacaagcaaucauguaguauuagcaauaucgagaccgugauggaguuccagcagaaaaacaauaggcuacucgaaauaacacgggaguuuucugucaacgcgggggugacuaccccaguguccacauauaugcugaccaauucagaacuucugagcuugauuaacgacaugccgaucacgaacgaucagaagaaacucaugaguaauaacguccaaauuguucgccagcagucuuacuccaucaugugcaucauuaaggaggaagugcuggcauauguagugcaguuaccccuguacggagucauagacacuccuuguuggaaacuccauacaagcccacuuugcaccacuaauacaaaggagggcucgaacaucugucugacccgaacggaucguggcugguacugcgacaaugccgggucuguguccuucuuuccccaagcugaaaccuguaagguuugcucaaacagaguguucugcgauacaaugaauaguuugacucuaccuagcgaggucaaccuguguaauguggacauuuuuaacccaaaauaugauugcaagaucaugaccuccaaaacagacguaucuagcucaguuauaacuagccucggagccauuguguccuguuacgguaagaccaaaugcacagcaagcaauaagaacaagggcaucaucaaaaccuucucuaaugggugugauuaugucucaaacaagggaguggacacugucagugugggcaauacgcuguacuauguuaacaaacaggaggguaagagccuuuacgugaaaggggaacccauuaucaacuuuuaugacccucugguauucccauccgaugaguuugacgcuucuauuucgcaggucaaugaaaagauaaaccaaaguuuggccuucaucaggaaguccgaugagcuccugcacaaugugaacgcgggaaaaucaacaaccaauauuaugaucacuaccaucauuauaguuaucauugugaucuuacugagucuaauugccgucggccuccugcuuuacugcaaggcacggucuacaccggugaccuugagcaaagaccagcuguccggcaucaacaauauagcuuucucaaacugaggacuaguguccaccugucccuccugggcugcuggauugucucguuuuccugccaaauaaacaggaucagcgcuuuacagaucuaaaaaaaaaaaaaaaaaaaaaaaaaaaaaaaaaaaaaaaaaaaaaaaaaaaaaaaaaaaaaaaaugcaucccccccccccccccccccccccccccccccaaaggcucuuuucagagccaccagaauu

SEQ ID NO: 6871 - RNA, 1897 nt, Artificial Sequence
  mRNA product Design b-3 comprising derived and/or modified sequence from HRSV(A2)__F_DSCav1_mut7 (opt4)
gggagagucccgcagucggcguccagcggcucugcuuguucgugugugugucguugcaggccuuauucaagcuuaccauggagcugcugauccugaaggccaacgccaucaccaccauccugaccgccgugaccuucugcuucgccagcggccagaacaucaccgaggaguucuaccagagcaccugcagcgccgugagcaagggcuaccugagcgcccugagaaccggcugguacaccagcgugaucaccaucgagcugagcaacaucaaggagaacaagugcaacggcaccgacgccaaggugaagcugaucaagcaggagcuggacaaguacaagaacgccgugaccgagcugcagaugcugaugugcagcacccccgccaccggcagcggcagcgccaucgccagcggcguggccgugugcaaggugcugcaccuggagggcgaggugaacaagaucaagagcgcccugcugagcaccaacaaggccguggugagccugagcaacggcgugagcgugcugaccuucaaggugcuggaccugaagaacuacaucgacaagcagcugcugcccauccugaacaagcagagcugcagcaucagcaacaucgagaccgugauggaguuccagcagaagaacaacagacugcuggagaucaccagagaguucagcgugaacgccggcgugaccacccccgugagcaccuacaugcugaccaacagcgagcugcugagccugaucaacgacaugcccaucaccaacgaccagaagaagcugaugagcaacaacgugcagaucgugagacagcagagcuacagcaucaugugcaucaucaaggaggaggugcuggccuacguggugcagcugccccuguacggcgugaucgacacccccugcuggaagcugcacaccagcccccugugcaccaccaacaccaaggagggcagcaacaucugccugaccagaaccgacagaggcugguacugcgacaacgccggcagcgugagcuucuucccccaggccgagaccugcaaggugugcagcaacagaguguucugcgacaccaugaacagccugacccugcccagcgaggugaaccugugcaacguggacaucuucaaccccaaguacgacugcaagaucaugaccagcaagaccgacgugagcagcagcgugaucaccagccugggcgccaucgugagcugcuacggcaagaccaagugcaccgccagcaacaagaacaagggcaucaucaagaccuucagcaacggcugcgacuacgugagcaacaagggcguggacaccgugagcgugggcaacacccuguacuacgugaacaagcaggagggcaagagccuguacgugaagggcgagcccaucaucaacuucuacgacccccugguguuccccagcgacgaguucgacgccagcaucagccaggugaacgagaagaucaaccagagccuggccuucaucagaaagagcgacgagcugcugcacaacgugaacgccggcaagagcaccaccaacaucaugaucaccaccaucaucaucgugaucaucgugauccugcugagccugaucgccgugggccugcugcuguacugcaaggccagaagcacccccgugacccugagcaaggaccagcugagcggcaucaacaacaucgccuucagcaacugaggacuaguguccaccugucccuccugggcugcuggauugucucguuuuccugccaaauaaacaggaucagcgcuuuacagaucuaaaaaaaaaaaaaaaaaaaaaaaaaaaaaaaaaaaaaaaaaaaaaaaaaaaaaaaaaaaaaaaaugcaucccccccccccccccccccccccccccccccaaaggcucuuuucagagccaccagaauu

SEQ ID NO: 6872 - RNA, 1897 nt, Artificial Sequence
  mRNA product Design b-3 comprising derived and/or modified sequence from HRSV(A2)__F_DSCav1_mut7 (opt5)
gggagagucccgcagucggcguccagcggcucugcuuguucgugugugugucguugcaggccuuauucaagcuuaccauggagcugcucauccugaaggccaacgcuauuaccacaauccuuacggccgugaccuucugcuuugcgagcggccagaauauuacagaagaguucuaccaauccaccuguucugcugucagcaaaggguaucuguccgcccucagaacaggaugguacaccucuguuaucacaauugaacugagcaacaucaaggagaauaaaugcaacggcaccgacgccaaggugaaacuuaucaagcaggaacuggauaaguauaaaaaugcugugacggagcuccagaugcugauguguuccacccccgccacagggucuggaagcgcuauugccuccggcgucgcggugugcaagguucugcaccucgagggggaagugaacaaaaucaagagcgcccugcuuucuaccaauaaagcugucgugucccugagcaacggaguuucugugcucacauuuaagguccuggaccuuaagaauuacauugauaaacagcugcucccuauccugaacaagcaauccuguagcauuucuaauaucgagaccgugauggaguuccagcagaaaaacaaucggcugcucgaaauuacgcgcgaguuuuccgugaacgccggcgucacaaccccgguuagcacauauaugcugaccaauuccgaacuucugucucucaucaacgacaugcccaucaccaacgaucagaagaaacugaugagcaauaacgugcaaauugugagacagcaguccuacagcaucaugugcauuaucaaggaggaaguccuugcuuaugugguucagcugccucucuacggcgugauugacacacccuguuggaaacugcauacgucuccucugugcaccacaaauaccaaggagggguccaacaucugucucacacggaccgaucgcggaugguacugcgacaaugccggcagcgucucuuucuuuccccaagcggaaacguguaaggugugcagcaacagaguuuucugcgauacaaugaacucccugacccuuccuucugaggugaaucuguguaaugucgacaucuuuaacccgaaauaugauugcaagauuaugaccagcaaaacagacguguccagcucugucaucaccucccucggggccauugugagcuguuacggaaagacaaaaugcacggcuucuaauaagaacaagggcaucauuaaaaccuucuccaaugggugugauuauguuagcaacaagggaguggacacagucuccgugggcaauacccuguacuauguuaacaaacaggagggcaagucucuuuacgugaaaggggaacccaucaucaacuuuuaugacccucuggucuuccccagcgaugaguuugacgccuccauuucucaggugaaugaaaagaucaaccaaagccucgcuuucauucggaaguccgaugagcugcugcacaaugugaacgccggaaaaagcacaaccaauaucaugauuacgaccaucauuaucguuaucauugucauccuccugucucuuauugccgugggccugcuccuguacugcaaggcucgcuccacaccugugacccugagcaaagaccagcuuucugggaucaacaauauugcguucuccaacugaggacuaguguccaccugucccuccugggcugcuggauugucucguuuuccugccaaauaaacaggaucagcgcuuuacagaucuaaaaaaaaaaaaaaaaaaaaaaaaaaaaaaaaaaaaaaaaaaaaaaaaaaaaaaaaaaaaaaaaugcaucccccccccccccccccccccccccccccccaaaggcucuuuucagagccaccagaauu

SEQ ID NO: 6873 - RNA, 1897 nt, Artificial Sequence
  mRNA product Design b-3 comprising derived and/or modified sequence from HRSV(A2)__F_DSCav1_mut7 (opt6)
gggagagucccgcagucggcguccagcggcucugcuuguucgugugugugucguugcaggccuuauucaagcuuaccauggaauuacucauacucaaagcaaaugcaauuaccacuauacucacagcuguaacuuuuuguuucgccucaggacaaaacaucacagaagaauuuuaucaauccacaugcucugccguaucaaaaggcuaccuaucugcccuaagaacagguugguacacaucuguaauaacaaucgaauuauccaacaucaaagaaaacaaaugcaacggcacagacgcaaaagucaaacucaucaaacaagaauuagauaaauauaaaaacgcaguaacagaacuacaaaugcuaaugugcucuacacccgccacaggaucaggauccgcaaucgcuucuggaguagccguuugcaaaguauuacaccuagaaggagaaguaaauaaaauaaaauccgcacuacuaucaacuaauaaagcaguaguaucacuuucuaaugguguaucaguauuaacauucaaaguccucgaccuaaaaaauuacaucgacaaacaacuauuacccauccuuaauaaacaaucaugcuccauaucaaacauagaaacugucauggaauuucaacaaaaaaacaauagacuucuagaaaucacaagagaauuuucuguaaaugcaggaguaacuacaccaguaucaacauauauguuaaccaacuccgaacuacuaucacucauaaacgacaugccaauaacaaacgaccaaaaaaaacuaaugucaaauaacguucaaauaguaagacaacaaucauacucaaucaugugcauaauaaaagaagaaguuuuagcauacgucguacaacuuccccuauacggaguaauagacaccccuugcuggaaacuccacaccucaccacuaugcacuacaaacacaaaagaagguuccaacaucugcuuaacaagaaccgaucgaggaugguacugcgacaacgcugguuccguaucuuucuucccacaagcagaaacaugcaaaguaugcuccaauagaguauucugcgacaccaugaacucacuaacucuaccauccgaaguaaaccuaugcaacgucgacauauuuaauccaaaauaugacugcaaaauaaugacuucaaaaacagacguauccucaucaguaauaacauccuuaggagcaauaguaucauguuacggcaagacaaaauguacagccucaaacaaaaacaaagguaucauuaaaaccuucuccaacggcugcgacuacguaucaaauaaaggugucgauacaguaucaguaggaaacacacucuauuacguuaauaaacaagaaggaaagucauuauacguaaaaggagaaccaauaaucaauuucuacgauccccuagucuuucccucagaugaauuugacgcaagcaucucucaagucaacgaaaaaauaaaccaaucccuagccuucauaagaaaaucagaugaacuacuucauaacgucaacgccggaaaaucaacaaccaacauaaugaucacuacaaucauaauuguaauuauaguaauacuacuaucgcuaauugccguuggacuacuacuauauuguaaagcaagaucaacacccguuacucuauccaaagaucaauuaucaggaaucaacaacauagccuucucaaauuaaggacuaguguccaccugucccuccugggcugcuggauugucucguuuuccugccaaauaaacaggaucagcgcuuuacagaucuaaaaaaaaaaaaaaaaaaaaaaaaaaaaaaaaaaaaaaaaaaaaaaaaaaaaaaaaaaaaaaaaugcaucccccccccccccccccccccccccccccccaaaggcucuuuucagagccaccagaauu

SEQ ID NO: 6874 - RNA, 1897 nt, Artificial Sequence
  mRNA product Design b-3 comprising derived and/or modified sequence from HRSV(A2)__F_DSCav1_mut7 (opt11)
gggagagucccgcagucggcguccagcggcucugcuuguucgugugugugucguugcaggccuuauucaagcuuaccauggaacuacucauacuuaaagccaacgcaauaaccacaauccucaccgccgucacauucugcuucgccucgggacaaaacauaaccgaagaauuuuaccagucuaccugcuccgccgucuccaaggguuaccucuccgcgcuccgcaccgggugguacaccagcguuaucaccaucgaacuaucuaacauaaaagaaaacaagugcaacggaaccgacgcaaaagucaaacucaucaaacaagaacuagacaaauacaagaaugccgucaccgaacuacaaaugcucaugugcuccacccccgccaccggauccggcuccgccauugccuccggcgucgccguaugcaaaguccuucacuuggaaggagaaguuaacaaaauaaaaagcgcccuccugucgaccaacaaagcgguggucagccucuccaacggcgucucuguccucaccuucaaaguccucgaccucaagaacuacauagauaaacaacuacuccccauccuaaacaaacagucaugcagcauauccaacaucgaaaccgucauggaguuccaacagaaaaacaaccgccuccuugaaaucacccgcgaguucucugucaacgccggcgucaccacccccgucuccaccuacaugcucacaaacuccgaacuccucagccucaucaacgacaugccaaucaccaacgaccaaaagaaacucauguccaacaacguacaaaucguucgucaacaaucauacucaaucaugugcaucauuaaagaagaaguccucgcauacgucguccaacucccccucuauggggucaucgacaccccaugcuggaaacuccacaccucuccccuaugcaccaccaacaccaaagaaggcuccaacaucugccuaacccgaaccgaccgcggaugguacugcgacaacgccggcuccgucuccuucuucccccaggccgaaacauguaaagucugcuccaaccguguguucugcgacaccaugaacucacuaacccuccccuccgaagucaaccucugcaacgucgacaucuucaacccgaaauacgacugcaaaauaaugaccagcaaaacagacguauccucuagcgucauuaccagccuaggugcaaucguguccugcuacggcaaaacaaaaugcaccgccuccaacaaaaauaaaggaaucauaaaaaccuucuccaacggcugcgacuacgucagcaacaaaggagucgacaccgucuccguaggaaauacucuauacuaugucaacaaacaagaggguaaaucccucuacgucaaaggcgaacccaucaucaacuucuacgacccccucgucuuccccucugacgaguucgacgccagcauaucacaaguaaacgaaaagaucaaccaaucccucgcauucauucgcaaauccgacgaacuccuacacaacgucaacgccggaaaauccaccaccaacaucaugaucacuacuaucauuaucgucaucaucgucauccuccucucccucaucgcagucggccuucuacucuacugcaaggcacgcucuacacccguaacccugucuaaagaccaacucuccggcaucaacaacaucgcuuucuccaacuaaggacuaguguccaccugucccuccugggcugcuggauugucucguuuuccugccaaauaaacaggaucagcgcuuuacagaucuaaaaaaaaaaaaaaaaaaaaaaaaaaaaaaaaaaaaaaaaaaaaaaaaaaaaaaaaaaaaaaaaugcaucccccccccccccccccccccccccccccccaaaggcucuuuucagagccaccagaauu

SEQ ID NO: 6875 - RNA, 1948 nt, Artificial Sequence
  mRNA product Design b-4 comprising derived and/or modified sequence from HRSV(A2)__F_DSCav1_mut7 (opt1)
gggagagucccgcagucggcguccagcggcucugcuuguucgugugugugucguugcaggccuuauucaagcuuaccauggagcugcucauccugaaggccaacgccaucaccaccauccugacggcggugaccuucugcuucgccagcggccagaacaucaccgaggaguucuaccaguccacgugcagcgccgucuccaagggguaccucagcgcccugcggaccggcugguacaccuccgugaucaccaucgagcugagcaacaucaaggagaacaagugcaacgggaccgacgccaaggugaagcucaucaagcaggagcuggacaaguacaagaacgcggucacggagcugcagaugcugaugugcuccaccccggcaaccggcuccggcuccgccaucgcgagcggcgucgccgugugcaaggugcugcaccucgagggggaggucaacaagaucaagagcgcccugcuguccaccaacaaggccguggugagccucuccaacggcgucagcgugcugaccuucaaggugcuggaccucaagaacuacaucgacaagcagcugcugcccauccugaacaagcagagcugcuccaucagcaacaucgagacggugauggaguuccagcagaagaacaaccggcuccuggagaucacccgcgaguucagcgugaacgccggggucaccacccccguguccacguacaugcugaccaacagcgagcuccugucccugaucaacgacaugccgaucaccaacgaccagaagaagcucaugagcaacaacgugcagaucguccggcagcaguccuacagcaucaugugcaucaucaaggaggaggugcuggcguacgugguccagcugccccucuacggcgugaucgacacccccugcuggaagcugcacacgagcccccugugcaccaccaacaccaaggagggguccaacaucugccucacgcgcaccgaccggggcugguacugcgacaacgccggcagcgucuccuucuucccgcaggccgagaccugcaaggugugcagcaaccgcguguucugcgacaccaugaacucccugacgcugcccagcgagguaaaccucugcaacgucgacaucuucaaccccaaguacgacugcaagaucaugaccuccaagaccgacgugagcuccagcgugaucaccucccugggggccaucgucagcugcuacggcaagacgaagugcaccgccagcaacaagaacaaggggaucaucaagaccuucuccaacggcugcgacuacgugagcaacaagggcguggacaccguguccgucgggaacacccuguacuacgugaacaagcaggagggcaagagccucuacgugaagggggagcccaucaucaacuucuacgacccgcuggucuuccccuccgacgaguucgacgcgagcaucucccaggugaacgagaagaucaaccagagccuggccuucauccgcaaguccgacgagcugcuccacaacgugaacgccggcaagagcacgaccaacaucaugaucaccaccaucaucaucgucaucaucgugauccugcugucccucaucgccguggggcugcugcucuacugcaaggcccggagcacgcccgucacccuguccaaggaccagcugagcggcaucaacaacaucgcguucuccaacugaggacuaguaauaaggaaacuguaugaaugucugugggcaggaagugaagagauccuucuguaaagguuuuuggaauuaugucugcugaauaauaaacuuuuuugaaauaauaaaucugguagaaaaaugagaucuaaaaaaaaaaaaaaaaaaaaaaaaaaaaaaaaaaaaaaaaaaaaaaaaaaaaaaaaaaaaaaaaugcaucccccccccccccccccccccccccccccccaaaggcucuuuucagagccaccagaauu

SEQ ID NO: 6876 - RNA, 1948 nt, Artificial Sequence
  mRNA product Design b-4 comprising derived and/or modified sequence from HRSV(A2)__F_DSCav1_mut7 (opt1)
gggagagucccgcagucggcguccagcggcucugcuuguucgugugugugucguugcaggccuuauucaagcuuaccauggagcugcucauccugaaggccaacgccaucaccaccauccugacggcggugaccuucugcuucgccagcggccagaacaucaccgaggaguucuaccaguccacgugcagcgccgucuccaagggguaccucagcgcccugcgcaccggcugguacaccuccgugaucaccaucgagcugagcaacaucaaggagaacaagugcaacgggaccgacgccaaggugaagcucaucaagcaggagcuggacaaguacaagaacgcggucacggagcugcagaugcucaugugcuccacccccgccaccggcagcggguccgccaucgccagcggcguggcggugugcaagguccugcaccuggagggcgaggugaacaagaucaaguccgcccuccugagcaccaacaaggccguggucucccugagcaacgggguguccgugcucacguucaagguccuggaccugaagaacuacaucgacaagcagcuccugccgauccugaacaagcagagcugcuccaucagcaacaucgagaccgugauggaguuccagcagaagaacaaccggcuccuggagaucacccgcgaguucuccgugaacgccggcgucaccacgcccgugagcaccuacaugcugaccaacagcgagcuccugucccugaucaacgacaugcccaucaccaacgaccagaagaagcucaugagcaacaacgugcagaucguccggcagcaguccuacagcaucaugugcaucaucaaggaggaggugcuggccuacgugguccagcugccccucuacggggugaucgacacgccgugcuggaagcugcacaccagcccccugugcaccaccaacacgaaggagggcagcaacaucugccucacccgcaccgaccgggggugguacugcgacaacgcgggcuccgugagcuucuucccccaggccgagaccugcaaggucugcuccaaccgcguguucugcgacacgaugaacagccugacccugcccuccgaggucaaccucugcaacguggacaucuucaacccgaaguacgacugcaagaucaugaccagcaagaccgacguguccagcuccgucaucacgagccugggcgccaucguguccugcuacgggaagaccaagugcaccgccagcaacaagaacaagggcaucaucaagaccuucuccaacgggugcgacuacgugagcaacaagggcgucgacacggugagcgugggcaacacccuguacuacgucaacaagcaggaggggaagucccucuacgugaagggcgagcccaucaucaacuucuacgacccccugguguuccccagcgacgaguucgacgccuccaucagccaggucaacgagaagaucaaccagucccuggcguucauccggaaguccgacgagcuccugcacaacgugaacgccgggaaguccaccaccaacaucaugaucaccacgaucaucaucgugaucaucgucauccugcucagccugaucgccgugggccugcuccuguacugcaaggcccgcuccaccccggugacccugagcaaggaccagcuguccgggaucaacaacaucgccuucagcaacugaggacuaguaauaaggaaacuguaugaaugucugugggcaggaagugaagagauccuucuguaaagguuuuuggaauuaugucugcugaauaauaaacuuuuuugaaauaauaaaucugguagaaaaaugagaucuaaaaaaaaaaaaaaaaaaaaaaaaaaaaaaaaaaaaaaaaaaaaaaaaaaaaaaaaaaaaaaaaugcaucccccccccccccccccccccccccccccccaaaggcucuuuucagagccaccagaauu

SEQ ID NO: 6877 - RNA, 1948 nt, Artificial Sequence
  mRNA product Design b-4 comprising derived and/or modified sequence from HRSV(A2)__F_DSCav1_mut7 (opt2)
gggagagucccgcagucggcguccagcggcucugcuuguucgugugugugucguugcaggccuuauucaagcuuaccauggagcuccucauccucaaggccaacgccaucaccaccauccucaccgccgucaccuucugcuucgccuccggccagaacaucaccgaggaguucuaccaguccaccugcuccgccgucuccaagggcuaccucuccgcccuccgcaccggcugguacaccuccgucaucaccaucgagcucuccaacaucaaggagaacaagugcaacggcaccgacgccaaggucaagcucaucaagcaggagcucgacaaguacaagaacgccgucaccgagcuccagaugcucaugugcuccacccccgccaccggcuccggcuccgccaucgccuccggcgucgccgucugcaagguccuccaccucgagggcgaggucaacaagaucaaguccgcccuccucuccaccaacaaggccgucgucucccucuccaacggcgucuccguccucaccuucaagguccucgaccucaagaacuacaucgacaagcagcuccuccccauccucaacaagcaguccugcuccaucuccaacaucgagaccgucauggaguuccagcagaagaacaaccgccuccucgagaucacccgcgaguucuccgucaacgccggcgucaccacccccgucuccaccuacaugcucaccaacuccgagcuccucucccucaucaacgacaugcccaucaccaacgaccagaagaagcucauguccaacaacguccagaucguccgccagcaguccuacuccaucaugugcaucaucaaggaggagguccucgccuacgucguccagcucccccucuacggcgucaucgacacccccugcuggaagcuccacaccuccccccucugcaccaccaacaccaaggagggcuccaacaucugccucacccgcaccgaccgcggcugguacugcgacaacgccggcuccgucuccuucuucccccaggccgagaccugcaaggucugcuccaaccgcgucuucugcgacaccaugaacucccucacccuccccuccgaggucaaccucugcaacgucgacaucuucaaccccaaguacgacugcaagaucaugaccuccaagaccgacgucuccuccuccgucaucaccucccucggcgccaucgucuccugcuacggcaagaccaagugcaccgccuccaacaagaacaagggcaucaucaagaccuucuccaacggcugcgacuacgucuccaacaagggcgucgacaccgucuccgucggcaacacccucuacuacgucaacaagcaggagggcaagucccucuacgucaagggcgagcccaucaucaacuucuacgacccccucgucuuccccuccgacgaguucgacgccuccaucucccaggucaacgagaagaucaaccagucccucgccuucauccgcaaguccgacgagcuccuccacaacgucaacgccggcaaguccaccaccaacaucaugaucaccaccaucaucaucgucaucaucgucauccuccucucccucaucgccgucggccuccuccucuacugcaaggcccgcuccacccccgucacccucuccaaggaccagcucuccggcaucaacaacaucgccuucuccaacugaggacuaguaauaaggaaacuguaugaaugucugugggcaggaagugaagagauccuucuguaaagguuuuuggaauuaugucugcugaauaauaaacuuuuuugaaauaauaaaucugguagaaaaaugagaucuaaaaaaaaaaaaaaaaaaaaaaaaaaaaaaaaaaaaaaaaaaaaaaaaaaaaaaaaaaaaaaaaugcaucccccccccccccccccccccccccccccccaaaggcucuuuucagagccaccagaauu

SEQ ID NO: 6878 - RNA, 1948 nt, Artificial Sequence
  mRNA product Design b-4 comprising derived and/or modified sequence from HRSV(A2)__F_DSCav1_mut7 (opt3)
gggagagucccgcagucggcguccagcggcucugcuuguucgugugugugucguugcaggccuuauucaagcuuaccauggagcugcucauccuuaaggccaacgcuauuaccacaauacugacugcagugacguucugcuuugccagcggccagaauaucaccgaagaguucuaccaauccacauguucugcggucucaaaaggguauuugagugcuuuaagaacuggaugguacaccagcguuauuacaaucgaacuguccaacauuaaggagaauaaaugcaacgguaccgacgccaaggugaaacuaaucaagcaggaacucgauaaguauaaaaaugcaguaacugagcugcagaugcuuauguguucuacacccgccaccggcucggggucagcuauagcaagcggaguggccgucugcaaggugcugcacuuggagggcgaaguuaacaaaaucaagagugcucuccuguccacgaauaaagccguggucucucugagcaacgguguguccguacucacuuuuaagguuuuagaccugaagaauuacauugauaaacagcuuuugccuauccugaacaagcaaucauguaguauuagcaauaucgagaccgugauggaguuccagcagaaaaacaauaggcuacucgaaauaacacgggaguuuucugucaacgcgggggugacuaccccaguguccacauauaugcugaccaauucagaacuucugagcuugauuaacgacaugccgaucacgaacgaucagaagaaacucaugaguaauaacguccaaauuguucgccagcagucuuacuccaucaugugcaucauuaaggaggaagugcuggcauauguagugcaguuaccccuguacggagucauagacacuccuuguuggaaacuccauacaagcccacuuugcaccacuaauacaaaggagggcucgaacaucugucugacccgaacggaucguggcugguacugcgacaaugccgggucuguguccuucuuuccccaagcugaaaccuguaagguuugcucaaacagaguguucugcgauacaaugaauaguuugacucuaccuagcgaggucaaccuguguaauguggacauuuuuaacccaaaauaugauugcaagaucaugaccuccaaaacagacguaucuagcucaguuauaacuagccucggagccauuguguccuguuacgguaagaccaaaugcacagcaagcaauaagaacaagggcaucaucaaaaccuucucuaaugggugugauuaugucucaaacaagggaguggacacugucagugugggcaauacgcuguacuauguuaacaaacaggaggguaagagccuuuacgugaaaggggaacccauuaucaacuuuuaugacccucugguauucccauccgaugaguuugacgcuucuauuucgcaggucaaugaaaagauaaaccaaaguuuggccuucaucaggaaguccgaugagcuccugcacaaugugaacgcgggaaaaucaacaaccaauauuaugaucacuaccaucauuauaguuaucauugugaucuuacugagucuaauugccgucggccuccugcuuuacugcaaggcacggucuacaccggugaccuugagcaaagaccagcuguccggcaucaacaauauagcuuucucaaacugaggacuaguaauaaggaaacuguaugaaugucugugggcaggaagugaagagauccuucuguaaagguuuuuggaauuaugucugcugaauaauaaacuuuuuugaaauaauaaaucugguagaaaaaugagaucuaaaaaaaaaaaaaaaaaaaaaaaaaaaaaaaaaaaaaaaaaaaaaaaaaaaaaaaaaaaaaaaaugcaucccccccccccccccccccccccccccccccaaaggcucuuuucagagccaccagaauu

SEQ ID NO: 6879 - RNA, 1948 nt, Artificial Sequence
  mRNA product Design b-4 comprising derived and/or modified sequence from HRSV(A2)__F_DSCav1_mut7 (opt4)
gggagagucccgcagucggcguccagcggcucugcuuguucgugugugugucguugcaggccuuauucaagcuuaccauggagcugcugauccugaaggccaacgccaucaccaccauccugaccgccgugaccuucugcuucgccagcggccagaacaucaccgaggaguucuaccagagcaccugcagcgccgugagcaagggcuaccugagcgcccugagaaccggcugguacaccagcgugaucaccaucgagcugagcaacaucaaggagaacaagugcaacggcaccgacgccaaggugaagcugaucaagcaggagcuggacaaguacaagaacgccgugaccgagcugcagaugcugaugugcagcacccccgccaccggcagcggcagcgccaucgccagcggcguggccgugugcaaggugcugcaccuggagggcgaggugaacaagaucaagagcgcccugcugagcaccaacaaggccguggugagccugagcaacggcgugagcgugcugaccuucaaggugcuggaccugaagaacuacaucgacaagcagcugcugcccauccugaacaagcagagcugcagcaucagcaacaucgagaccgugauggaguuccagcagaagaacaacagacugcuggagaucaccagagaguucagcgugaacgccggcgugaccacccccgugagcaccuacaugcugaccaacagcgagcugcugagccugaucaacgacaugcccaucaccaacgaccagaagaagcugaugagcaacaacgugcagaucgugagacagcagagcuacagcaucaugugcaucaucaaggaggaggugcuggccuacguggugcagcugccccuguacggcgugaucgacacccccugcuggaagcugcacaccagcccccugugcaccaccaacaccaaggagggcagcaacaucugccugaccagaaccgacagaggcugguacugcgacaacgccggcagcgugagcuucuucccccaggccgagaccugcaaggugugcagcaacagaguguucugcgacaccaugaacagccugacccugcccagcgaggugaaccugugcaacguggacaucuucaaccccaaguacgacugcaagaucaugaccagcaagaccgacgugagcagcagcgugaucaccagccugggcgccaucgugagcugcuacggcaagaccaagugcaccgccagcaacaagaacaagggcaucaucaagaccuucagcaacggcugcgacuacgugagcaacaagggcguggacaccgugagcgugggcaacacccuguacuacgugaacaagcaggagggcaagagccuguacgugaagggcgagcccaucaucaacuucuacgacccccugguguuccccagcgacgaguucgacgccagcaucagccaggugaacgagaagaucaaccagagccuggccuucaucagaaagagcgacgagcugcugcacaacgugaacgccggcaagagcaccaccaacaucaugaucaccaccaucaucaucgugaucaucgugauccugcugagccugaucgccgugggccugcugcuguacugcaaggccagaagcacccccgugacccugagcaaggaccagcugagcggcaucaacaacaucgccuucagcaacugaggacuaguaauaaggaaacuguaugaaugucugugggcaggaagugaagagauccuucuguaaagguuuuuggaauuaugucugcugaauaauaaacuuuuuugaaauaauaaaucugguagaaaaaugagaucuaaaaaaaaaaaaaaaaaaaaaaaaaaaaaaaaaaaaaaaaaaaaaaaaaaaaaaaaaaaaaaaaugcaucccccccccccccccccccccccccccccccaaaggcucuuuucagagccaccagaauu

SEQ ID NO: 6880 - RNA, 1948 nt, Artificial Sequence
  mRNA product Design b-4 comprising derived and/or modified sequence from HRSV(A2)__F_DSCav1_mut7 (opt5)
gggagagucccgcagucggcguccagcggcucugcuuguucgugugugugucguugcaggccuuauucaagcuuaccauggagcugcucauccugaaggccaacgcuauuaccacaauccuuacggccgugaccuucugcuuugcgagcggccagaauauuacagaagaguucuaccaauccaccuguucugcugucagcaaaggguaucuguccgcccucagaacaggaugguacaccucuguuaucacaauugaacugagcaacaucaaggagaauaaaugcaacggcaccgacgccaaggugaaacuuaucaagcaggaacuggauaaguauaaaaaugcugugacggagcuccagaugcugauguguuccacccccgccacagggucuggaagcgcuauugccuccggcgucgcggugugcaagguucugcaccucgagggggaagugaacaaaaucaagagcgcccugcuuucuaccaauaaagcugucgugucccugagcaacggaguuucugugcucacauuuaagguccuggaccuuaagaauuacauugauaaacagcugcucccuauccugaacaagcaauccuguagcauuucuaauaucgagaccgugauggaguuccagcagaaaaacaaucggcugcucgaaauuacgcgcgaguuuuccgugaacgccggcgucacaaccccgguuagcacauauaugcugaccaauuccgaacuucugucucucaucaacgacaugcccaucaccaacgaucagaagaaacugaugagcaauaacgugcaaauugugagacagcaguccuacagcaucaugugcauuaucaaggaggaaguccuugcuuaugugguucagcugccucucuacggcgugauugacacacccuguuggaaacugcauacgucuccucugugcaccacaaauaccaaggagggguccaacaucugucucacacggaccgaucgcggaugguacugcgacaaugccggcagcgucucuuucuuuccccaagcggaaacguguaaggugugcagcaacagaguuuucugcgauacaaugaacucccugacccuuccuucugaggugaaucuguguaaugucgacaucuuuaacccgaaauaugauugcaagauuaugaccagcaaaacagacguguccagcucugucaucaccucccucggggccauugugagcuguuacggaaagacaaaaugcacggcuucuaauaagaacaagggcaucauuaaaaccuucuccaaugggugugauuauguuagcaacaagggaguggacacagucuccgugggcaauacccuguacuauguuaacaaacaggagggcaagucucuuuacgugaaaggggaacccaucaucaacuuuuaugacccucuggucuuccccagcgaugaguuugacgccuccauuucucaggugaaugaaaagaucaaccaaagccucgcuuucauucggaaguccgaugagcugcugcacaaugugaacgccggaaaaagcacaaccaauaucaugauuacgaccaucauuaucguuaucauugucauccuccugucucuuauugccgugggccugcuccuguacugcaaggcucgcuccacaccugugacccugagcaaagaccagcuuucugggaucaacaauauugcguucuccaacugaggacuaguaauaaggaaacuguaugaaugucugugggcaggaagugaagagauccuucuguaaagguuuuuggaauuaugucugcugaauaauaaacuuuuuugaaauaauaaaucugguagaaaaaugagaucuaaaaaaaaaaaaaaaaaaaaaaaaaaaaaaaaaaaaaaaaaaaaaaaaaaaaaaaaaaaaaaaaugcaucccccccccccccccccccccccccccccccaaaggcucuuuucagagccaccagaauu

SEQ ID NO: 6881 - RNA, 1948 nt, Artificial Sequence
  mRNA product Design b-4 comprising derived and/or modified sequence from HRSV(A2)__F_DSCav1_mut7 (opt6)
gggagagucccgcagucggcguccagcggcucugcuuguucgugugugugucguugcaggccuuauucaagcuuaccauggaauuacucauacucaaagcaaaugcaauuaccacuauacucacagcuguaacuuuuuguuucgccucaggacaaaacaucacagaagaauuuuaucaauccacaugcucugccguaucaaaaggcuaccuaucugcccuaagaacagguugguacacaucuguaauaacaaucgaauuauccaacaucaaagaaaacaaaugcaacggcacagacgcaaaagucaaacucaucaaacaagaauuagauaaauauaaaaacgcaguaacagaacuacaaaugcuaaugugcucuacacccgccacaggaucaggauccgcaaucgcuucuggaguagccguuugcaaaguauuacaccuagaaggagaaguaaauaaaauaaaauccgcacuacuaucaacuaauaaagcaguaguaucacuuucuaaugguguaucaguauuaacauucaaaguccucgaccuaaaaaauuacaucgacaaacaacuauuacccauccuuaauaaacaaucaugcuccauaucaaacauagaaacugucauggaauuucaacaaaaaaacaauagacuucuagaaaucacaagagaauuuucuguaaaugcaggaguaacuacaccaguaucaacauauauguuaaccaacuccgaacuacuaucacucauaaacgacaugccaauaacaaacgaccaaaaaaaacuaaugucaaauaacguucaaauaguaagacaacaaucauacucaaucaugugcauaauaaaagaagaaguuuuagcauacgucguacaacuuccccuauacggaguaauagacaccccuugcuggaaacuccacaccucaccacuaugcacuacaaacacaaaagaagguuccaacaucugcuuaacaagaaccgaucgaggaugguacugcgacaacgcugguuccguaucuuucuucccacaagcagaaacaugcaaaguaugcuccaauagaguauucugcgacaccaugaacucacuaacucuaccauccgaaguaaaccuaugcaacgucgacauauuuaauccaaaauaugacugcaaaauaaugacuucaaaaacagacguauccucaucaguaauaacauccuuaggagcaauaguaucauguuacggcaagacaaaauguacagccucaaacaaaaacaaagguaucauuaaaaccuucuccaacggcugcgacuacguaucaaauaaaggugucgauacaguaucaguaggaaacacacucuauuacguuaauaaacaagaaggaaagucauuauacguaaaaggagaaccaauaaucaauuucuacgauccccuagucuuucccucagaugaauuugacgcaagcaucucucaagucaacgaaaaaauaaaccaaucccuagccuucauaagaaaaucagaugaacuacuucauaacgucaacgccggaaaaucaacaaccaacauaaugaucacuacaaucauaauuguaauuauaguaauacuacuaucgcuaauugccguuggacuacuacuauauuguaaagcaagaucaacacccguuacucuauccaaagaucaauuaucaggaaucaacaacauagccuucucaaauuaaggacuaguaauaaggaaacuguaugaaugucugugggcaggaagugaagagauccuucuguaaagguuuuuggaauuaugucugcugaauaauaaacuuuuuugaaauaauaaaucugguagaaaaaugagaucuaaaaaaaaaaaaaaaaaaaaaaaaaaaaaaaaaaaaaaaaaaaaaaaaaaaaaaaaaaaaaaaaugcaucccccccccccccccccccccccccccccccaaaggcucuuuucagagccaccagaauu

SEQ ID NO: 6882 - RNA, 1948 nt, Artificial Sequence
  mRNA product Design b-4 comprising derived and/or modified sequence from HRSV(A2)__F_DSCav1_mut7 (opt11)
gggagagucccgcagucggcguccagcggcucugcuuguucgugugugugucguugcaggccuuauucaagcuuaccauggaacuacucauacuuaaagccaacgcaauaaccacaauccucaccgccgucacauucugcuucgccucgggacaaaacauaaccgaagaauuuuaccagucuaccugcuccgccgucuccaaggguuaccucuccgcgcuccgcaccgggugguacaccagcguuaucaccaucgaacuaucuaacauaaaagaaaacaagugcaacggaaccgacgcaaaagucaaacucaucaaacaagaacuagacaaauacaagaaugccgucaccgaacuacaaaugcucaugugcuccacccccgccaccggauccggcuccgccauugccuccggcgucgccguaugcaaaguccuucacuuggaaggagaaguuaacaaaauaaaaagcgcccuccugucgaccaacaaagcgguggucagccucuccaacggcgucucuguccucaccuucaaaguccucgaccucaagaacuacauagauaaacaacuacuccccauccuaaacaaacagucaugcagcauauccaacaucgaaaccgucauggaguuccaacagaaaaacaaccgccuccuugaaaucacccgcgaguucucugucaacgccggcgucaccacccccgucuccaccuacaugcucacaaacuccgaacuccucagccucaucaacgacaugccaaucaccaacgaccaaaagaaacucauguccaacaacguacaaaucguucgucaacaaucauacucaaucaugugcaucauuaaagaagaaguccucgcauacgucguccaacucccccucuauggggucaucgacaccccaugcuggaaacuccacaccucuccccuaugcaccaccaacaccaaagaaggcuccaacaucugccuaacccgaaccgaccgcggaugguacugcgacaacgccggcuccgucuccuucuucccccaggccgaaacauguaaagucugcuccaaccguguguucugcgacaccaugaacucacuaacccuccccuccgaagucaaccucugcaacgucgacaucuucaacccgaaauacgacugcaaaauaaugaccagcaaaacagacguauccucuagcgucauuaccagccuaggugcaaucguguccugcuacggcaaaacaaaaugcaccgccuccaacaaaaauaaaggaaucauaaaaaccuucuccaacggcugcgacuacgucagcaacaaaggagucgacaccgucuccguaggaaauacucuauacuaugucaacaaacaagaggguaaaucccucuacgucaaaggcgaacccaucaucaacuucuacgacccccucgucuuccccucugacgaguucgacgccagcauaucacaaguaaacgaaaagaucaaccaaucccucgcauucauucgcaaauccgacgaacuccuacacaacgucaacgccggaaaauccaccaccaacaucaugaucacuacuaucauuaucgucaucaucgucauccuccucucccucaucgcagucggccuucuacucuacugcaaggcacgcucuacacccguaacccugucuaaagaccaacucuccggcaucaacaacaucgcuuucuccaacuaaggacuaguaauaaggaaacuguaugaaugucugugggcaggaagugaagagauccuucuguaaagguuuuuggaauuaugucugcugaauaauaaacuuuuuugaaauaauaaaucugguagaaaaaugagaucuaaaaaaaaaaaaaaaaaaaaaaaaaaaaaaaaaaaaaaaaaaaaaaaaaaaaaaaaaaaaaaaaugcaucccccccccccccccccccccccccccccccaaaggcucuuuucagagccaccagaauu

SEQ ID NO: 6883 - RNA, 2010 nt, Artificial Sequence
  mRNA product Design b-5 comprising derived and/or modified sequence from HRSV(A2)__F_DSCav1_mut7 (opt1)
gggagacuccugucgggcggaaguaggaggaguagaguuuaaaaacaguacucuuuuuccgguucgggacguaguugaagcaacgacaagccggauaaccgcucuugagacaggaagcuuaccauggagcugcucauccugaaggccaacgccaucaccaccauccugacggcggugaccuucugcuucgccagcggccagaacaucaccgaggaguucuaccaguccacgugcagcgccgucuccaagggguaccucagcgcccugcggaccggcugguacaccuccgugaucaccaucgagcugagcaacaucaaggagaacaagugcaacgggaccgacgccaaggugaagcucaucaagcaggagcuggacaaguacaagaacgcggucacggagcugcagaugcugaugugcuccaccccggcaaccggcuccggcuccgccaucgcgagcggcgucgccgugugcaaggugcugcaccucgagggggaggucaacaagaucaagagcgcccugcuguccaccaacaaggccguggugagccucuccaacggcgucagcgugcugaccuucaaggugcuggaccucaagaacuacaucgacaagcagcugcugcccauccugaacaagcagagcugcuccaucagcaacaucgagacggugauggaguuccagcagaagaacaaccggcuccuggagaucacccgcgaguucagcgugaacgccggggucaccacccccguguccacguacaugcugaccaacagcgagcuccugucccugaucaacgacaugccgaucaccaacgaccagaagaagcucaugagcaacaacgugcagaucguccggcagcaguccuacagcaucaugugcaucaucaaggaggaggugcuggcguacgugguccagcugccccucuacggcgugaucgacacccccugcuggaagcugcacacgagcccccugugcaccaccaacaccaaggagggguccaacaucugccucacgcgcaccgaccggggcugguacugcgacaacgccggcagcgucuccuucuucccgcaggccgagaccugcaaggugugcagcaaccgcguguucugcgacaccaugaacucccugacgcugcccagcgagguaaaccucugcaacgucgacaucuucaaccccaaguacgacugcaagaucaugaccuccaagaccgacgugagcuccagcgugaucaccucccugggggccaucgucagcugcuacggcaagacgaagugcaccgccagcaacaagaacaaggggaucaucaagaccuucuccaacggcugcgacuacgugagcaacaagggcguggacaccguguccgucgggaacacccuguacuacgugaacaagcaggagggcaagagccucuacgugaagggggagcccaucaucaacuucuacgacccgcuggucuuccccuccgacgaguucgacgcgagcaucucccaggugaacgagaagaucaaccagagccuggccuucauccgcaaguccgacgagcugcuccacaacgugaacgccggcaagagcacgaccaacaucaugaucaccaccaucaucaucgucaucaucgugauccugcugucccucaucgccguggggcugcugcucuacugcaaggcccggagcacgcccgucacccuguccaaggaccagcugagcggcaucaacaacaucgcguucuccaacugaggacuaguacuggcugcaucucccuuuccucuguccuccauccuucucccaggauggugaagggggaccugguacccagugauccccaccccaggauccuaaaucaugacuuaccugcuaauaaaaacucauuggaaaagugagaagaucuaaaaaaaaaaaaaaaaaaaaaaaaaaaaaaaaaaaaaaaaaaaaaaaaaaaaaaaaaaaaaaaaugcaucccccccccccccccccccccccccccccccaaaggcucuuuucagagccaccagaauu

SEQ ID NO: 6884 - RNA, 2010 nt, Artificial Sequence
  mRNA product Design b-5 comprising derived and/or modified sequence from HRSV(A2)__F_DSCav1_mut7 (opt1)
gggagacuccugucgggcggaaguaggaggaguagaguuuaaaaacaguacucuuuuuccgguucgggacguaguugaagcaacgacaagccggauaaccgcucuugagacaggaagcuuaccauggagcugcucauccugaaggccaacgccaucaccaccauccugacggcggugaccuucugcuucgccagcggccagaacaucaccgaggaguucuaccaguccacgugcagcgccgucuccaagggguaccucagcgcccugcgcaccggcugguacaccuccgugaucaccaucgagcugagcaacaucaaggagaacaagugcaacgggaccgacgccaaggugaagcucaucaagcaggagcuggacaaguacaagaacgcggucacggagcugcagaugcucaugugcuccacccccgccaccggcagcggguccgccaucgccagcggcguggcggugugcaagguccugcaccuggagggcgaggugaacaagaucaaguccgcccuccugagcaccaacaaggccguggucucccugagcaacgggguguccgugcucacguucaagguccuggaccugaagaacuacaucgacaagcagcuccugccgauccugaacaagcagagcugcuccaucagcaacaucgagaccgugauggaguuccagcagaagaacaaccggcuccuggagaucacccgcgaguucuccgugaacgccggcgucaccacgcccgugagcaccuacaugcugaccaacagcgagcuccugucccugaucaacgacaugcccaucaccaacgaccagaagaagcucaugagcaacaacgugcagaucguccggcagcaguccuacagcaucaugugcaucaucaaggaggaggugcuggccuacgugguccagcugccccucuacggggugaucgacacgccgugcuggaagcugcacaccagcccccugugcaccaccaacacgaaggagggcagcaacaucugccucacccgcaccgaccgggggugguacugcgacaacgcgggcuccgugagcuucuucccccaggccgagaccugcaaggucugcuccaaccgcguguucugcgacacgaugaacagccugacccugcccuccgaggucaaccucugcaacguggacaucuucaacccgaaguacgacugcaagaucaugaccagcaagaccgacguguccagcuccgucaucacgagccugggcgccaucguguccugcuacgggaagaccaagugcaccgccagcaacaagaacaagggcaucaucaagaccuucuccaacgggugcgacuacgugagcaacaagggcgucgacacggugagcgugggcaacacccuguacuacgucaacaagcaggaggggaagucccucuacgugaagggcgagcccaucaucaacuucuacgacccccugguguuccccagcgacgaguucgacgccuccaucagccaggucaacgagaagaucaaccagucccuggcguucauccggaaguccgacgagcuccugcacaacgugaacgccgggaaguccaccaccaacaucaugaucaccacgaucaucaucgugaucaucgucauccugcucagccugaucgccgugggccugcuccuguacugcaaggcccgcuccaccccggugacccugagcaaggaccagcuguccgggaucaacaacaucgccuucagcaacugaggacuaguacuggcugcaucucccuuuccucuguccuccauccuucucccaggauggugaagggggaccugguacccagugauccccaccccaggauccuaaaucaugacuuaccugcuaauaaaaacucauuggaaaagugagaagaucuaaaaaaaaaaaaaaaaaaaaaaaaaaaaaaaaaaaaaaaaaaaaaaaaaaaaaaaaaaaaaaaaugcaucccccccccccccccccccccccccccccccaaaggcucuuuucagagccaccagaauu

SEQ ID NO: 6885 - RNA, 2010 nt, Artificial Sequence
  mRNA product Design b-5 comprising derived and/or modified sequence from HRSV(A2)__F_DSCav1_mut7 (opt2)
gggagacuccugucgggcggaaguaggaggaguagaguuuaaaaacaguacucuuuuuccgguucgggacguaguugaagcaacgacaagccggauaaccgcucuugagacaggaagcuuaccauggagcuccucauccucaaggccaacgccaucaccaccauccucaccgccgucaccuucugcuucgccuccggccagaacaucaccgaggaguucuaccaguccaccugcuccgccgucuccaagggcuaccucuccgcccuccgcaccggcugguacaccuccgucaucaccaucgagcucuccaacaucaaggagaacaagugcaacggcaccgacgccaaggucaagcucaucaagcaggagcucgacaaguacaagaacgccgucaccgagcuccagaugcucaugugcuccacccccgccaccggcuccggcuccgccaucgccuccggcgucgccgucugcaagguccuccaccucgagggcgaggucaacaagaucaaguccgcccuccucuccaccaacaaggccgucgucucccucuccaacggcgucuccguccucaccuucaagguccucgaccucaagaacuacaucgacaagcagcuccuccccauccucaacaagcaguccugcuccaucuccaacaucgagaccgucauggaguuccagcagaagaacaaccgccuccucgagaucacccgcgaguucuccgucaacgccggcgucaccacccccgucuccaccuacaugcucaccaacuccgagcuccucucccucaucaacgacaugcccaucaccaacgaccagaagaagcucauguccaacaacguccagaucguccgccagcaguccuacuccaucaugugcaucaucaaggaggagguccucgccuacgucguccagcucccccucuacggcgucaucgacacccccugcuggaagcuccacaccuccccccucugcaccaccaacaccaaggagggcuccaacaucugccucacccgcaccgaccgcggcugguacugcgacaacgccggcuccgucuccuucuucccccaggccgagaccugcaaggucugcuccaaccgcgucuucugcgacaccaugaacucccucacccuccccuccgaggucaaccucugcaacgucgacaucuucaaccccaaguacgacugcaagaucaugaccuccaagaccgacgucuccuccuccgucaucaccucccucggcgccaucgucuccugcuacggcaagaccaagugcaccgccuccaacaagaacaagggcaucaucaagaccuucuccaacggcugcgacuacgucuccaacaagggcgucgacaccgucuccgucggcaacacccucuacuacgucaacaagcaggagggcaagucccucuacgucaagggcgagcccaucaucaacuucuacgacccccucgucuuccccuccgacgaguucgacgccuccaucucccaggucaacgagaagaucaaccagucccucgccuucauccgcaaguccgacgagcuccuccacaacgucaacgccggcaaguccaccaccaacaucaugaucaccaccaucaucaucgucaucaucgucauccuccucucccucaucgccgucggccuccuccucuacugcaaggcccgcuccacccccgucacccucuccaaggaccagcucuccggcaucaacaacaucgccuucuccaacugaggacuaguacuggcugcaucucccuuuccucuguccuccauccuucucccaggauggugaagggggaccugguacccagugauccccaccccaggauccuaaaucaugacuuaccugcuaauaaaaacucauuggaaaagugagaagaucuaaaaaaaaaaaaaaaaaaaaaaaaaaaaaaaaaaaaaaaaaaaaaaaaaaaaaaaaaaaaaaaaugcaucccccccccccccccccccccccccccccccaaaggcucuuuucagagccaccagaauu

SEQ ID NO: 6886 - RNA, 2010 nt, Artificial Sequence
  mRNA product Design b-5 comprising derived and/or modified sequence from HRSV(A2)__F_DSCav1_mut7 (opt3)
gggagacuccugucgggcggaaguaggaggaguagaguuuaaaaacaguacucuuuuuccgguucgggacguaguugaagcaacgacaagccggauaaccgcucuugagacaggaagcuuaccauggagcugcucauccuuaaggccaacgcuauuaccacaauacugacugcagugacguucugcuuugccagcggccagaauaucaccgaagaguucuaccaauccacauguucugcggucucaaaaggguauuugagugcuuuaagaacuggaugguacaccagcguuauuacaaucgaacuguccaacauuaaggagaauaaaugcaacgguaccgacgccaaggugaaacuaaucaagcaggaacucgauaaguauaaaaaugcaguaacugagcugcagaugcuuauguguucuacacccgccaccggcucggggucagcuauagcaagcggaguggccgucugcaaggugcugcacuuggagggcgaaguuaacaaaaucaagagugcucuccuguccacgaauaaagccguggucucucugagcaacgguguguccguacucacuuuuaagguuuuagaccugaagaauuacauugauaaacagcuuuugccuauccugaacaagcaaucauguaguauuagcaauaucgagaccgugauggaguuccagcagaaaaacaauaggcuacucgaaauaacacgggaguuuucugucaacgcgggggugacuaccccaguguccacauauaugcugaccaauucagaacuucugagcuugauuaacgacaugccgaucacgaacgaucagaagaaacucaugaguaauaacguccaaauuguucgccagcagucuuacuccaucaugugcaucauuaaggaggaagugcuggcauauguagugcaguuaccccuguacggagucauagacacuccuuguuggaaacuccauacaagcccacuuugcaccacuaauacaaaggagggcucgaacaucugucugacccgaacggaucguggcugguacugcgacaaugccgggucuguguccuucuuuccccaagcugaaaccuguaagguuugcucaaacagaguguucugcgauacaaugaauaguuugacucuaccuagcgaggucaaccuguguaauguggacauuuuuaacccaaaauaugauugcaagaucaugaccuccaaaacagacguaucuagcucaguuauaacuagccucggagccauuguguccuguuacgguaagaccaaaugcacagcaagcaauaagaacaagggcaucaucaaaaccuucucuaaugggugugauuaugucucaaacaagggaguggacacugucagugugggcaauacgcuguacuauguuaacaaacaggaggguaagagccuuuacgugaaaggggaacccauuaucaacuuuuaugacccucugguauucccauccgaugaguuugacgcuucuauuucgcaggucaaugaaaagauaaaccaaaguuuggccuucaucaggaaguccgaugagcuccugcacaaugugaacgcgggaaaaucaacaaccaauauuaugaucacuaccaucauuauaguuaucauugugaucuuacugagucuaauugccgucggccuccugcuuuacugcaaggcacggucuacaccggugaccuugagcaaagaccagcuguccggcaucaacaauauagcuuucucaaacugaggacuaguacuggcugcaucucccuuuccucuguccuccauccuucucccaggauggugaagggggaccugguacccagugauccccaccccaggauccuaaaucaugacuuaccugcuaauaaaaacucauuggaaaagugagaagaucuaaaaaaaaaaaaaaaaaaaaaaaaaaaaaaaaaaaaaaaaaaaaaaaaaaaaaaaaaaaaaaaaugcaucccccccccccccccccccccccccccccccaaaggcucuuuucagagccaccagaauu

SEQ ID NO: 6887 - RNA, 2010 nt, Artificial Sequence
  mRNA product Design b-5 comprising derived and/or modified sequence from HRSV(A2)__F_DSCav1_mut7 (opt4)
gggagacuccugucgggcggaaguaggaggaguagaguuuaaaaacaguacucuuuuuccgguucgggacguaguugaagcaacgacaagccggauaaccgcucuugagacaggaagcuuaccauggagcugcugauccugaaggccaacgccaucaccaccauccugaccgccgugaccuucugcuucgccagcggccagaacaucaccgaggaguucuaccagagcaccugcagcgccgugagcaagggcuaccugagcgcccugagaaccggcugguacaccagcgugaucaccaucgagcugagcaacaucaaggagaacaagugcaacggcaccgacgccaaggugaagcugaucaagcaggagcuggacaaguacaagaacgccgugaccgagcugcagaugcugaugugcagcacccccgccaccggcagcggcagcgccaucgccagcggcguggccgugugcaaggugcugcaccuggagggcgaggugaacaagaucaagagcgcccugcugagcaccaacaaggccguggugagccugagcaacggcgugagcgugcugaccuucaaggugcuggaccugaagaacuacaucgacaagcagcugcugcccauccugaacaagcagagcugcagcaucagcaacaucgagaccgugauggaguuccagcagaagaacaacagacugcuggagaucaccagagaguucagcgugaacgccggcgugaccacccccgugagcaccuacaugcugaccaacagcgagcugcugagccugaucaacgacaugcccaucaccaacgaccagaagaagcugaugagcaacaacgugcagaucgugagacagcagagcuacagcaucaugugcaucaucaaggaggaggugcuggccuacguggugcagcugccccuguacggcgugaucgacacccccugcuggaagcugcacaccagcccccugugcaccaccaacaccaaggagggcagcaacaucugccugaccagaaccgacagaggcugguacugcgacaacgccggcagcgugagcuucuucccccaggccgagaccugcaaggugugcagcaacagaguguucugcgacaccaugaacagccugacccugcccagcgaggugaaccugugcaacguggacaucuucaaccccaaguacgacugcaagaucaugaccagcaagaccgacgugagcagcagcgugaucaccagccugggcgccaucgugagcugcuacggcaagaccaagugcaccgccagcaacaagaacaagggcaucaucaagaccuucagcaacggcugcgacuacgugagcaacaagggcguggacaccgugagcgugggcaacacccuguacuacgugaacaagcaggagggcaagagccuguacgugaagggcgagcccaucaucaacuucuacgacccccugguguuccccagcgacgaguucgacgccagcaucagccaggugaacgagaagaucaaccagagccuggccuucaucagaaagagcgacgagcugcugcacaacgugaacgccggcaagagcaccaccaacaucaugaucaccaccaucaucaucgugaucaucgugauccugcugagccugaucgccgugggccugcugcuguacugcaaggccagaagcacccccgugacccugagcaaggaccagcugagcggcaucaacaacaucgccuucagcaacugaggacuaguacuggcugcaucucccuuuccucuguccuccauccuucucccaggauggugaagggggaccugguacccagugauccccaccccaggauccuaaaucaugacuuaccugcuaauaaaaacucauuggaaaagugagaagaucuaaaaaaaaaaaaaaaaaaaaaaaaaaaaaaaaaaaaaaaaaaaaaaaaaaaaaaaaaaaaaaaaugcaucccccccccccccccccccccccccccccccaaaggcucuuuucagagccaccagaauu

SEQ ID NO: 6888 - RNA, 2010 nt, Artificial Sequence
  mRNA product Design b-5 comprising derived and/or modified sequence from HRSV(A2)__F_DSCav1_mut7 (opt5)
gggagacuccugucgggcggaaguaggaggaguagaguuuaaaaacaguacucuuuuuccgguucgggacguaguugaagcaacgacaagccggauaaccgcucuugagacaggaagcuuaccauggagcugcucauccugaaggccaacgcuauuaccacaauccuuacggccgugaccuucugcuuugcgagcggccagaauauuacagaagaguucuaccaauccaccuguucugcugucagcaaaggguaucuguccgcccucagaacaggaugguacaccucuguuaucacaauugaacugagcaacaucaaggagaauaaaugcaacggcaccgacgccaaggugaaacuuaucaagcaggaacuggauaaguauaaaaaugcugugacggagcuccagaugcugauguguuccacccccgccacagggucuggaagcgcuauugccuccggcgucgcggugugcaagguucugcaccucgagggggaagugaacaaaaucaagagcgcccugcuuucuaccaauaaagcugucgugucccugagcaacggaguuucugugcucacauuuaagguccuggaccuuaagaauuacauugauaaacagcugcucccuauccugaacaagcaauccuguagcauuucuaauaucgagaccgugauggaguuccagcagaaaaacaaucggcugcucgaaauuacgcgcgaguuuuccgugaacgccggcgucacaaccccgguuagcacauauaugcugaccaauuccgaacuucugucucucaucaacgacaugcccaucaccaacgaucagaagaaacugaugagcaauaacgugcaaauugugagacagcaguccuacagcaucaugugcauuaucaaggaggaaguccuugcuuaugugguucagcugccucucuacggcgugauugacacacccuguuggaaacugcauacgucuccucugugcaccacaaauaccaaggagggguccaacaucugucucacacggaccgaucgcggaugguacugcgacaaugccggcagcgucucuuucuuuccccaagcggaaacguguaaggugugcagcaacagaguuuucugcgauacaaugaacucccugacccuuccuucugaggugaaucuguguaaugucgacaucuuuaacccgaaauaugauugcaagauuaugaccagcaaaacagacguguccagcucugucaucaccucccucggggccauugugagcuguuacggaaagacaaaaugcacggcuucuaauaagaacaagggcaucauuaaaaccuucuccaaugggugugauuauguuagcaacaagggaguggacacagucuccgugggcaauacccuguacuauguuaacaaacaggagggcaagucucuuuacgugaaaggggaacccaucaucaacuuuuaugacccucuggucuuccccagcgaugaguuugacgccuccauuucucaggugaaugaaaagaucaaccaaagccucgcuuucauucggaaguccgaugagcugcugcacaaugugaacgccggaaaaagcacaaccaauaucaugauuacgaccaucauuaucguuaucauugucauccuccugucucuuauugccgugggccugcuccuguacugcaaggcucgcuccacaccugugacccugagcaaagaccagcuuucugggaucaacaauauugcguucuccaacugaggacuaguacuggcugcaucucccuuuccucuguccuccauccuucucccaggauggugaagggggaccugguacccagugauccccaccccaggauccuaaaucaugacuuaccugcuaauaaaaacucauuggaaaagugagaagaucuaaaaaaaaaaaaaaaaaaaaaaaaaaaaaaaaaaaaaaaaaaaaaaaaaaaaaaaaaaaaaaaaugcaucccccccccccccccccccccccccccccccaaaggcucuuuucagagccaccagaauu

SEQ ID NO: 6889 - RNA, 2010 nt, Artificial Sequence
  mRNA product Design b-5 comprising derived and/or modified sequence from HRSV(A2)__F_DSCav1_mut7 (opt6)
gggagacuccugucgggcggaaguaggaggaguagaguuuaaaaacaguacucuuuuuccgguucgggacguaguugaagcaacgacaagccggauaaccgcucuugagacaggaagcuuaccauggaauuacucauacucaaagcaaaugcaauuaccacuauacucacagcuguaacuuuuuguuucgccucaggacaaaacaucacagaagaauuuuaucaauccacaugcucugccguaucaaaaggcuaccuaucugcccuaagaacagguugguacacaucuguaauaacaaucgaauuauccaacaucaaagaaaacaaaugcaacggcacagacgcaaaagucaaacucaucaaacaagaauuagauaaauauaaaaacgcaguaacagaacuacaaaugcuaaugugcucuacacccgccacaggaucaggauccgcaaucgcuucuggaguagccguuugcaaaguauuacaccuagaaggagaaguaaauaaaauaaaauccgcacuacuaucaacuaauaaagcaguaguaucacuuucuaaugguguaucaguauuaacauucaaaguccucgaccuaaaaaauuacaucgacaaacaacuauuacccauccuuaauaaacaaucaugcuccauaucaaacauagaaacugucauggaauuucaacaaaaaaacaauagacuucuagaaaucacaagagaauuuucuguaaaugcaggaguaacuacaccaguaucaacauauauguuaaccaacuccgaacuacuaucacucauaaacgacaugccaauaacaaacgaccaaaaaaaacuaaugucaaauaacguucaaauaguaagacaacaaucauacucaaucaugugcauaauaaaagaagaaguuuuagcauacgucguacaacuuccccuauacggaguaauagacaccccuugcuggaaacuccacaccucaccacuaugcacuacaaacacaaaagaagguuccaacaucugcuuaacaagaaccgaucgaggaugguacugcgacaacgcugguuccguaucuuucuucccacaagcagaaacaugcaaaguaugcuccaauagaguauucugcgacaccaugaacucacuaacucuaccauccgaaguaaaccuaugcaacgucgacauauuuaauccaaaauaugacugcaaaauaaugacuucaaaaacagacguauccucaucaguaauaacauccuuaggagcaauaguaucauguuacggcaagacaaaauguacagccucaaacaaaaacaaagguaucauuaaaaccuucuccaacggcugcgacuacguaucaaauaaaggugucgauacaguaucaguaggaaacacacucuauuacguuaauaaacaagaaggaaagucauuauacguaaaaggagaaccaauaaucaauuucuacgauccccuagucuuucccucagaugaauuugacgcaagcaucucucaagucaacgaaaaaauaaaccaaucccuagccuucauaagaaaaucagaugaacuacuucauaacgucaacgccggaaaaucaacaaccaacauaaugaucacuacaaucauaauuguaauuauaguaauacuacuaucgcuaauugccguuggacuacuacuauauuguaaagcaagaucaacacccguuacucuauccaaagaucaauuaucaggaaucaacaacauagccuucucaaauuaaggacuaguacuggcugcaucucccuuuccucuguccuccauccuucucccaggauggugaagggggaccugguacccagugauccccaccccaggauccuaaaucaugacuuaccugcuaauaaaaacucauuggaaaagugagaagaucuaaaaaaaaaaaaaaaaaaaaaaaaaaaaaaaaaaaaaaaaaaaaaaaaaaaaaaaaaaaaaaaaugcaucccccccccccccccccccccccccccccccaaaggcucuuuucagagccaccagaauu

SEQ ID NO: 6890 - RNA, 2010 nt, Artificial Sequence
  mRNA product Design b-5 comprising derived and/or modified sequence from HRSV(A2)__F_DSCav1_mut7 (opt11)
gggagacuccugucgggcggaaguaggaggaguagaguuuaaaaacaguacucuuuuuccgguucgggacguaguugaagcaacgacaagccggauaaccgcucuugagacaggaagcuuaccauggaacuacucauacuuaaagccaacgcaauaaccacaauccucaccgccgucacauucugcuucgccucgggacaaaacauaaccgaagaauuuuaccagucuaccugcuccgccgucuccaaggguuaccucuccgcgcuccgcaccgggugguacaccagcguuaucaccaucgaacuaucuaacauaaaagaaaacaagugcaacggaaccgacgcaaaagucaaacucaucaaacaagaacuagacaaauacaagaaugccgucaccgaacuacaaaugcucaugugcuccacccccgccaccggauccggcuccgccauugccuccggcgucgccguaugcaaaguccuucacuuggaaggagaaguuaacaaaauaaaaagcgcccuccugucgaccaacaaagcgguggucagccucuccaacggcgucucuguccucaccuucaaaguccucgaccucaagaacuacauagauaaacaacuacuccccauccuaaacaaacagucaugcagcauauccaacaucgaaaccgucauggaguuccaacagaaaaacaaccgccuccuugaaaucacccgcgaguucucugucaacgccggcgucaccacccccgucuccaccuacaugcucacaaacuccgaacuccucagccucaucaacgacaugccaaucaccaacgaccaaaagaaacucauguccaacaacguacaaaucguucgucaacaaucauacucaaucaugugcaucauuaaagaagaaguccucgcauacgucguccaacucccccucuauggggucaucgacaccccaugcuggaaacuccacaccucuccccuaugcaccaccaacaccaaagaaggcuccaacaucugccuaacccgaaccgaccgcggaugguacugcgacaacgccggcuccgucuccuucuucccccaggccgaaacauguaaagucugcuccaaccguguguucugcgacaccaugaacucacuaacccuccccuccgaagucaaccucugcaacgucgacaucuucaacccgaaauacgacugcaaaauaaugaccagcaaaacagacguauccucuagcgucauuaccagccuaggugcaaucguguccugcuacggcaaaacaaaaugcaccgccuccaacaaaaauaaaggaaucauaaaaaccuucuccaacggcugcgacuacgucagcaacaaaggagucgacaccgucuccguaggaaauacucuauacuaugucaacaaacaagaggguaaaucccucuacgucaaaggcgaacccaucaucaacuucuacgacccccucgucuuccccucugacgaguucgacgccagcauaucacaaguaaacgaaaagaucaaccaaucccucgcauucauucgcaaauccgacgaacuccuacacaacgucaacgccggaaaauccaccaccaacaucaugaucacuacuaucauuaucgucaucaucgucauccuccucucccucaucgcagucggccuucuacucuacugcaaggcacgcucuacacccguaacccugucuaaagaccaacucuccggcaucaacaacaucgcuuucuccaacuaaggacuaguacuggcugcaucucccuuuccucuguccuccauccuucucccaggauggugaagggggaccugguacccagugauccccaccccaggauccuaaaucaugacuuaccugcuaauaaaaacucauuggaaaagugagaagaucuaaaaaaaaaaaaaaaaaaaaaaaaaaaaaaaaaaaaaaaaaaaaaaaaaaaaaaaaaaaaaaaaugcaucccccccccccccccccccccccccccccccaaaggcucuuuucagagccaccagaauu

SEQ ID NO: 6891 - RNA, 1916 nt, Artificial Sequence
  mRNA product Design c-1 comprising derived and/or modified sequence from HRSV(A2)__F_DSCav1_mut7 (opt1)
gggagaguccgcucagccagguugcagaagcggcuuagcguguguccuaaucuucucucugcguguagguaggccugugccgcaaacaagcuuaccauggagcugcucauccugaaggccaacgccaucaccaccauccugacggcggugaccuucugcuucgccagcggccagaacaucaccgaggaguucuaccaguccacgugcagcgccgucuccaagggguaccucagcgcccugcggaccggcugguacaccuccgugaucaccaucgagcugagcaacaucaaggagaacaagugcaacgggaccgacgccaaggugaagcucaucaagcaggagcuggacaaguacaagaacgcggucacggagcugcagaugcugaugugcuccaccccggcaaccggcuccggcuccgccaucgcgagcggcgucgccgugugcaaggugcugcaccucgagggggaggucaacaagaucaagagcgcccugcuguccaccaacaaggccguggugagccucuccaacggcgucagcgugcugaccuucaaggugcuggaccucaagaacuacaucgacaagcagcugcugcccauccugaacaagcagagcugcuccaucagcaacaucgagacggugauggaguuccagcagaagaacaaccggcuccuggagaucacccgcgaguucagcgugaacgccggggucaccacccccguguccacguacaugcugaccaacagcgagcuccugucccugaucaacgacaugccgaucaccaacgaccagaagaagcucaugagcaacaacgugcagaucguccggcagcaguccuacagcaucaugugcaucaucaaggaggaggugcuggcguacgugguccagcugccccucuacggcgugaucgacacccccugcuggaagcugcacacgagcccccugugcaccaccaacaccaaggagggguccaacaucugccucacgcgcaccgaccggggcugguacugcgacaacgccggcagcgucuccuucuucccgcaggccgagaccugcaaggugugcagcaaccgcguguucugcgacaccaugaacucccugacgcugcccagcgagguaaaccucugcaacgucgacaucuucaaccccaaguacgacugcaagaucaugaccuccaagaccgacgugagcuccagcgugaucaccucccugggggccaucgucagcugcuacggcaagacgaagugcaccgccagcaacaagaacaaggggaucaucaagaccuucuccaacggcugcgacuacgugagcaacaagggcguggacaccguguccgucgggaacacccuguacuacgugaacaagcaggagggcaagagccucuacgugaagggggagcccaucaucaacuucuacgacccgcuggucuuccccuccgacgaguucgacgcgagcaucucccaggugaacgagaagaucaaccagagccuggccuucauccgcaaguccgacgagcugcuccacaacgugaacgccggcaagagcacgaccaacaucaugaucaccaccaucaucaucgucaucaucgugauccugcugucccucaucgccguggggcugcugcucuacugcaaggcccggagcacgcccgucacccuguccaaggaccagcugagcggcaucaacaacaucgcguucuccaacugaggacuaguguccaccugucccuccugggcugcuggauugucucguuuuccugccaaauaaacaggaucagcgcuuuacagaucuaaaaaaaaaaaaaaaaaaaaaaaaaaaaaaaaaaaaaaaaaaaaaaaaaaaaaaaaaaaaaaaaugcaucccccccccccccccccccccccccccccccaaaggcucuuuucagagccaccagaauu

SEQ ID NO: 6892 - RNA, 1916 nt, Artificial Sequence
  mRNA product Design c-1 comprising derived and/or modified sequence from HRSV(A2)__F_DSCav1_mut7 (opt1)
gggagaguccgcucagccagguugcagaagcggcuuagcguguguccuaaucuucucucugcguguagguaggccugugccgcaaacaagcuuaccauggagcugcucauccugaaggccaacgccaucaccaccauccugacggcggugaccuucugcuucgccagcggccagaacaucaccgaggaguucuaccaguccacgugcagcgccgucuccaagggguaccucagcgcccugcgcaccggcugguacaccuccgugaucaccaucgagcugagcaacaucaaggagaacaagugcaacgggaccgacgccaaggugaagcucaucaagcaggagcuggacaaguacaagaacgcggucacggagcugcagaugcucaugugcuccacccccgccaccggcagcggguccgccaucgccagcggcguggcggugugcaagguccugcaccuggagggcgaggugaacaagaucaaguccgcccuccugagcaccaacaaggccguggucucccugagcaacgggguguccgugcucacguucaagguccuggaccugaagaacuacaucgacaagcagcuccugccgauccugaacaagcagagcugcuccaucagcaacaucgagaccgugauggaguuccagcagaagaacaaccggcuccuggagaucacccgcgaguucuccgugaacgccggcgucaccacgcccgugagcaccuacaugcugaccaacagcgagcuccugucccugaucaacgacaugcccaucaccaacgaccagaagaagcucaugagcaacaacgugcagaucguccggcagcaguccuacagcaucaugugcaucaucaaggaggaggugcuggccuacgugguccagcugccccucuacggggugaucgacacgccgugcuggaagcugcacaccagcccccugugcaccaccaacacgaaggagggcagcaacaucugccucacccgcaccgaccgggggugguacugcgacaacgcgggcuccgugagcuucuucccccaggccgagaccugcaaggucugcuccaaccgcguguucugcgacacgaugaacagccugacccugcccuccgaggucaaccucugcaacguggacaucuucaacccgaaguacgacugcaagaucaugaccagcaagaccgacguguccagcuccgucaucacgagccugggcgccaucguguccugcuacgggaagaccaagugcaccgccagcaacaagaacaagggcaucaucaagaccuucuccaacgggugcgacuacgugagcaacaagggcgucgacacggugagcgugggcaacacccuguacuacgucaacaagcaggaggggaagucccucuacgugaagggcgagcccaucaucaacuucuacgacccccugguguuccccagcgacgaguucgacgccuccaucagccaggucaacgagaagaucaaccagucccuggcguucauccggaaguccgacgagcuccugcacaacgugaacgccgggaaguccaccaccaacaucaugaucaccacgaucaucaucgugaucaucgucauccugcucagccugaucgccgugggccugcuccuguacugcaaggcccgcuccaccccggugacccugagcaaggaccagcuguccgggaucaacaacaucgccuucagcaacugaggacuaguguccaccugucccuccugggcugcuggauugucucguuuuccugccaaauaaacaggaucagcgcuuuacagaucuaaaaaaaaaaaaaaaaaaaaaaaaaaaaaaaaaaaaaaaaaaaaaaaaaaaaaaaaaaaaaaaaugcaucccccccccccccccccccccccccccccccaaaggcucuuuucagagccaccagaauu

SEQ ID NO: 6893 - RNA, 1916 nt, Artificial Sequence
  mRNA product Design c-1 comprising derived and/or modified sequence from HRSV(A2)__F_DSCav1_mut7 (opt2)
gggagaguccgcucagccagguugcagaagcggcuuagcguguguccuaaucuucucucugcguguagguaggccugugccgcaaacaagcuuaccauggagcuccucauccucaaggccaacgccaucaccaccauccucaccgccgucaccuucugcuucgccuccggccagaacaucaccgaggaguucuaccaguccaccugcuccgccgucuccaagggcuaccucuccgcccuccgcaccggcugguacaccuccgucaucaccaucgagcucuccaacaucaaggagaacaagugcaacggcaccgacgccaaggucaagcucaucaagcaggagcucgacaaguacaagaacgccgucaccgagcuccagaugcucaugugcuccacccccgccaccggcuccggcuccgccaucgccuccggcgucgccgucugcaagguccuccaccucgagggcgaggucaacaagaucaaguccgcccuccucuccaccaacaaggccgucgucucccucuccaacggcgucuccguccucaccuucaagguccucgaccucaagaacuacaucgacaagcagcuccuccccauccucaacaagcaguccugcuccaucuccaacaucgagaccgucauggaguuccagcagaagaacaaccgccuccucgagaucacccgcgaguucuccgucaacgccggcgucaccacccccgucuccaccuacaugcucaccaacuccgagcuccucucccucaucaacgacaugcccaucaccaacgaccagaagaagcucauguccaacaacguccagaucguccgccagcaguccuacuccaucaugugcaucaucaaggaggagguccucgccuacgucguccagcucccccucuacggcgucaucgacacccccugcuggaagcuccacaccuccccccucugcaccaccaacaccaaggagggcuccaacaucugccucacccgcaccgaccgcggcugguacugcgacaacgccggcuccgucuccuucuucccccaggccgagaccugcaaggucugcuccaaccgcgucuucugcgacaccaugaacucccucacccuccccuccgaggucaaccucugcaacgucgacaucuucaaccccaaguacgacugcaagaucaugaccuccaagaccgacgucuccuccuccgucaucaccucccucggcgccaucgucuccugcuacggcaagaccaagugcaccgccuccaacaagaacaagggcaucaucaagaccuucuccaacggcugcgacuacgucuccaacaagggcgucgacaccgucuccgucggcaacacccucuacuacgucaacaagcaggagggcaagucccucuacgucaagggcgagcccaucaucaacuucuacgacccccucgucuuccccuccgacgaguucgacgccuccaucucccaggucaacgagaagaucaaccagucccucgccuucauccgcaaguccgacgagcuccuccacaacgucaacgccggcaaguccaccaccaacaucaugaucaccaccaucaucaucgucaucaucgucauccuccucucccucaucgccgucggccuccuccucuacugcaaggcccgcuccacccccgucacccucuccaaggaccagcucuccggcaucaacaacaucgccuucuccaacugaggacuaguguccaccugucccuccugggcugcuggauugucucguuuuccugccaaauaaacaggaucagcgcuuuacagaucuaaaaaaaaaaaaaaaaaaaaaaaaaaaaaaaaaaaaaaaaaaaaaaaaaaaaaaaaaaaaaaaaugcaucccccccccccccccccccccccccccccccaaaggcucuuuucagagccaccagaauu

SEQ ID NO: 6894 - RNA, 1916 nt, Artificial Sequence
  mRNA product Design c-1 comprising derived and/or modified sequence from HRSV(A2)__F_DSCav1_mut7 (opt3)
gggagaguccgcucagccagguugcagaagcggcuuagcguguguccuaaucuucucucugcguguagguaggccugugccgcaaacaagcuuaccauggagcugcucauccuuaaggccaacgcuauuaccacaauacugacugcagugacguucugcuuugccagcggccagaauaucaccgaagaguucuaccaauccacauguucugcggucucaaaaggguauuugagugcuuuaagaacuggaugguacaccagcguuauuacaaucgaacuguccaacauuaaggagaauaaaugcaacgguaccgacgccaaggugaaacuaaucaagcaggaacucgauaaguauaaaaaugcaguaacugagcugcagaugcuuauguguucuacacccgccaccggcucggggucagcuauagcaagcggaguggccgucugcaaggugcugcacuuggagggcgaaguuaacaaaaucaagagugcucuccuguccacgaauaaagccguggucucucugagcaacgguguguccguacucacuuuuaagguuuuagaccugaagaauuacauugauaaacagcuuuugccuauccugaacaagcaaucauguaguauuagcaauaucgagaccgugauggaguuccagcagaaaaacaauaggcuacucgaaauaacacgggaguuuucugucaacgcgggggugacuaccccaguguccacauauaugcugaccaauucagaacuucugagcuugauuaacgacaugccgaucacgaacgaucagaagaaacucaugaguaauaacguccaaauuguucgccagcagucuuacuccaucaugugcaucauuaaggaggaagugcuggcauauguagugcaguuaccccuguacggagucauagacacuccuuguuggaaacuccauacaagcccacuuugcaccacuaauacaaaggagggcucgaacaucugucugacccgaacggaucguggcugguacugcgacaaugccgggucuguguccuucuuuccccaagcugaaaccuguaagguuugcucaaacagaguguucugcgauacaaugaauaguuugacucuaccuagcgaggucaaccuguguaauguggacauuuuuaacccaaaauaugauugcaagaucaugaccuccaaaacagacguaucuagcucaguuauaacuagccucggagccauuguguccuguuacgguaagaccaaaugcacagcaagcaauaagaacaagggcaucaucaaaaccuucucuaaugggugugauuaugucucaaacaagggaguggacacugucagugugggcaauacgcuguacuauguuaacaaacaggaggguaagagccuuuacgugaaaggggaacccauuaucaacuuuuaugacccucugguauucccauccgaugaguuugacgcuucuauuucgcaggucaaugaaaagauaaaccaaaguuuggccuucaucaggaaguccgaugagcuccugcacaaugugaacgcgggaaaaucaacaaccaauauuaugaucacuaccaucauuauaguuaucauugugaucuuacugagucuaauugccgucggccuccugcuuuacugcaaggcacggucuacaccggugaccuugagcaaagaccagcuguccggcaucaacaauauagcuuucucaaacugaggacuaguguccaccugucccuccugggcugcuggauugucucguuuuccugccaaauaaacaggaucagcgcuuuacagaucuaaaaaaaaaaaaaaaaaaaaaaaaaaaaaaaaaaaaaaaaaaaaaaaaaaaaaaaaaaaaaaaaugcaucccccccccccccccccccccccccccccccaaaggcucuuuucagagccaccagaauu

SEQ ID NO: 6895 - RNA, 1916 nt, Artificial Sequence
  mRNA product Design c-1 comprising derived and/or modified sequence from HRSV(A2)__F_DSCav1_mut7 (opt4)
gggagaguccgcucagccagguugcagaagcggcuuagcguguguccuaaucuucucucugcguguagguaggccugugccgcaaacaagcuuaccauggagcugcugauccugaaggccaacgccaucaccaccauccugaccgccgugaccuucugcuucgccagcggccagaacaucaccgaggaguucuaccagagcaccugcagcgccgugagcaagggcuaccugagcgcccugagaaccggcugguacaccagcgugaucaccaucgagcugagcaacaucaaggagaacaagugcaacggcaccgacgccaaggugaagcugaucaagcaggagcuggacaaguacaagaacgccgugaccgagcugcagaugcugaugugcagcacccccgccaccggcagcggcagcgccaucgccagcggcguggccgugugcaaggugcugcaccuggagggcgaggugaacaagaucaagagcgcccugcugagcaccaacaaggccguggugagccugagcaacggcgugagcgugcugaccuucaaggugcuggaccugaagaacuacaucgacaagcagcugcugcccauccugaacaagcagagcugcagcaucagcaacaucgagaccgugauggaguuccagcagaagaacaacagacugcuggagaucaccagagaguucagcgugaacgccggcgugaccacccccgugagcaccuacaugcugaccaacagcgagcugcugagccugaucaacgacaugcccaucaccaacgaccagaagaagcugaugagcaacaacgugcagaucgugagacagcagagcuacagcaucaugugcaucaucaaggaggaggugcuggccuacguggugcagcugccccuguacggcgugaucgacacccccugcuggaagcugcacaccagcccccugugcaccaccaacaccaaggagggcagcaacaucugccugaccagaaccgacagaggcugguacugcgacaacgccggcagcgugagcuucuucccccaggccgagaccugcaaggugugcagcaacagaguguucugcgacaccaugaacagccugacccugcccagcgaggugaaccugugcaacguggacaucuucaaccccaaguacgacugcaagaucaugaccagcaagaccgacgugagcagcagcgugaucaccagccugggcgccaucgugagcugcuacggcaagaccaagugcaccgccagcaacaagaacaagggcaucaucaagaccuucagcaacggcugcgacuacgugagcaacaagggcguggacaccgugagcgugggcaacacccuguacuacgugaacaagcaggagggcaagagccuguacgugaagggcgagcccaucaucaacuucuacgacccccugguguuccccagcgacgaguucgacgccagcaucagccaggugaacgagaagaucaaccagagccuggccuucaucagaaagagcgacgagcugcugcacaacgugaacgccggcaagagcaccaccaacaucaugaucaccaccaucaucaucgugaucaucgugauccugcugagccugaucgccgugggccugcugcuguacugcaaggccagaagcacccccgugacccugagcaaggaccagcugagcggcaucaacaacaucgccuucagcaacugaggacuaguguccaccugucccuccugggcugcuggauugucucguuuuccugccaaauaaacaggaucagcgcuuuacagaucuaaaaaaaaaaaaaaaaaaaaaaaaaaaaaaaaaaaaaaaaaaaaaaaaaaaaaaaaaaaaaaaaugcaucccccccccccccccccccccccccccccccaaaggcucuuuucagagccaccagaauu

SEQ ID NO: 6896 - RNA, 1916 nt, Artificial Sequence
  mRNA product Design c-1 comprising derived and/or modified sequence from HRSV(A2)__F_DSCav1_mut7 (opt5)
gggagaguccgcucagccagguugcagaagcggcuuagcguguguccuaaucuucucucugcguguagguaggccugugccgcaaacaagcuuaccauggagcugcucauccugaaggccaacgcuauuaccacaauccuuacggccgugaccuucugcuuugcgagcggccagaauauuacagaagaguucuaccaauccaccuguucugcugucagcaaaggguaucuguccgcccucagaacaggaugguacaccucuguuaucacaauugaacugagcaacaucaaggagaauaaaugcaacggcaccgacgccaaggugaaacuuaucaagcaggaacuggauaaguauaaaaaugcugugacggagcuccagaugcugauguguuccacccccgccacagggucuggaagcgcuauugccuccggcgucgcggugugcaagguucugcaccucgagggggaagugaacaaaaucaagagcgcccugcuuucuaccaauaaagcugucgugucccugagcaacggaguuucugugcucacauuuaagguccuggaccuuaagaauuacauugauaaacagcugcucccuauccugaacaagcaauccuguagcauuucuaauaucgagaccgugauggaguuccagcagaaaaacaaucggcugcucgaaauuacgcgcgaguuuuccgugaacgccggcgucacaaccccgguuagcacauauaugcugaccaauuccgaacuucugucucucaucaacgacaugcccaucaccaacgaucagaagaaacugaugagcaauaacgugcaaauugugagacagcaguccuacagcaucaugugcauuaucaaggaggaaguccuugcuuaugugguucagcugccucucuacggcgugauugacacacccuguuggaaacugcauacgucuccucugugcaccacaaauaccaaggagggguccaacaucugucucacacggaccgaucgcggaugguacugcgacaaugccggcagcgucucuuucuuuccccaagcggaaacguguaaggugugcagcaacagaguuuucugcgauacaaugaacucccugacccuuccuucugaggugaaucuguguaaugucgacaucuuuaacccgaaauaugauugcaagauuaugaccagcaaaacagacguguccagcucugucaucaccucccucggggccauugugagcuguuacggaaagacaaaaugcacggcuucuaauaagaacaagggcaucauuaaaaccuucuccaaugggugugauuauguuagcaacaagggaguggacacagucuccgugggcaauacccuguacuauguuaacaaacaggagggcaagucucuuuacgugaaaggggaacccaucaucaacuuuuaugacccucuggucuuccccagcgaugaguuugacgccuccauuucucaggugaaugaaaagaucaaccaaagccucgcuuucauucggaaguccgaugagcugcugcacaaugugaacgccggaaaaagcacaaccaauaucaugauuacgaccaucauuaucguuaucauugucauccuccugucucuuauugccgugggccugcuccuguacugcaaggcucgcuccacaccugugacccugagcaaagaccagcuuucugggaucaacaauauugcguucuccaacugaggacuaguguccaccugucccuccugggcugcuggauugucucguuuuccugccaaauaaacaggaucagcgcuuuacagaucuaaaaaaaaaaaaaaaaaaaaaaaaaaaaaaaaaaaaaaaaaaaaaaaaaaaaaaaaaaaaaaaaugcaucccccccccccccccccccccccccccccccaaaggcucuuuucagagccaccagaauu

SEQ ID NO: 6897 - RNA, 1916 nt, Artificial Sequence
  mRNA product Design c-1 comprising derived and/or modified sequence from HRSV(A2)__F_DSCav1_mut7 (opt6)
gggagaguccgcucagccagguugcagaagcggcuuagcguguguccuaaucuucucucugcguguagguaggccugugccgcaaacaagcuuaccauggaauuacucauacucaaagcaaaugcaauuaccacuauacucacagcuguaacuuuuuguuucgccucaggacaaaacaucacagaagaauuuuaucaauccacaugcucugccguaucaaaaggcuaccuaucugcccuaagaacagguugguacacaucuguaauaacaaucgaauuauccaacaucaaagaaaacaaaugcaacggcacagacgcaaaagucaaacucaucaaacaagaauuagauaaauauaaaaacgcaguaacagaacuacaaaugcuaaugugcucuacacccgccacaggaucaggauccgcaaucgcuucuggaguagccguuugcaaaguauuacaccuagaaggagaaguaaauaaaauaaaauccgcacuacuaucaacuaauaaagcaguaguaucacuuucuaaugguguaucaguauuaacauucaaaguccucgaccuaaaaaauuacaucgacaaacaacuauuacccauccuuaauaaacaaucaugcuccauaucaaacauagaaacugucauggaauuucaacaaaaaaacaauagacuucuagaaaucacaagagaauuuucuguaaaugcaggaguaacuacaccaguaucaacauauauguuaaccaacuccgaacuacuaucacucauaaacgacaugccaauaacaaacgaccaaaaaaaacuaaugucaaauaacguucaaauaguaagacaacaaucauacucaaucaugugcauaauaaaagaagaaguuuuagcauacgucguacaacuuccccuauacggaguaauagacaccccuugcuggaaacuccacaccucaccacuaugcacuacaaacacaaaagaagguuccaacaucugcuuaacaagaaccgaucgaggaugguacugcgacaacgcugguuccguaucuuucuucccacaagcagaaacaugcaaaguaugcuccaauagaguauucugcgacaccaugaacucacuaacucuaccauccgaaguaaaccuaugcaacgucgacauauuuaauccaaaauaugacugcaaaauaaugacuucaaaaacagacguauccucaucaguaauaacauccuuaggagcaauaguaucauguuacggcaagacaaaauguacagccucaaacaaaaacaaagguaucauuaaaaccuucuccaacggcugcgacuacguaucaaauaaaggugucgauacaguaucaguaggaaacacacucuauuacguuaauaaacaagaaggaaagucauuauacguaaaaggagaaccaauaaucaauuucuacgauccccuagucuuucccucagaugaauuugacgcaagcaucucucaagucaacgaaaaaauaaaccaaucccuagccuucauaagaaaaucagaugaacuacuucauaacgucaacgccggaaaaucaacaaccaacauaaugaucacuacaaucauaauuguaauuauaguaauacuacuaucgcuaauugccguuggacuacuacuauauuguaaagcaagaucaacacccguuacucuauccaaagaucaauuaucaggaaucaacaacauagccuucucaaauuaaggacuaguguccaccugucccuccugggcugcuggauugucucguuuuccugccaaauaaacaggaucagcgcuuuacagaucuaaaaaaaaaaaaaaaaaaaaaaaaaaaaaaaaaaaaaaaaaaaaaaaaaaaaaaaaaaaaaaaaugcaucccccccccccccccccccccccccccccccaaaggcucuuuucagagccaccagaauu

SEQ ID NO: 6898 - RNA, 1916 nt, Artificial Sequence
  mRNA product Design c-1 comprising derived and/or modified sequence from HRSV(A2)__F_DSCav1_mut7 (opt11)
gggagaguccgcucagccagguugcagaagcggcuuagcguguguccuaaucuucucucugcguguagguaggccugugccgcaaacaagcuuaccauggaacuacucauacuuaaagccaacgcaauaaccacaauccucaccgccgucacauucugcuucgccucgggacaaaacauaaccgaagaauuuuaccagucuaccugcuccgccgucuccaaggguuaccucuccgcgcuccgcaccgggugguacaccagcguuaucaccaucgaacuaucuaacauaaaagaaaacaagugcaacggaaccgacgcaaaagucaaacucaucaaacaagaacuagacaaauacaagaaugccgucaccgaacuacaaaugcucaugugcuccacccccgccaccggauccggcuccgccauugccuccggcgucgccguaugcaaaguccuucacuuggaaggagaaguuaacaaaauaaaaagcgcccuccugucgaccaacaaagcgguggucagccucuccaacggcgucucuguccucaccuucaaaguccucgaccucaagaacuacauagauaaacaacuacuccccauccuaaacaaacagucaugcagcauauccaacaucgaaaccgucauggaguuccaacagaaaaacaaccgccuccuugaaaucacccgcgaguucucugucaacgccggcgucaccacccccgucuccaccuacaugcucacaaacuccgaacuccucagccucaucaacgacaugccaaucaccaacgaccaaaagaaacucauguccaacaacguacaaaucguucgucaacaaucauacucaaucaugugcaucauuaaagaagaaguccucgcauacgucguccaacucccccucuauggggucaucgacaccccaugcuggaaacuccacaccucuccccuaugcaccaccaacaccaaagaaggcuccaacaucugccuaacccgaaccgaccgcggaugguacugcgacaacgccggcuccgucuccuucuucccccaggccgaaacauguaaagucugcuccaaccguguguucugcgacaccaugaacucacuaacccuccccuccgaagucaaccucugcaacgucgacaucuucaacccgaaauacgacugcaaaauaaugaccagcaaaacagacguauccucuagcgucauuaccagccuaggugcaaucguguccugcuacggcaaaacaaaaugcaccgccuccaacaaaaauaaaggaaucauaaaaaccuucuccaacggcugcgacuacgucagcaacaaaggagucgacaccgucuccguaggaaauacucuauacuaugucaacaaacaagaggguaaaucccucuacgucaaaggcgaacccaucaucaacuucuacgacccccucgucuuccccucugacgaguucgacgccagcauaucacaaguaaacgaaaagaucaaccaaucccucgcauucauucgcaaauccgacgaacuccuacacaacgucaacgccggaaaauccaccaccaacaucaugaucacuacuaucauuaucgucaucaucgucauccuccucucccucaucgcagucggccuucuacucuacugcaaggcacgcucuacacccguaacccugucuaaagaccaacucuccggcaucaacaacaucgcuuucuccaacuaaggacuaguguccaccugucccuccugggcugcuggauugucucguuuuccugccaaauaaacaggaucagcgcuuuacagaucuaaaaaaaaaaaaaaaaaaaaaaaaaaaaaaaaaaaaaaaaaaaaaaaaaaaaaaaaaaaaaaaaugcaucccccccccccccccccccccccccccccccaaaggcucuuuucagagccaccagaauu

SEQ ID NO: 6899 - RNA, 2006 nt, Artificial Sequence
  mRNA product Design c-2 comprising derived and/or modified sequence from HRSV(A2)__F_DSCav1_mut7 (opt1)
gggagacuccugucgggcggaaguaggaggaguagaguuuaaaaacaguacucuuuuuccgguucgggacguaguugaagcaacgacaagccggauaaccgcucuugagacaggaagcuuaccauggagcugcucauccugaaggccaacgccaucaccaccauccugacggcggugaccuucugcuucgccagcggccagaacaucaccgaggaguucuaccaguccacgugcagcgccgucuccaagggguaccucagcgcccugcggaccggcugguacaccuccgugaucaccaucgagcugagcaacaucaaggagaacaagugcaacgggaccgacgccaaggugaagcucaucaagcaggagcuggacaaguacaagaacgcggucacggagcugcagaugcugaugugcuccaccccggcaaccggcuccggcuccgccaucgcgagcggcgucgccgugugcaaggugcugcaccucgagggggaggucaacaagaucaagagcgcccugcuguccaccaacaaggccguggugagccucuccaacggcgucagcgugcugaccuucaaggugcuggaccucaagaacuacaucgacaagcagcugcugcccauccugaacaagcagagcugcuccaucagcaacaucgagacggugauggaguuccagcagaagaacaaccggcuccuggagaucacccgcgaguucagcgugaacgccggggucaccacccccguguccacguacaugcugaccaacagcgagcuccugucccugaucaacgacaugccgaucaccaacgaccagaagaagcucaugagcaacaacgugcagaucguccggcagcaguccuacagcaucaugugcaucaucaaggaggaggugcuggcguacgugguccagcugccccucuacggcgugaucgacacccccugcuggaagcugcacacgagcccccugugcaccaccaacaccaaggagggguccaacaucugccucacgcgcaccgaccggggcugguacugcgacaacgccggcagcgucuccuucuucccgcaggccgagaccugcaaggugugcagcaaccgcguguucugcgacaccaugaacucccugacgcugcccagcgagguaaaccucugcaacgucgacaucuucaaccccaaguacgacugcaagaucaugaccuccaagaccgacgugagcuccagcgugaucaccucccugggggccaucgucagcugcuacggcaagacgaagugcaccgccagcaacaagaacaaggggaucaucaagaccuucuccaacggcugcgacuacgugagcaacaagggcguggacaccguguccgucgggaacacccuguacuacgugaacaagcaggagggcaagagccucuacgugaagggggagcccaucaucaacuucuacgacccgcuggucuuccccuccgacgaguucgacgcgagcaucucccaggugaacgagaagaucaaccagagccuggccuucauccgcaaguccgacgagcugcuccacaacgugaacgccggcaagagcacgaccaacaucaugaucaccaccaucaucaucgucaucaucgugauccugcugucccucaucgccguggggcugcugcucuacugcaaggcccggagcacgcccgucacccuguccaaggaccagcugagcggcaucaacaacaucgcguucuccaacugaggacuaguggaagcauuuuccuggcugauuaaaagaaauuacucagcuauggucaucuguuccuguuagaaggcuaugcagcauauuauauacuaugcgcauguuaugaaaugcauaauaaaaaauuuuaaaaaaucuaaaagaucuaaaaaaaaaaaaaaaaaaaaaaaaaaaaaaaaaaaaaaaaaaaaaaaaaaaaaaaaaaaaaaaaugcaucccccccccccccccccccccccccccccccaaaggcucuuuucagagccaccagaauu

SEQ ID NO: 6900 - RNA, 2006 nt, Artificial Sequence
  mRNA product Design c-2 comprising derived and/or modified sequence from HRSV(A2)__F_DSCav1_mut7 (opt1)
gggagacuccugucgggcggaaguaggaggaguagaguuuaaaaacaguacucuuuuuccgguucgggacguaguugaagcaacgacaagccggauaaccgcucuugagacaggaagcuuaccauggagcugcucauccugaaggccaacgccaucaccaccauccugacggcggugaccuucugcuucgccagcggccagaacaucaccgaggaguucuaccaguccacgugcagcgccgucuccaagggguaccucagcgcccugcgcaccggcugguacaccuccgugaucaccaucgagcugagcaacaucaaggagaacaagugcaacgggaccgacgccaaggugaagcucaucaagcaggagcuggacaaguacaagaacgcggucacggagcugcagaugcucaugugcuccacccccgccaccggcagcggguccgccaucgccagcggcguggcggugugcaagguccugcaccuggagggcgaggugaacaagaucaaguccgcccuccugagcaccaacaaggccguggucucccugagcaacgggguguccgugcucacguucaagguccuggaccugaagaacuacaucgacaagcagcuccugccgauccugaacaagcagagcugcuccaucagcaacaucgagaccgugauggaguuccagcagaagaacaaccggcuccuggagaucacccgcgaguucuccgugaacgccggcgucaccacgcccgugagcaccuacaugcugaccaacagcgagcuccugucccugaucaacgacaugcccaucaccaacgaccagaagaagcucaugagcaacaacgugcagaucguccggcagcaguccuacagcaucaugugcaucaucaaggaggaggugcuggccuacgugguccagcugccccucuacggggugaucgacacgccgugcuggaagcugcacaccagcccccugugcaccaccaacacgaaggagggcagcaacaucugccucacccgcaccgaccgggggugguacugcgacaacgcgggcuccgugagcuucuucccccaggccgagaccugcaaggucugcuccaaccgcguguucugcgacacgaugaacagccugacccugcccuccgaggucaaccucugcaacguggacaucuucaacccgaaguacgacugcaagaucaugaccagcaagaccgacguguccagcuccgucaucacgagccugggcgccaucguguccugcuacgggaagaccaagugcaccgccagcaacaagaacaagggcaucaucaagaccuucuccaacgggugcgacuacgugagcaacaagggcgucgacacggugagcgugggcaacacccuguacuacgucaacaagcaggaggggaagucccucuacgugaagggcgagcccaucaucaacuucuacgacccccugguguuccccagcgacgaguucgacgccuccaucagccaggucaacgagaagaucaaccagucccuggcguucauccggaaguccgacgagcuccugcacaacgugaacgccgggaaguccaccaccaacaucaugaucaccacgaucaucaucgugaucaucgucauccugcucagccugaucgccgugggccugcuccuguacugcaaggcccgcuccaccccggugacccugagcaaggaccagcuguccgggaucaacaacaucgccuucagcaacugaggacuaguggaagcauuuuccuggcugauuaaaagaaauuacucagcuauggucaucuguuccuguuagaaggcuaugcagcauauuauauacuaugcgcauguuaugaaaugcauaauaaaaaauuuuaaaaaaucuaaaagaucuaaaaaaaaaaaaaaaaaaaaaaaaaaaaaaaaaaaaaaaaaaaaaaaaaaaaaaaaaaaaaaaaugcaucccccccccccccccccccccccccccccccaaaggcucuuuucagagccaccagaauu

SEQ ID NO: 6901 - RNA, 2006 nt, Artificial Sequence
  mRNA product Design c-2 comprising derived and/or modified sequence from HRSV(A2)__F_DSCav1_mut7 (opt2)
gggagacuccugucgggcggaaguaggaggaguagaguuuaaaaacaguacucuuuuuccgguucgggacguaguugaagcaacgacaagccggauaaccgcucuugagacaggaagcuuaccauggagcuccucauccucaaggccaacgccaucaccaccauccucaccgccgucaccuucugcuucgccuccggccagaacaucaccgaggaguucuaccaguccaccugcuccgccgucuccaagggcuaccucuccgcccuccgcaccggcugguacaccuccgucaucaccaucgagcucuccaacaucaaggagaacaagugcaacggcaccgacgccaaggucaagcucaucaagcaggagcucgacaaguacaagaacgccgucaccgagcuccagaugcucaugugcuccacccccgccaccggcuccggcuccgccaucgccuccggcgucgccgucugcaagguccuccaccucgagggcgaggucaacaagaucaaguccgcccuccucuccaccaacaaggccgucgucucccucuccaacggcgucuccguccucaccuucaagguccucgaccucaagaacuacaucgacaagcagcuccuccccauccucaacaagcaguccugcuccaucuccaacaucgagaccgucauggaguuccagcagaagaacaaccgccuccucgagaucacccgcgaguucuccgucaacgccggcgucaccacccccgucuccaccuacaugcucaccaacuccgagcuccucucccucaucaacgacaugcccaucaccaacgaccagaagaagcucauguccaacaacguccagaucguccgccagcaguccuacuccaucaugugcaucaucaaggaggagguccucgccuacgucguccagcucccccucuacggcgucaucgacacccccugcuggaagcuccacaccuccccccucugcaccaccaacaccaaggagggcuccaacaucugccucacccgcaccgaccgcggcugguacugcgacaacgccggcuccgucuccuucuucccccaggccgagaccugcaaggucugcuccaaccgcgucuucugcgacaccaugaacucccucacccuccccuccgaggucaaccucugcaacgucgacaucuucaaccccaaguacgacugcaagaucaugaccuccaagaccgacgucuccuccuccgucaucaccucccucggcgccaucgucuccugcuacggcaagaccaagugcaccgccuccaacaagaacaagggcaucaucaagaccuucuccaacggcugcgacuacgucuccaacaagggcgucgacaccgucuccgucggcaacacccucuacuacgucaacaagcaggagggcaagucccucuacgucaagggcgagcccaucaucaacuucuacgacccccucgucuuccccuccgacgaguucgacgccuccaucucccaggucaacgagaagaucaaccagucccucgccuucauccgcaaguccgacgagcuccuccacaacgucaacgccggcaaguccaccaccaacaucaugaucaccaccaucaucaucgucaucaucgucauccuccucucccucaucgccgucggccuccuccucuacugcaaggcccgcuccacccccgucacccucuccaaggaccagcucuccggcaucaacaacaucgccuucuccaacugaggacuaguggaagcauuuuccuggcugauuaaaagaaauuacucagcuauggucaucuguuccuguuagaaggcuaugcagcauauuauauacuaugcgcauguuaugaaaugcauaauaaaaaauuuuaaaaaaucuaaaagaucuaaaaaaaaaaaaaaaaaaaaaaaaaaaaaaaaaaaaaaaaaaaaaaaaaaaaaaaaaaaaaaaaugcaucccccccccccccccccccccccccccccccaaaggcucuuuucagagccaccagaauu

SEQ ID NO: 6902 - RNA, 2006 nt, Artificial Sequence
  mRNA product Design c-2 comprising derived and/or modified sequence from HRSV(A2)__F_DSCav1_mut7 (opt3)
gggagacuccugucgggcggaaguaggaggaguagaguuuaaaaacaguacucuuuuuccgguucgggacguaguugaagcaacgacaagccggauaaccgcucuugagacaggaagcuuaccauggagcugcucauccuuaaggccaacgcuauuaccacaauacugacugcagugacguucugcuuugccagcggccagaauaucaccgaagaguucuaccaauccacauguucugcggucucaaaaggguauuugagugcuuuaagaacuggaugguacaccagcguuauuacaaucgaacuguccaacauuaaggagaauaaaugcaacgguaccgacgccaaggugaaacuaaucaagcaggaacucgauaaguauaaaaaugcaguaacugagcugcagaugcuuauguguucuacacccgccaccggcucggggucagcuauagcaagcggaguggccgucugcaaggugcugcacuuggagggcgaaguuaacaaaaucaagagugcucuccuguccacgaauaaagccguggucucucugagcaacgguguguccguacucacuuuuaagguuuuagaccugaagaauuacauugauaaacagcuuuugccuauccugaacaagcaaucauguaguauuagcaauaucgagaccgugauggaguuccagcagaaaaacaauaggcuacucgaaauaacacgggaguuuucugucaacgcgggggugacuaccccaguguccacauauaugcugaccaauucagaacuucugagcuugauuaacgacaugccgaucacgaacgaucagaagaaacucaugaguaauaacguccaaauuguucgccagcagucuuacuccaucaugugcaucauuaaggaggaagugcuggcauauguagugcaguuaccccuguacggagucauagacacuccuuguuggaaacuccauacaagcccacuuugcaccacuaauacaaaggagggcucgaacaucugucugacccgaacggaucguggcugguacugcgacaaugccgggucuguguccuucuuuccccaagcugaaaccuguaagguuugcucaaacagaguguucugcgauacaaugaauaguuugacucuaccuagcgaggucaaccuguguaauguggacauuuuuaacccaaaauaugauugcaagaucaugaccuccaaaacagacguaucuagcucaguuauaacuagccucggagccauuguguccuguuacgguaagaccaaaugcacagcaagcaauaagaacaagggcaucaucaaaaccuucucuaaugggugugauuaugucucaaacaagggaguggacacugucagugugggcaauacgcuguacuauguuaacaaacaggaggguaagagccuuuacgugaaaggggaacccauuaucaacuuuuaugacccucugguauucccauccgaugaguuugacgcuucuauuucgcaggucaaugaaaagauaaaccaaaguuuggccuucaucaggaaguccgaugagcuccugcacaaugugaacgcgggaaaaucaacaaccaauauuaugaucacuaccaucauuauaguuaucauugugaucuuacugagucuaauugccgucggccuccugcuuuacugcaaggcacggucuacaccggugaccuugagcaaagaccagcuguccggcaucaacaauauagcuuucucaaacugaggacuaguggaagcauuuuccuggcugauuaaaagaaauuacucagcuauggucaucuguuccuguuagaaggcuaugcagcauauuauauacuaugcgcauguuaugaaaugcauaauaaaaaauuuuaaaaaaucuaaaagaucuaaaaaaaaaaaaaaaaaaaaaaaaaaaaaaaaaaaaaaaaaaaaaaaaaaaaaaaaaaaaaaaaugcaucccccccccccccccccccccccccccccccaaaggcucuuuucagagccaccagaauu

SEQ ID NO: 6903 - RNA, 2006 nt, Artificial Sequence
  mRNA product Design c-2 comprising derived and/or modified sequence from HRSV(A2)__F_DSCav1_mut7 (opt4)
gggagacuccugucgggcggaaguaggaggaguagaguuuaaaaacaguacucuuuuuccgguucgggacguaguugaagcaacgacaagccggauaaccgcucuugagacaggaagcuuaccauggagcugcugauccugaaggccaacgccaucaccaccauccugaccgccgugaccuucugcuucgccagcggccagaacaucaccgaggaguucuaccagagcaccugcagcgccgugagcaagggcuaccugagcgcccugagaaccggcugguacaccagcgugaucaccaucgagcugagcaacaucaaggagaacaagugcaacggcaccgacgccaaggugaagcugaucaagcaggagcuggacaaguacaagaacgccgugaccgagcugcagaugcugaugugcagcacccccgccaccggcagcggcagcgccaucgccagcggcguggccgugugcaaggugcugcaccuggagggcgaggugaacaagaucaagagcgcccugcugagcaccaacaaggccguggugagccugagcaacggcgugagcgugcugaccuucaaggugcuggaccugaagaacuacaucgacaagcagcugcugcccauccugaacaagcagagcugcagcaucagcaacaucgagaccgugauggaguuccagcagaagaacaacagacugcuggagaucaccagagaguucagcgugaacgccggcgugaccacccccgugagcaccuacaugcugaccaacagcgagcugcugagccugaucaacgacaugcccaucaccaacgaccagaagaagcugaugagcaacaacgugcagaucgugagacagcagagcuacagcaucaugugcaucaucaaggaggaggugcuggccuacguggugcagcugccccuguacggcgugaucgacacccccugcuggaagcugcacaccagcccccugugcaccaccaacaccaaggagggcagcaacaucugccugaccagaaccgacagaggcugguacugcgacaacgccggcagcgugagcuucuucccccaggccgagaccugcaaggugugcagcaacagaguguucugcgacaccaugaacagccugacccugcccagcgaggugaaccugugcaacguggacaucuucaaccccaaguacgacugcaagaucaugaccagcaagaccgacgugagcagcagcgugaucaccagccugggcgccaucgugagcugcuacggcaagaccaagugcaccgccagcaacaagaacaagggcaucaucaagaccuucagcaacggcugcgacuacgugagcaacaagggcguggacaccgugagcgugggcaacacccuguacuacgugaacaagcaggagggcaagagccuguacgugaagggcgagcccaucaucaacuucuacgacccccugguguuccccagcgacgaguucgacgccagcaucagccaggugaacgagaagaucaaccagagccuggccuucaucagaaagagcgacgagcugcugcacaacgugaacgccggcaagagcaccaccaacaucaugaucaccaccaucaucaucgugaucaucgugauccugcugagccugaucgccgugggccugcugcuguacugcaaggccagaagcacccccgugacccugagcaaggaccagcugagcggcaucaacaacaucgccuucagcaacugaggacuaguggaagcauuuuccuggcugauuaaaagaaauuacucagcuauggucaucuguuccuguuagaaggcuaugcagcauauuauauacuaugcgcauguuaugaaaugcauaauaaaaaauuuuaaaaaaucuaaaagaucuaaaaaaaaaaaaaaaaaaaaaaaaaaaaaaaaaaaaaaaaaaaaaaaaaaaaaaaaaaaaaaaaugcaucccccccccccccccccccccccccccccccaaaggcucuuuucagagccaccagaauu

SEQ ID NO: 6904 - RNA, 2006 nt, Artificial Sequence
  mRNA product Design c-2 comprising derived and/or modified sequence from HRSV(A2)__F_DSCav1_mut7 (opt5)
gggagacuccugucgggcggaaguaggaggaguagaguuuaaaaacaguacucuuuuuccgguucgggacguaguugaagcaacgacaagccggauaaccgcucuugagacaggaagcuuaccauggagcugcucauccugaaggccaacgcuauuaccacaauccuuacggccgugaccuucugcuuugcgagcggccagaauauuacagaagaguucuaccaauccaccuguucugcugucagcaaaggguaucuguccgcccucagaacaggaugguacaccucuguuaucacaauugaacugagcaacaucaaggagaauaaaugcaacggcaccgacgccaaggugaaacuuaucaagcaggaacuggauaaguauaaaaaugcugugacggagcuccagaugcugauguguuccacccccgccacagggucuggaagcgcuauugccuccggcgucgcggugugcaagguucugcaccucgagggggaagugaacaaaaucaagagcgcccugcuuucuaccaauaaagcugucgugucccugagcaacggaguuucugugcucacauuuaagguccuggaccuuaagaauuacauugauaaacagcugcucccuauccugaacaagcaauccuguagcauuucuaauaucgagaccgugauggaguuccagcagaaaaacaaucggcugcucgaaauuacgcgcgaguuuuccgugaacgccggcgucacaaccccgguuagcacauauaugcugaccaauuccgaacuucugucucucaucaacgacaugcccaucaccaacgaucagaagaaacugaugagcaauaacgugcaaauugugagacagcaguccuacagcaucaugugcauuaucaaggaggaaguccuugcuuaugugguucagcugccucucuacggcgugauugacacacccuguuggaaacugcauacgucuccucugugcaccacaaauaccaaggagggguccaacaucugucucacacggaccgaucgcggaugguacugcgacaaugccggcagcgucucuuucuuuccccaagcggaaacguguaaggugugcagcaacagaguuuucugcgauacaaugaacucccugacccuuccuucugaggugaaucuguguaaugucgacaucuuuaacccgaaauaugauugcaagauuaugaccagcaaaacagacguguccagcucugucaucaccucccucggggccauugugagcuguuacggaaagacaaaaugcacggcuucuaauaagaacaagggcaucauuaaaaccuucuccaaugggugugauuauguuagcaacaagggaguggacacagucuccgugggcaauacccuguacuauguuaacaaacaggagggcaagucucuuuacgugaaaggggaacccaucaucaacuuuuaugacccucuggucuuccccagcgaugaguuugacgccuccauuucucaggugaaugaaaagaucaaccaaagccucgcuuucauucggaaguccgaugagcugcugcacaaugugaacgccggaaaaagcacaaccaauaucaugauuacgaccaucauuaucguuaucauugucauccuccugucucuuauugccgugggccugcuccuguacugcaaggcucgcuccacaccugugacccugagcaaagaccagcuuucugggaucaacaauauugcguucuccaacugaggacuaguggaagcauuuuccuggcugauuaaaagaaauuacucagcuauggucaucuguuccuguuagaaggcuaugcagcauauuauauacuaugcgcauguuaugaaaugcauaauaaaaaauuuuaaaaaaucuaaaagaucuaaaaaaaaaaaaaaaaaaaaaaaaaaaaaaaaaaaaaaaaaaaaaaaaaaaaaaaaaaaaaaaaugcaucccccccccccccccccccccccccccccccaaaggcucuuuucagagccaccagaauu

SEQ ID NO: 6905 - RNA, 2006 nt, Artificial Sequence
  mRNA product Design c-2 comprising derived and/or modified sequence from HRSV(A2)__F_DSCav1_mut7 (opt6)
gggagacuccugucgggcggaaguaggaggaguagaguuuaaaaacaguacucuuuuuccgguucgggacguaguugaagcaacgacaagccggauaaccgcucuugagacaggaagcuuaccauggaauuacucauacucaaagcaaaugcaauuaccacuauacucacagcuguaacuuuuuguuucgccucaggacaaaacaucacagaagaauuuuaucaauccacaugcucugccguaucaaaaggcuaccuaucugcccuaagaacagguugguacacaucuguaauaacaaucgaauuauccaacaucaaagaaaacaaaugcaacggcacagacgcaaaagucaaacucaucaaacaagaauuagauaaauauaaaaacgcaguaacagaacuacaaaugcuaaugugcucuacacccgccacaggaucaggauccgcaaucgcuucuggaguagccguuugcaaaguauuacaccuagaaggagaaguaaauaaaauaaaauccgcacuacuaucaacuaauaaagcaguaguaucacuuucuaaugguguaucaguauuaacauucaaaguccucgaccuaaaaaauuacaucgacaaacaacuauuacccauccuuaauaaacaaucaugcuccauaucaaacauagaaacugucauggaauuucaacaaaaaaacaauagacuucuagaaaucacaagagaauuuucuguaaaugcaggaguaacuacaccaguaucaacauauauguuaaccaacuccgaacuacuaucacucauaaacgacaugccaauaacaaacgaccaaaaaaaacuaaugucaaauaacguucaaauaguaagacaacaaucauacucaaucaugugcauaauaaaagaagaaguuuuagcauacgucguacaacuuccccuauacggaguaauagacaccccuugcuggaaacuccacaccucaccacuaugcacuacaaacacaaaagaagguuccaacaucugcuuaacaagaaccgaucgaggaugguacugcgacaacgcugguuccguaucuuucuucccacaagcagaaacaugcaaaguaugcuccaauagaguauucugcgacaccaugaacucacuaacucuaccauccgaaguaaaccuaugcaacgucgacauauuuaauccaaaauaugacugcaaaauaaugacuucaaaaacagacguauccucaucaguaauaacauccuuaggagcaauaguaucauguuacggcaagacaaaauguacagccucaaacaaaaacaaagguaucauuaaaaccuucuccaacggcugcgacuacguaucaaauaaaggugucgauacaguaucaguaggaaacacacucuauuacguuaauaaacaagaaggaaagucauuauacguaaaaggagaaccaauaaucaauuucuacgauccccuagucuuucccucagaugaauuugacgcaagcaucucucaagucaacgaaaaaauaaaccaaucccuagccuucauaagaaaaucagaugaacuacuucauaacgucaacgccggaaaaucaacaaccaacauaaugaucacuacaaucauaauuguaauuauaguaauacuacuaucgcuaauugccguuggacuacuacuauauuguaaagcaagaucaacacccguuacucuauccaaagaucaauuaucaggaaucaacaacauagccuucucaaauuaaggacuaguggaagcauuuuccuggcugauuaaaagaaauuacucagcuauggucaucuguuccuguuagaaggcuaugcagcauauuauauacuaugcgcauguuaugaaaugcauaauaaaaaauuuuaaaaaaucuaaaagaucuaaaaaaaaaaaaaaaaaaaaaaaaaaaaaaaaaaaaaaaaaaaaaaaaaaaaaaaaaaaaaaaaugcaucccccccccccccccccccccccccccccccaaaggcucuuuucagagccaccagaauu

SEQ ID NO: 6906 - RNA, 2006 nt, Artificial Sequence
  mRNA product Design c-2 comprising derived and/or modified sequence from HRSV(A2)__F_DSCav1_mut7 (opt11)
gggagacuccugucgggcggaaguaggaggaguagaguuuaaaaacaguacucuuuuuccgguucgggacguaguugaagcaacgacaagccggauaaccgcucuugagacaggaagcuuaccauggaacuacucauacuuaaagccaacgcaauaaccacaauccucaccgccgucacauucugcuucgccucgggacaaaacauaaccgaagaauuuuaccagucuaccugcuccgccgucuccaaggguuaccucuccgcgcuccgcaccgggugguacaccagcguuaucaccaucgaacuaucuaacauaaaagaaaacaagugcaacggaaccgacgcaaaagucaaacucaucaaacaagaacuagacaaauacaagaaugccgucaccgaacuacaaaugcucaugugcuccacccccgccaccggauccggcuccgccauugccuccggcgucgccguaugcaaaguccuucacuuggaaggagaaguuaacaaaauaaaaagcgcccuccugucgaccaacaaagcgguggucagccucuccaacggcgucucuguccucaccuucaaaguccucgaccucaagaacuacauagauaaacaacuacuccccauccuaaacaaacagucaugcagcauauccaacaucgaaaccgucauggaguuccaacagaaaaacaaccgccuccuugaaaucacccgcgaguucucugucaacgccggcgucaccacccccgucuccaccuacaugcucacaaacuccgaacuccucagccucaucaacgacaugccaaucaccaacgaccaaaagaaacucauguccaacaacguacaaaucguucgucaacaaucauacucaaucaugugcaucauuaaagaagaaguccucgcauacgucguccaacucccccucuauggggucaucgacaccccaugcuggaaacuccacaccucuccccuaugcaccaccaacaccaaagaaggcuccaacaucugccuaacccgaaccgaccgcggaugguacugcgacaacgccggcuccgucuccuucuucccccaggccgaaacauguaaagucugcuccaaccguguguucugcgacaccaugaacucacuaacccuccccuccgaagucaaccucugcaacgucgacaucuucaacccgaaauacgacugcaaaauaaugaccagcaaaacagacguauccucuagcgucauuaccagccuaggugcaaucguguccugcuacggcaaaacaaaaugcaccgccuccaacaaaaauaaaggaaucauaaaaaccuucuccaacggcugcgacuacgucagcaacaaaggagucgacaccgucuccguaggaaauacucuauacuaugucaacaaacaagaggguaaaucccucuacgucaaaggcgaacccaucaucaacuucuacgacccccucgucuuccccucugacgaguucgacgccagcauaucacaaguaaacgaaaagaucaaccaaucccucgcauucauucgcaaauccgacgaacuccuacacaacgucaacgccggaaaauccaccaccaacaucaugaucacuacuaucauuaucgucaucaucgucauccuccucucccucaucgcagucggccuucuacucuacugcaaggcacgcucuacacccguaacccugucuaaagaccaacucuccggcaucaacaacaucgcuuucuccaacuaaggacuaguggaagcauuuuccuggcugauuaaaagaaauuacucagcuauggucaucuguuccuguuagaaggcuaugcagcauauuauauacuaugcgcauguuaugaaaugcauaauaaaaaauuuuaaaaaaucuaaaagaucuaaaaaaaaaaaaaaaaaaaaaaaaaaaaaaaaaaaaaaaaaaaaaaaaaaaaaaaaaaaaaaaaugcaucccccccccccccccccccccccccccccccaaaggcucuuuucagagccaccagaauu

SEQ ID NO: 6907 - RNA, 1983 nt, Artificial Sequence
  mRNA product Design c-3 comprising derived and/or modified sequence from HRSV(A2)__F_DSCav1_mut7 (opt1)
gggagaguccgcucagccagguugcagaagcggcuuagcguguguccuaaucuucucucugcguguagguaggccugugccgcaaacaagcuuaccauggagcugcucauccugaaggccaacgccaucaccaccauccugacggcggugaccuucugcuucgccagcggccagaacaucaccgaggaguucuaccaguccacgugcagcgccgucuccaagggguaccucagcgcccugcggaccggcugguacaccuccgugaucaccaucgagcugagcaacaucaaggagaacaagugcaacgggaccgacgccaaggugaagcucaucaagcaggagcuggacaaguacaagaacgcggucacggagcugcagaugcugaugugcuccaccccggcaaccggcuccggcuccgccaucgcgagcggcgucgccgugugcaaggugcugcaccucgagggggaggucaacaagaucaagagcgcccugcuguccaccaacaaggccguggugagccucuccaacggcgucagcgugcugaccuucaaggugcuggaccucaagaacuacaucgacaagcagcugcugcccauccugaacaagcagagcugcuccaucagcaacaucgagacggugauggaguuccagcagaagaacaaccggcuccuggagaucacccgcgaguucagcgugaacgccggggucaccacccccguguccacguacaugcugaccaacagcgagcuccugucccugaucaacgacaugccgaucaccaacgaccagaagaagcucaugagcaacaacgugcagaucguccggcagcaguccuacagcaucaugugcaucaucaaggaggaggugcuggcguacgugguccagcugccccucuacggcgugaucgacacccccugcuggaagcugcacacgagcccccugugcaccaccaacaccaaggagggguccaacaucugccucacgcgcaccgaccggggcugguacugcgacaacgccggcagcgucuccuucuucccgcaggccgagaccugcaaggugugcagcaaccgcguguucugcgacaccaugaacucccugacgcugcccagcgagguaaaccucugcaacgucgacaucuucaaccccaaguacgacugcaagaucaugaccuccaagaccgacgugagcuccagcgugaucaccucccugggggccaucgucagcugcuacggcaagacgaagugcaccgccagcaacaagaacaaggggaucaucaagaccuucuccaacggcugcgacuacgugagcaacaagggcguggacaccguguccgucgggaacacccuguacuacgugaacaagcaggagggcaagagccucuacgugaagggggagcccaucaucaacuucuacgacccgcuggucuuccccuccgacgaguucgacgcgagcaucucccaggugaacgagaagaucaaccagagccuggccuucauccgcaaguccgacgagcugcuccacaacgugaacgccggcaagagcacgaccaacaucaugaucaccaccaucaucaucgucaucaucgugauccugcugucccucaucgccguggggcugcugcucuacugcaaggcccggagcacgcccgucacccuguccaaggaccagcugagcggcaucaacaacaucgcguucuccaacugaggacuaguacuggcugcaucucccuuuccucuguccuccauccuucucccaggauggugaagggggaccugguacccagugauccccaccccaggauccuaaaucaugacuuaccugcuaauaaaaacucauuggaaaagugagaagaucuaaaaaaaaaaaaaaaaaaaaaaaaaaaaaaaaaaaaaaaaaaaaaaaaaaaaaaaaaaaaaaaaugcaucccccccccccccccccccccccccccccccaaaggcucuuuucagagccaccagaauu

SEQ ID NO: 6908 - RNA, 1983 nt, Artificial Sequence
  mRNA product Design c-3 comprising derived and/or modified sequence from HRSV(A2)__F_DSCav1_mut7 (opt1)
gggagaguccgcucagccagguugcagaagcggcuuagcguguguccuaaucuucucucugcguguagguaggccugugccgcaaacaagcuuaccauggagcugcucauccugaaggccaacgccaucaccaccauccugacggcggugaccuucugcuucgccagcggccagaacaucaccgaggaguucuaccaguccacgugcagcgccgucuccaagggguaccucagcgcccugcgcaccggcugguacaccuccgugaucaccaucgagcugagcaacaucaaggagaacaagugcaacgggaccgacgccaaggugaagcucaucaagcaggagcuggacaaguacaagaacgcggucacggagcugcagaugcucaugugcuccacccccgccaccggcagcggguccgccaucgccagcggcguggcggugugcaagguccugcaccuggagggcgaggugaacaagaucaaguccgcccuccugagcaccaacaaggccguggucucccugagcaacgggguguccgugcucacguucaagguccuggaccugaagaacuacaucgacaagcagcuccugccgauccugaacaagcagagcugcuccaucagcaacaucgagaccgugauggaguuccagcagaagaacaaccggcuccuggagaucacccgcgaguucuccgugaacgccggcgucaccacgcccgugagcaccuacaugcugaccaacagcgagcuccugucccugaucaacgacaugcccaucaccaacgaccagaagaagcucaugagcaacaacgugcagaucguccggcagcaguccuacagcaucaugugcaucaucaaggaggaggugcuggccuacgugguccagcugccccucuacggggugaucgacacgccgugcuggaagcugcacaccagcccccugugcaccaccaacacgaaggagggcagcaacaucugccucacccgcaccgaccgggggugguacugcgacaacgcgggcuccgugagcuucuucccccaggccgagaccugcaaggucugcuccaaccgcguguucugcgacacgaugaacagccugacccugcccuccgaggucaaccucugcaacguggacaucuucaacccgaaguacgacugcaagaucaugaccagcaagaccgacguguccagcuccgucaucacgagccugggcgccaucguguccugcuacgggaagaccaagugcaccgccagcaacaagaacaagggcaucaucaagaccuucuccaacgggugcgacuacgugagcaacaagggcgucgacacggugagcgugggcaacacccuguacuacgucaacaagcaggaggggaagucccucuacgugaagggcgagcccaucaucaacuucuacgacccccugguguuccccagcgacgaguucgacgccuccaucagccaggucaacgagaagaucaaccagucccuggcguucauccggaaguccgacgagcuccugcacaacgugaacgccgggaaguccaccaccaacaucaugaucaccacgaucaucaucgugaucaucgucauccugcucagccugaucgccgugggccugcuccuguacugcaaggcccgcuccaccccggugacccugagcaaggaccagcuguccgggaucaacaacaucgccuucagcaacugaggacuaguacuggcugcaucucccuuuccucuguccuccauccuucucccaggauggugaagggggaccugguacccagugauccccaccccaggauccuaaaucaugacuuaccugcuaauaaaaacucauuggaaaagugagaagaucuaaaaaaaaaaaaaaaaaaaaaaaaaaaaaaaaaaaaaaaaaaaaaaaaaaaaaaaaaaaaaaaaugcaucccccccccccccccccccccccccccccccaaaggcucuuuucagagccaccagaauu

SEQ ID NO: 6909 - RNA, 1983 nt, Artificial Sequence
  mRNA product Design c-3 comprising derived and/or modified sequence from HRSV(A2)__F_DSCav1_mut7 (opt2)
gggagaguccgcucagccagguugcagaagcggcuuagcguguguccuaaucuucucucugcguguagguaggccugugccgcaaacaagcuuaccauggagcuccucauccucaaggccaacgccaucaccaccauccucaccgccgucaccuucugcuucgccuccggccagaacaucaccgaggaguucuaccaguccaccugcuccgccgucuccaagggcuaccucuccgcccuccgcaccggcugguacaccuccgucaucaccaucgagcucuccaacaucaaggagaacaagugcaacggcaccgacgccaaggucaagcucaucaagcaggagcucgacaaguacaagaacgccgucaccgagcuccagaugcucaugugcuccacccccgccaccggcuccggcuccgccaucgccuccggcgucgccgucugcaagguccuccaccucgagggcgaggucaacaagaucaaguccgcccuccucuccaccaacaaggccgucgucucccucuccaacggcgucuccguccucaccuucaagguccucgaccucaagaacuacaucgacaagcagcuccuccccauccucaacaagcaguccugcuccaucuccaacaucgagaccgucauggaguuccagcagaagaacaaccgccuccucgagaucacccgcgaguucuccgucaacgccggcgucaccacccccgucuccaccuacaugcucaccaacuccgagcuccucucccucaucaacgacaugcccaucaccaacgaccagaagaagcucauguccaacaacguccagaucguccgccagcaguccuacuccaucaugugcaucaucaaggaggagguccucgccuacgucguccagcucccccucuacggcgucaucgacacccccugcuggaagcuccacaccuccccccucugcaccaccaacaccaaggagggcuccaacaucugccucacccgcaccgaccgcggcugguacugcgacaacgccggcuccgucuccuucuucccccaggccgagaccugcaaggucugcuccaaccgcgucuucugcgacaccaugaacucccucacccuccccuccgaggucaaccucugcaacgucgacaucuucaaccccaaguacgacugcaagaucaugaccuccaagaccgacgucuccuccuccgucaucaccucccucggcgccaucgucuccugcuacggcaagaccaagugcaccgccuccaacaagaacaagggcaucaucaagaccuucuccaacggcugcgacuacgucuccaacaagggcgucgacaccgucuccgucggcaacacccucuacuacgucaacaagcaggagggcaagucccucuacgucaagggcgagcccaucaucaacuucuacgacccccucgucuuccccuccgacgaguucgacgccuccaucucccaggucaacgagaagaucaaccagucccucgccuucauccgcaaguccgacgagcuccuccacaacgucaacgccggcaaguccaccaccaacaucaugaucaccaccaucaucaucgucaucaucgucauccuccucucccucaucgccgucggccuccuccucuacugcaaggcccgcuccacccccgucacccucuccaaggaccagcucuccggcaucaacaacaucgccuucuccaacugaggacuaguacuggcugcaucucccuuuccucuguccuccauccuucucccaggauggugaagggggaccugguacccagugauccccaccccaggauccuaaaucaugacuuaccugcuaauaaaaacucauuggaaaagugagaagaucuaaaaaaaaaaaaaaaaaaaaaaaaaaaaaaaaaaaaaaaaaaaaaaaaaaaaaaaaaaaaaaaaugcaucccccccccccccccccccccccccccccccaaaggcucuuuucagagccaccagaauu

SEQ ID NO: 6910 - RNA, 1983 nt, Artificial Sequence
  mRNA product Design c-3 comprising derived and/or modified sequence from HRSV(A2)__F_DSCav1_mut7 (opt3)
gggagaguccgcucagccagguugcagaagcggcuuagcguguguccuaaucuucucucugcguguagguaggccugugccgcaaacaagcuuaccauggagcugcucauccuuaaggccaacgcuauuaccacaauacugacugcagugacguucugcuuugccagcggccagaauaucaccgaagaguucuaccaauccacauguucugcggucucaaaaggguauuugagugcuuuaagaacuggaugguacaccagcguuauuacaaucgaacuguccaacauuaaggagaauaaaugcaacgguaccgacgccaaggugaaacuaaucaagcaggaacucgauaaguauaaaaaugcaguaacugagcugcagaugcuuauguguucuacacccgccaccggcucggggucagcuauagcaagcggaguggccgucugcaaggugcugcacuuggagggcgaaguuaacaaaaucaagagugcucuccuguccacgaauaaagccguggucucucugagcaacgguguguccguacucacuuuuaagguuuuagaccugaagaauuacauugauaaacagcuuuugccuauccugaacaagcaaucauguaguauuagcaauaucgagaccgugauggaguuccagcagaaaaacaauaggcuacucgaaauaacacgggaguuuucugucaacgcgggggugacuaccccaguguccacauauaugcugaccaauucagaacuucugagcuugauuaacgacaugccgaucacgaacgaucagaagaaacucaugaguaauaacguccaaauuguucgccagcagucuuacuccaucaugugcaucauuaaggaggaagugcuggcauauguagugcaguuaccccuguacggagucauagacacuccuuguuggaaacuccauacaagcccacuuugcaccacuaauacaaaggagggcucgaacaucugucugacccgaacggaucguggcugguacugcgacaaugccgggucuguguccuucuuuccccaagcugaaaccuguaagguuugcucaaacagaguguucugcgauacaaugaauaguuugacucuaccuagcgaggucaaccuguguaauguggacauuuuuaacccaaaauaugauugcaagaucaugaccuccaaaacagacguaucuagcucaguuauaacuagccucggagccauuguguccuguuacgguaagaccaaaugcacagcaagcaauaagaacaagggcaucaucaaaaccuucucuaaugggugugauuaugucucaaacaagggaguggacacugucagugugggcaauacgcuguacuauguuaacaaacaggaggguaagagccuuuacgugaaaggggaacccauuaucaacuuuuaugacccucugguauucccauccgaugaguuugacgcuucuauuucgcaggucaaugaaaagauaaaccaaaguuuggccuucaucaggaaguccgaugagcuccugcacaaugugaacgcgggaaaaucaacaaccaauauuaugaucacuaccaucauuauaguuaucauugugaucuuacugagucuaauugccgucggccuccugcuuuacugcaaggcacggucuacaccggugaccuugagcaaagaccagcuguccggcaucaacaauauagcuuucucaaacugaggacuaguacuggcugcaucucccuuuccucuguccuccauccuucucccaggauggugaagggggaccugguacccagugauccccaccccaggauccuaaaucaugacuuaccugcuaauaaaaacucauuggaaaagugagaagaucuaaaaaaaaaaaaaaaaaaaaaaaaaaaaaaaaaaaaaaaaaaaaaaaaaaaaaaaaaaaaaaaaugcaucccccccccccccccccccccccccccccccaaaggcucuuuucagagccaccagaauu

SEQ ID NO: 6911 - RNA, 1983 nt, Artificial Sequence
  mRNA product Design c-3 comprising derived and/or modified sequence from HRSV(A2)__F_DSCav1_mut7 (opt4)
gggagaguccgcucagccagguugcagaagcggcuuagcguguguccuaaucuucucucugcguguagguaggccugugccgcaaacaagcuuaccauggagcugcugauccugaaggccaacgccaucaccaccauccugaccgccgugaccuucugcuucgccagcggccagaacaucaccgaggaguucuaccagagcaccugcagcgccgugagcaagggcuaccugagcgcccugagaaccggcugguacaccagcgugaucaccaucgagcugagcaacaucaaggagaacaagugcaacggcaccgacgccaaggugaagcugaucaagcaggagcuggacaaguacaagaacgccgugaccgagcugcagaugcugaugugcagcacccccgccaccggcagcggcagcgccaucgccagcggcguggccgugugcaaggugcugcaccuggagggcgaggugaacaagaucaagagcgcccugcugagcaccaacaaggccguggugagccugagcaacggcgugagcgugcugaccuucaaggugcuggaccugaagaacuacaucgacaagcagcugcugcccauccugaacaagcagagcugcagcaucagcaacaucgagaccgugauggaguuccagcagaagaacaacagacugcuggagaucaccagagaguucagcgugaacgccggcgugaccacccccgugagcaccuacaugcugaccaacagcgagcugcugagccugaucaacgacaugcccaucaccaacgaccagaagaagcugaugagcaacaacgugcagaucgugagacagcagagcuacagcaucaugugcaucaucaaggaggaggugcuggccuacguggugcagcugccccuguacggcgugaucgacacccccugcuggaagcugcacaccagcccccugugcaccaccaacaccaaggagggcagcaacaucugccugaccagaaccgacagaggcugguacugcgacaacgccggcagcgugagcuucuucccccaggccgagaccugcaaggugugcagcaacagaguguucugcgacaccaugaacagccugacccugcccagcgaggugaaccugugcaacguggacaucuucaaccccaaguacgacugcaagaucaugaccagcaagaccgacgugagcagcagcgugaucaccagccugggcgccaucgugagcugcuacggcaagaccaagugcaccgccagcaacaagaacaagggcaucaucaagaccuucagcaacggcugcgacuacgugagcaacaagggcguggacaccgugagcgugggcaacacccuguacuacgugaacaagcaggagggcaagagccuguacgugaagggcgagcccaucaucaacuucuacgacccccugguguuccccagcgacgaguucgacgccagcaucagccaggugaacgagaagaucaaccagagccuggccuucaucagaaagagcgacgagcugcugcacaacgugaacgccggcaagagcaccaccaacaucaugaucaccaccaucaucaucgugaucaucgugauccugcugagccugaucgccgugggccugcugcuguacugcaaggccagaagcacccccgugacccugagcaaggaccagcugagcggcaucaacaacaucgccuucagcaacugaggacuaguacuggcugcaucucccuuuccucuguccuccauccuucucccaggauggugaagggggaccugguacccagugauccccaccccaggauccuaaaucaugacuuaccugcuaauaaaaacucauuggaaaagugagaagaucuaaaaaaaaaaaaaaaaaaaaaaaaaaaaaaaaaaaaaaaaaaaaaaaaaaaaaaaaaaaaaaaaugcaucccccccccccccccccccccccccccccccaaaggcucuuuucagagccaccagaauu

SEQ ID NO: 6912 - RNA, 1983 nt, Artificial Sequence
  mRNA product Design c-3 comprising derived and/or modified sequence from HRSV(A2)__F_DSCav1_mut7 (opt5)
gggagaguccgcucagccagguugcagaagcggcuuagcguguguccuaaucuucucucugcguguagguaggccugugccgcaaacaagcuuaccauggagcugcucauccugaaggccaacgcuauuaccacaauccuuacggccgugaccuucugcuuugcgagcggccagaauauuacagaagaguucuaccaauccaccuguucugcugucagcaaaggguaucuguccgcccucagaacaggaugguacaccucuguuaucacaauugaacugagcaacaucaaggagaauaaaugcaacggcaccgacgccaaggugaaacuuaucaagcaggaacuggauaaguauaaaaaugcugugacggagcuccagaugcugauguguuccacccccgccacagggucuggaagcgcuauugccuccggcgucgcggugugcaagguucugcaccucgagggggaagugaacaaaaucaagagcgcccugcuuucuaccaauaaagcugucgugucccugagcaacggaguuucugugcucacauuuaagguccuggaccuuaagaauuacauugauaaacagcugcucccuauccugaacaagcaauccuguagcauuucuaauaucgagaccgugauggaguuccagcagaaaaacaaucggcugcucgaaauuacgcgcgaguuuuccgugaacgccggcgucacaaccccgguuagcacauauaugcugaccaauuccgaacuucugucucucaucaacgacaugcccaucaccaacgaucagaagaaacugaugagcaauaacgugcaaauugugagacagcaguccuacagcaucaugugcauuaucaaggaggaaguccuugcuuaugugguucagcugccucucuacggcgugauugacacacccuguuggaaacugcauacgucuccucugugcaccacaaauaccaaggagggguccaacaucugucucacacggaccgaucgcggaugguacugcgacaaugccggcagcgucucuuucuuuccccaagcggaaacguguaaggugugcagcaacagaguuuucugcgauacaaugaacucccugacccuuccuucugaggugaaucuguguaaugucgacaucuuuaacccgaaauaugauugcaagauuaugaccagcaaaacagacguguccagcucugucaucaccucccucggggccauugugagcuguuacggaaagacaaaaugcacggcuucuaauaagaacaagggcaucauuaaaaccuucuccaaugggugugauuauguuagcaacaagggaguggacacagucuccgugggcaauacccuguacuauguuaacaaacaggagggcaagucucuuuacgugaaaggggaacccaucaucaacuuuuaugacccucuggucuuccccagcgaugaguuugacgccuccauuucucaggugaaugaaaagaucaaccaaagccucgcuuucauucggaaguccgaugagcugcugcacaaugugaacgccggaaaaagcacaaccaauaucaugauuacgaccaucauuaucguuaucauugucauccuccugucucuuauugccgugggccugcuccuguacugcaaggcucgcuccacaccugugacccugagcaaagaccagcuuucugggaucaacaauauugcguucuccaacugaggacuaguacuggcugcaucucccuuuccucuguccuccauccuucucccaggauggugaagggggaccugguacccagugauccccaccccaggauccuaaaucaugacuuaccugcuaauaaaaacucauuggaaaagugagaagaucuaaaaaaaaaaaaaaaaaaaaaaaaaaaaaaaaaaaaaaaaaaaaaaaaaaaaaaaaaaaaaaaaugcaucccccccccccccccccccccccccccccccaaaggcucuuuucagagccaccagaauu

SEQ ID NO: 6913 - RNA, 1983 nt, Artificial Sequence
  mRNA product Design c-3 comprising derived and/or modified sequence from HRSV(A2)__F_DSCav1_mut7 (opt6)
gggagaguccgcucagccagguugcagaagcggcuuagcguguguccuaaucuucucucugcguguagguaggccugugccgcaaacaagcuuaccauggaauuacucauacucaaagcaaaugcaauuaccacuauacucacagcuguaacuuuuuguuucgccucaggacaaaacaucacagaagaauuuuaucaauccacaugcucugccguaucaaaaggcuaccuaucugcccuaagaacagguugguacacaucuguaauaacaaucgaauuauccaacaucaaagaaaacaaaugcaacggcacagacgcaaaagucaaacucaucaaacaagaauuagauaaauauaaaaacgcaguaacagaacuacaaaugcuaaugugcucuacacccgccacaggaucaggauccgcaaucgcuucuggaguagccguuugcaaaguauuacaccuagaaggagaaguaaauaaaauaaaauccgcacuacuaucaacuaauaaagcaguaguaucacuuucuaaugguguaucaguauuaacauucaaaguccucgaccuaaaaaauuacaucgacaaacaacuauuacccauccuuaauaaacaaucaugcuccauaucaaacauagaaacugucauggaauuucaacaaaaaaacaauagacuucuagaaaucacaagagaauuuucuguaaaugcaggaguaacuacaccaguaucaacauauauguuaaccaacuccgaacuacuaucacucauaaacgacaugccaauaacaaacgaccaaaaaaaacuaaugucaaauaacguucaaauaguaagacaacaaucauacucaaucaugugcauaauaaaagaagaaguuuuagcauacgucguacaacuuccccuauacggaguaauagacaccccuugcuggaaacuccacaccucaccacuaugcacuacaaacacaaaagaagguuccaacaucugcuuaacaagaaccgaucgaggaugguacugcgacaacgcugguuccguaucuuucuucccacaagcagaaacaugcaaaguaugcuccaauagaguauucugcgacaccaugaacucacuaacucuaccauccgaaguaaaccuaugcaacgucgacauauuuaauccaaaauaugacugcaaaauaaugacuucaaaaacagacguauccucaucaguaauaacauccuuaggagcaauaguaucauguuacggcaagacaaaauguacagccucaaacaaaaacaaagguaucauuaaaaccuucuccaacggcugcgacuacguaucaaauaaaggugucgauacaguaucaguaggaaacacacucuauuacguuaauaaacaagaaggaaagucauuauacguaaaaggagaaccaauaaucaauuucuacgauccccuagucuuucccucagaugaauuugacgcaagcaucucucaagucaacgaaaaaauaaaccaaucccuagccuucauaagaaaaucagaugaacuacuucauaacgucaacgccggaaaaucaacaaccaacauaaugaucacuacaaucauaauuguaauuauaguaauacuacuaucgcuaauugccguuggacuacuacuauauuguaaagcaagaucaacacccguuacucuauccaaagaucaauuaucaggaaucaacaacauagccuucucaaauuaaggacuaguacuggcugcaucucccuuuccucuguccuccauccuucucccaggauggugaagggggaccugguacccagugauccccaccccaggauccuaaaucaugacuuaccugcuaauaaaaacucauuggaaaagugagaagaucuaaaaaaaaaaaaaaaaaaaaaaaaaaaaaaaaaaaaaaaaaaaaaaaaaaaaaaaaaaaaaaaaugcaucccccccccccccccccccccccccccccccaaaggcucuuuucagagccaccagaauu

SEQ ID NO: 6914 - RNA, 1983 nt, Artificial Sequence
  mRNA product Design c-3 comprising derived and/or modified sequence from HRSV(A2)__F_DSCav1_mut7 (opt11)
gggagaguccgcucagccagguugcagaagcggcuuagcguguguccuaaucuucucucugcguguagguaggccugugccgcaaacaagcuuaccauggaacuacucauacuuaaagccaacgcaauaaccacaauccucaccgccgucacauucugcuucgccucgggacaaaacauaaccgaagaauuuuaccagucuaccugcuccgccgucuccaaggguuaccucuccgcgcuccgcaccgggugguacaccagcguuaucaccaucgaacuaucuaacauaaaagaaaacaagugcaacggaaccgacgcaaaagucaaacucaucaaacaagaacuagacaaauacaagaaugccgucaccgaacuacaaaugcucaugugcuccacccccgccaccggauccggcuccgccauugccuccggcgucgccguaugcaaaguccuucacuuggaaggagaaguuaacaaaauaaaaagcgcccuccugucgaccaacaaagcgguggucagccucuccaacggcgucucuguccucaccuucaaaguccucgaccucaagaacuacauagauaaacaacuacuccccauccuaaacaaacagucaugcagcauauccaacaucgaaaccgucauggaguuccaacagaaaaacaaccgccuccuugaaaucacccgcgaguucucugucaacgccggcgucaccacccccgucuccaccuacaugcucacaaacuccgaacuccucagccucaucaacgacaugccaaucaccaacgaccaaaagaaacucauguccaacaacguacaaaucguucgucaacaaucauacucaaucaugugcaucauuaaagaagaaguccucgcauacgucguccaacucccccucuauggggucaucgacaccccaugcuggaaacuccacaccucuccccuaugcaccaccaacaccaaagaaggcuccaacaucugccuaacccgaaccgaccgcggaugguacugcgacaacgccggcuccgucuccuucuucccccaggccgaaacauguaaagucugcuccaaccguguguucugcgacaccaugaacucacuaacccuccccuccgaagucaaccucugcaacgucgacaucuucaacccgaaauacgacugcaaaauaaugaccagcaaaacagacguauccucuagcgucauuaccagccuaggugcaaucguguccugcuacggcaaaacaaaaugcaccgccuccaacaaaaauaaaggaaucauaaaaaccuucuccaacggcugcgacuacgucagcaacaaaggagucgacaccgucuccguaggaaauacucuauacuaugucaacaaacaagaggguaaaucccucuacgucaaaggcgaacccaucaucaacuucuacgacccccucgucuuccccucugacgaguucgacgccagcauaucacaaguaaacgaaaagaucaaccaaucccucgcauucauucgcaaauccgacgaacuccuacacaacgucaacgccggaaaauccaccaccaacaucaugaucacuacuaucauuaucgucaucaucgucauccuccucucccucaucgcagucggccuucuacucuacugcaaggcacgcucuacacccguaacccugucuaaagaccaacucuccggcaucaacaacaucgcuuucuccaacuaaggacuaguacuggcugcaucucccuuuccucuguccuccauccuucucccaggauggugaagggggaccugguacccagugauccccaccccaggauccuaaaucaugacuuaccugcuaauaaaaacucauuggaaaagugagaagaucuaaaaaaaaaaaaaaaaaaaaaaaaaaaaaaaaaaaaaaaaaaaaaaaaaaaaaaaaaaaaaaaaugcaucccccccccccccccccccccccccccccccaaaggcucuuuucagagccaccagaauu

SEQ ID NO: 6915 - RNA, 1979 nt, Artificial Sequence
  mRNA product Design c-4 comprising derived and/or modified sequence from HRSV(A2)__F_DSCav1_mut7 (opt1)
gggagaguccgcucagccagguugcagaagcggcuuagcguguguccuaaucuucucucugcguguagguaggccugugccgcaaacaagcuuaccauggagcugcucauccugaaggccaacgccaucaccaccauccugacggcggugaccuucugcuucgccagcggccagaacaucaccgaggaguucuaccaguccacgugcagcgccgucuccaagggguaccucagcgcccugcggaccggcugguacaccuccgugaucaccaucgagcugagcaacaucaaggagaacaagugcaacgggaccgacgccaaggugaagcucaucaagcaggagcuggacaaguacaagaacgcggucacggagcugcagaugcugaugugcuccaccccggcaaccggcuccggcuccgccaucgcgagcggcgucgccgugugcaaggugcugcaccucgagggggaggucaacaagaucaagagcgcccugcuguccaccaacaaggccguggugagccucuccaacggcgucagcgugcugaccuucaaggugcuggaccucaagaacuacaucgacaagcagcugcugcccauccugaacaagcagagcugcuccaucagcaacaucgagacggugauggaguuccagcagaagaacaaccggcuccuggagaucacccgcgaguucagcgugaacgccggggucaccacccccguguccacguacaugcugaccaacagcgagcuccugucccugaucaacgacaugccgaucaccaacgaccagaagaagcucaugagcaacaacgugcagaucguccggcagcaguccuacagcaucaugugcaucaucaaggaggaggugcuggcguacgugguccagcugccccucuacggcgugaucgacacccccugcuggaagcugcacacgagcccccugugcaccaccaacaccaaggagggguccaacaucugccucacgcgcaccgaccggggcugguacugcgacaacgccggcagcgucuccuucuucccgcaggccgagaccugcaaggugugcagcaaccgcguguucugcgacaccaugaacucccugacgcugcccagcgagguaaaccucugcaacgucgacaucuucaaccccaaguacgacugcaagaucaugaccuccaagaccgacgugagcuccagcgugaucaccucccugggggccaucgucagcugcuacggcaagacgaagugcaccgccagcaacaagaacaaggggaucaucaagaccuucuccaacggcugcgacuacgugagcaacaagggcguggacaccguguccgucgggaacacccuguacuacgugaacaagcaggagggcaagagccucuacgugaagggggagcccaucaucaacuucuacgacccgcuggucuuccccuccgacgaguucgacgcgagcaucucccaggugaacgagaagaucaaccagagccuggccuucauccgcaaguccgacgagcugcuccacaacgugaacgccggcaagagcacgaccaacaucaugaucaccaccaucaucaucgucaucaucgugauccugcugucccucaucgccguggggcugcugcucuacugcaaggcccggagcacgcccgucacccuguccaaggaccagcugagcggcaucaacaacaucgcguucuccaacugaggacuaguggaagcauuuuccuggcugauuaaaagaaauuacucagcuauggucaucuguuccuguuagaaggcuaugcagcauauuauauacuaugcgcauguuaugaaaugcauaauaaaaaauuuuaaaaaaucuaaaagaucuaaaaaaaaaaaaaaaaaaaaaaaaaaaaaaaaaaaaaaaaaaaaaaaaaaaaaaaaaaaaaaaaugcaucccccccccccccccccccccccccccccccaaaggcucuuuucagagccaccagaauu

SEQ ID NO: 6916 - RNA, 1979 nt, Artificial Sequence
  mRNA product Design c-4 comprising derived and/or modified sequence from HRSV(A2)__F_DSCav1_mut7 (opt1)
gggagaguccgcucagccagguugcagaagcggcuuagcguguguccuaaucuucucucugcguguagguaggccugugccgcaaacaagcuuaccauggagcugcucauccugaaggccaacgccaucaccaccauccugacggcggugaccuucugcuucgccagcggccagaacaucaccgaggaguucuaccaguccacgugcagcgccgucuccaagggguaccucagcgcccugcgcaccggcugguacaccuccgugaucaccaucgagcugagcaacaucaaggagaacaagugcaacgggaccgacgccaaggugaagcucaucaagcaggagcuggacaaguacaagaacgcggucacggagcugcagaugcucaugugcuccacccccgccaccggcagcggguccgccaucgccagcggcguggcggugugcaagguccugcaccuggagggcgaggugaacaagaucaaguccgcccuccugagcaccaacaaggccguggucucccugagcaacgggguguccgugcucacguucaagguccuggaccugaagaacuacaucgacaagcagcuccugccgauccugaacaagcagagcugcuccaucagcaacaucgagaccgugauggaguuccagcagaagaacaaccggcuccuggagaucacccgcgaguucuccgugaacgccggcgucaccacgcccgugagcaccuacaugcugaccaacagcgagcuccugucccugaucaacgacaugcccaucaccaacgaccagaagaagcucaugagcaacaacgugcagaucguccggcagcaguccuacagcaucaugugcaucaucaaggaggaggugcuggccuacgugguccagcugccccucuacggggugaucgacacgccgugcuggaagcugcacaccagcccccugugcaccaccaacacgaaggagggcagcaacaucugccucacccgcaccgaccgggggugguacugcgacaacgcgggcuccgugagcuucuucccccaggccgagaccugcaaggucugcuccaaccgcguguucugcgacacgaugaacagccugacccugcccuccgaggucaaccucugcaacguggacaucuucaacccgaaguacgacugcaagaucaugaccagcaagaccgacguguccagcuccgucaucacgagccugggcgccaucguguccugcuacgggaagaccaagugcaccgccagcaacaagaacaagggcaucaucaagaccuucuccaacgggugcgacuacgugagcaacaagggcgucgacacggugagcgugggcaacacccuguacuacgucaacaagcaggaggggaagucccucuacgugaagggcgagcccaucaucaacuucuacgacccccugguguuccccagcgacgaguucgacgccuccaucagccaggucaacgagaagaucaaccagucccuggcguucauccggaaguccgacgagcuccugcacaacgugaacgccgggaaguccaccaccaacaucaugaucaccacgaucaucaucgugaucaucgucauccugcucagccugaucgccgugggccugcuccuguacugcaaggcccgcuccaccccggugacccugagcaaggaccagcuguccgggaucaacaacaucgccuucagcaacugaggacuaguggaagcauuuuccuggcugauuaaaagaaauuacucagcuauggucaucuguuccuguuagaaggcuaugcagcauauuauauacuaugcgcauguuaugaaaugcauaauaaaaaauuuuaaaaaaucuaaaagaucuaaaaaaaaaaaaaaaaaaaaaaaaaaaaaaaaaaaaaaaaaaaaaaaaaaaaaaaaaaaaaaaaugcaucccccccccccccccccccccccccccccccaaaggcucuuuucagagccaccagaauu

SEQ ID NO: 6917 - RNA, 1979 nt, Artificial Sequence
  mRNA product Design c-4 comprising derived and/or modified sequence from HRSV(A2)__F_DSCav1_mut7 (opt2)
gggagaguccgcucagccagguugcagaagcggcuuagcguguguccuaaucuucucucugcguguagguaggccugugccgcaaacaagcuuaccauggagcuccucauccucaaggccaacgccaucaccaccauccucaccgccgucaccuucugcuucgccuccggccagaacaucaccgaggaguucuaccaguccaccugcuccgccgucuccaagggcuaccucuccgcccuccgcaccggcugguacaccuccgucaucaccaucgagcucuccaacaucaaggagaacaagugcaacggcaccgacgccaaggucaagcucaucaagcaggagcucgacaaguacaagaacgccgucaccgagcuccagaugcucaugugcuccacccccgccaccggcuccggcuccgccaucgccuccggcgucgccgucugcaagguccuccaccucgagggcgaggucaacaagaucaaguccgcccuccucuccaccaacaaggccgucgucucccucuccaacggcgucuccguccucaccuucaagguccucgaccucaagaacuacaucgacaagcagcuccuccccauccucaacaagcaguccugcuccaucuccaacaucgagaccgucauggaguuccagcagaagaacaaccgccuccucgagaucacccgcgaguucuccgucaacgccggcgucaccacccccgucuccaccuacaugcucaccaacuccgagcuccucucccucaucaacgacaugcccaucaccaacgaccagaagaagcucauguccaacaacguccagaucguccgccagcaguccuacuccaucaugugcaucaucaaggaggagguccucgccuacgucguccagcucccccucuacggcgucaucgacacccccugcuggaagcuccacaccuccccccucugcaccaccaacaccaaggagggcuccaacaucugccucacccgcaccgaccgcggcugguacugcgacaacgccggcuccgucuccuucuucccccaggccgagaccugcaaggucugcuccaaccgcgucuucugcgacaccaugaacucccucacccuccccuccgaggucaaccucugcaacgucgacaucuucaaccccaaguacgacugcaagaucaugaccuccaagaccgacgucuccuccuccgucaucaccucccucggcgccaucgucuccugcuacggcaagaccaagugcaccgccuccaacaagaacaagggcaucaucaagaccuucuccaacggcugcgacuacgucuccaacaagggcgucgacaccgucuccgucggcaacacccucuacuacgucaacaagcaggagggcaagucccucuacgucaagggcgagcccaucaucaacuucuacgacccccucgucuuccccuccgacgaguucgacgccuccaucucccaggucaacgagaagaucaaccagucccucgccuucauccgcaaguccgacgagcuccuccacaacgucaacgccggcaaguccaccaccaacaucaugaucaccaccaucaucaucgucaucaucgucauccuccucucccucaucgccgucggccuccuccucuacugcaaggcccgcuccacccccgucacccucuccaaggaccagcucuccggcaucaacaacaucgccuucuccaacugaggacuaguggaagcauuuuccuggcugauuaaaagaaauuacucagcuauggucaucuguuccuguuagaaggcuaugcagcauauuauauacuaugcgcauguuaugaaaugcauaauaaaaaauuuuaaaaaaucuaaaagaucuaaaaaaaaaaaaaaaaaaaaaaaaaaaaaaaaaaaaaaaaaaaaaaaaaaaaaaaaaaaaaaaaugcaucccccccccccccccccccccccccccccccaaaggcucuuuucagagccaccagaauu

SEQ ID NO: 6918 - RNA, 1979 nt, Artificial Sequence
  mRNA product Design c-4 comprising derived and/or modified sequence from HRSV(A2)__F_DSCav1_mut7 (opt3)
gggagaguccgcucagccagguugcagaagcggcuuagcguguguccuaaucuucucucugcguguagguaggccugugccgcaaacaagcuuaccauggagcugcucauccuuaaggccaacgcuauuaccacaauacugacugcagugacguucugcuuugccagcggccagaauaucaccgaagaguucuaccaauccacauguucugcggucucaaaaggguauuugagugcuuuaagaacuggaugguacaccagcguuauuacaaucgaacuguccaacauuaaggagaauaaaugcaacgguaccgacgccaaggugaaacuaaucaagcaggaacucgauaaguauaaaaaugcaguaacugagcugcagaugcuuauguguucuacacccgccaccggcucggggucagcuauagcaagcggaguggccgucugcaaggugcugcacuuggagggcgaaguuaacaaaaucaagagugcucuccuguccacgaauaaagccguggucucucugagcaacgguguguccguacucacuuuuaagguuuuagaccugaagaauuacauugauaaacagcuuuugccuauccugaacaagcaaucauguaguauuagcaauaucgagaccgugauggaguuccagcagaaaaacaauaggcuacucgaaauaacacgggaguuuucugucaacgcgggggugacuaccccaguguccacauauaugcugaccaauucagaacuucugagcuugauuaacgacaugccgaucacgaacgaucagaagaaacucaugaguaauaacguccaaauuguucgccagcagucuuacuccaucaugugcaucauuaaggaggaagugcuggcauauguagugcaguuaccccuguacggagucauagacacuccuuguuggaaacuccauacaagcccacuuugcaccacuaauacaaaggagggcucgaacaucugucugacccgaacggaucguggcugguacugcgacaaugccgggucuguguccuucuuuccccaagcugaaaccuguaagguuugcucaaacagaguguucugcgauacaaugaauaguuugacucuaccuagcgaggucaaccuguguaauguggacauuuuuaacccaaaauaugauugcaagaucaugaccuccaaaacagacguaucuagcucaguuauaacuagccucggagccauuguguccuguuacgguaagaccaaaugcacagcaagcaauaagaacaagggcaucaucaaaaccuucucuaaugggugugauuaugucucaaacaagggaguggacacugucagugugggcaauacgcuguacuauguuaacaaacaggaggguaagagccuuuacgugaaaggggaacccauuaucaacuuuuaugacccucugguauucccauccgaugaguuugacgcuucuauuucgcaggucaaugaaaagauaaaccaaaguuuggccuucaucaggaaguccgaugagcuccugcacaaugugaacgcgggaaaaucaacaaccaauauuaugaucacuaccaucauuauaguuaucauugugaucuuacugagucuaauugccgucggccuccugcuuuacugcaaggcacggucuacaccggugaccuugagcaaagaccagcuguccggcaucaacaauauagcuuucucaaacugaggacuaguggaagcauuuuccuggcugauuaaaagaaauuacucagcuauggucaucuguuccuguuagaaggcuaugcagcauauuauauacuaugcgcauguuaugaaaugcauaauaaaaaauuuuaaaaaaucuaaaagaucuaaaaaaaaaaaaaaaaaaaaaaaaaaaaaaaaaaaaaaaaaaaaaaaaaaaaaaaaaaaaaaaaugcaucccccccccccccccccccccccccccccccaaaggcucuuuucagagccaccagaauu

SEQ ID NO: 6919 - RNA, 1979 nt, Artificial Sequence
  mRNA product Design c-4 comprising derived and/or modified sequence from HRSV(A2)__F_DSCav1_mut7 (opt4)
gggagaguccgcucagccagguugcagaagcggcuuagcguguguccuaaucuucucucugcguguagguaggccugugccgcaaacaagcuuaccauggagcugcugauccugaaggccaacgccaucaccaccauccugaccgccgugaccuucugcuucgccagcggccagaacaucaccgaggaguucuaccagagcaccugcagcgccgugagcaagggcuaccugagcgcccugagaaccggcugguacaccagcgugaucaccaucgagcugagcaacaucaaggagaacaagugcaacggcaccgacgccaaggugaagcugaucaagcaggagcuggacaaguacaagaacgccgugaccgagcugcagaugcugaugugcagcacccccgccaccggcagcggcagcgccaucgccagcggcguggccgugugcaaggugcugcaccuggagggcgaggugaacaagaucaagagcgcccugcugagcaccaacaaggccguggugagccugagcaacggcgugagcgugcugaccuucaaggugcuggaccugaagaacuacaucgacaagcagcugcugcccauccugaacaagcagagcugcagcaucagcaacaucgagaccgugauggaguuccagcagaagaacaacagacugcuggagaucaccagagaguucagcgugaacgccggcgugaccacccccgugagcaccuacaugcugaccaacagcgagcugcugagccugaucaacgacaugcccaucaccaacgaccagaagaagcugaugagcaacaacgugcagaucgugagacagcagagcuacagcaucaugugcaucaucaaggaggaggugcuggccuacguggugcagcugccccuguacggcgugaucgacacccccugcuggaagcugcacaccagcccccugugcaccaccaacaccaaggagggcagcaacaucugccugaccagaaccgacagaggcugguacugcgacaacgccggcagcgugagcuucuucccccaggccgagaccugcaaggugugcagcaacagaguguucugcgacaccaugaacagccugacccugcccagcgaggugaaccugugcaacguggacaucuucaaccccaaguacgacugcaagaucaugaccagcaagaccgacgugagcagcagcgugaucaccagccugggcgccaucgugagcugcuacggcaagaccaagugcaccgccagcaacaagaacaagggcaucaucaagaccuucagcaacggcugcgacuacgugagcaacaagggcguggacaccgugagcgugggcaacacccuguacuacgugaacaagcaggagggcaagagccuguacgugaagggcgagcccaucaucaacuucuacgacccccugguguuccccagcgacgaguucgacgccagcaucagccaggugaacgagaagaucaaccagagccuggccuucaucagaaagagcgacgagcugcugcacaacgugaacgccggcaagagcaccaccaacaucaugaucaccaccaucaucaucgugaucaucgugauccugcugagccugaucgccgugggccugcugcuguacugcaaggccagaagcacccccgugacccugagcaaggaccagcugagcggcaucaacaacaucgccuucagcaacugaggacuaguggaagcauuuuccuggcugauuaaaagaaauuacucagcuauggucaucuguuccuguuagaaggcuaugcagcauauuauauacuaugcgcauguuaugaaaugcauaauaaaaaauuuuaaaaaaucuaaaagaucuaaaaaaaaaaaaaaaaaaaaaaaaaaaaaaaaaaaaaaaaaaaaaaaaaaaaaaaaaaaaaaaaugcaucccccccccccccccccccccccccccccccaaaggcucuuuucagagccaccagaauu

SEQ ID NO: 6920 - RNA, 1979 nt, Artificial Sequence
  mRNA product Design c-4 comprising derived and/or modified sequence from HRSV(A2)__F_DSCav1_mut7 (opt5)
gggagaguccgcucagccagguugcagaagcggcuuagcguguguccuaaucuucucucugcguguagguaggccugugccgcaaacaagcuuaccauggagcugcucauccugaaggccaacgcuauuaccacaauccuuacggccgugaccuucugcuuugcgagcggccagaauauuacagaagaguucuaccaauccaccuguucugcugucagcaaaggguaucuguccgcccucagaacaggaugguacaccucuguuaucacaauugaacugagcaacaucaaggagaauaaaugcaacggcaccgacgccaaggugaaacuuaucaagcaggaacuggauaaguauaaaaaugcugugacggagcuccagaugcugauguguuccacccccgccacagggucuggaagcgcuauugccuccggcgucgcggugugcaagguucugcaccucgagggggaagugaacaaaaucaagagcgcccugcuuucuaccaauaaagcugucgugucccugagcaacggaguuucugugcucacauuuaagguccuggaccuuaagaauuacauugauaaacagcugcucccuauccugaacaagcaauccuguagcauuucuaauaucgagaccgugauggaguuccagcagaaaaacaaucggcugcucgaaauuacgcgcgaguuuuccgugaacgccggcgucacaaccccgguuagcacauauaugcugaccaauuccgaacuucugucucucaucaacgacaugcccaucaccaacgaucagaagaaacugaugagcaauaacgugcaaauugugagacagcaguccuacagcaucaugugcauuaucaaggaggaaguccuugcuuaugugguucagcugccucucuacggcgugauugacacacccuguuggaaacugcauacgucuccucugugcaccacaaauaccaaggagggguccaacaucugucucacacggaccgaucgcggaugguacugcgacaaugccggcagcgucucuuucuuuccccaagcggaaacguguaaggugugcagcaacagaguuuucugcgauacaaugaacucccugacccuuccuucugaggugaaucuguguaaugucgacaucuuuaacccgaaauaugauugcaagauuaugaccagcaaaacagacguguccagcucugucaucaccucccucggggccauugugagcuguuacggaaagacaaaaugcacggcuucuaauaagaacaagggcaucauuaaaaccuucuccaaugggugugauuauguuagcaacaagggaguggacacagucuccgugggcaauacccuguacuauguuaacaaacaggagggcaagucucuuuacgugaaaggggaacccaucaucaacuuuuaugacccucuggucuuccccagcgaugaguuugacgccuccauuucucaggugaaugaaaagaucaaccaaagccucgcuuucauucggaaguccgaugagcugcugcacaaugugaacgccggaaaaagcacaaccaauaucaugauuacgaccaucauuaucguuaucauugucauccuccugucucuuauugccgugggccugcuccuguacugcaaggcucgcuccacaccugugacccugagcaaagaccagcuuucugggaucaacaauauugcguucuccaacugaggacuaguggaagcauuuuccuggcugauuaaaagaaauuacucagcuauggucaucuguuccuguuagaaggcuaugcagcauauuauauacuaugcgcauguuaugaaaugcauaauaaaaaauuuuaaaaaaucuaaaagaucuaaaaaaaaaaaaaaaaaaaaaaaaaaaaaaaaaaaaaaaaaaaaaaaaaaaaaaaaaaaaaaaaugcaucccccccccccccccccccccccccccccccaaaggcucuuuucagagccaccagaauu

SEQ ID NO: 6921 - RNA, 1979 nt, Artificial Sequence
  mRNA product Design c-4 comprising derived and/or modified sequence from HRSV(A2)__F_DSCav1_mut7 (opt6)
gggagaguccgcucagccagguugcagaagcggcuuagcguguguccuaaucuucucucugcguguagguaggccugugccgcaaacaagcuuaccauggaauuacucauacucaaagcaaaugcaauuaccacuauacucacagcuguaacuuuuuguuucgccucaggacaaaacaucacagaagaauuuuaucaauccacaugcucugccguaucaaaaggcuaccuaucugcccuaagaacagguugguacacaucuguaauaacaaucgaauuauccaacaucaaagaaaacaaaugcaacggcacagacgcaaaagucaaacucaucaaacaagaauuagauaaauauaaaaacgcaguaacagaacuacaaaugcuaaugugcucuacacccgccacaggaucaggauccgcaaucgcuucuggaguagccguuugcaaaguauuacaccuagaaggagaaguaaauaaaauaaaauccgcacuacuaucaacuaauaaagcaguaguaucacuuucuaaugguguaucaguauuaacauucaaaguccucgaccuaaaaaauuacaucgacaaacaacuauuacccauccuuaauaaacaaucaugcuccauaucaaacauagaaacugucauggaauuucaacaaaaaaacaauagacuucuagaaaucacaagagaauuuucuguaaaugcaggaguaacuacaccaguaucaacauauauguuaaccaacuccgaacuacuaucacucauaaacgacaugccaauaacaaacgaccaaaaaaaacuaaugucaaauaacguucaaauaguaagacaacaaucauacucaaucaugugcauaauaaaagaagaaguuuuagcauacgucguacaacuuccccuauacggaguaauagacaccccuugcuggaaacuccacaccucaccacuaugcacuacaaacacaaaagaagguuccaacaucugcuuaacaagaaccgaucgaggaugguacugcgacaacgcugguuccguaucuuucuucccacaagcagaaacaugcaaaguaugcuccaauagaguauucugcgacaccaugaacucacuaacucuaccauccgaaguaaaccuaugcaacgucgacauauuuaauccaaaauaugacugcaaaauaaugacuucaaaaacagacguauccucaucaguaauaacauccuuaggagcaauaguaucauguuacggcaagacaaaauguacagccucaaacaaaaacaaagguaucauuaaaaccuucuccaacggcugcgacuacguaucaaauaaaggugucgauacaguaucaguaggaaacacacucuauuacguuaauaaacaagaaggaaagucauuauacguaaaaggagaaccaauaaucaauuucuacgauccccuagucuuucccucagaugaauuugacgcaagcaucucucaagucaacgaaaaaauaaaccaaucccuagccuucauaagaaaaucagaugaacuacuucauaacgucaacgccggaaaaucaacaaccaacauaaugaucacuacaaucauaauuguaauuauaguaauacuacuaucgcuaauugccguuggacuacuacuauauuguaaagcaagaucaacacccguuacucuauccaaagaucaauuaucaggaaucaacaacauagccuucucaaauuaaggacuaguggaagcauuuuccuggcugauuaaaagaaauuacucagcuauggucaucuguuccuguuagaaggcuaugcagcauauuauauacuaugcgcauguuaugaaaugcauaauaaaaaauuuuaaaaaaucuaaaagaucuaaaaaaaaaaaaaaaaaaaaaaaaaaaaaaaaaaaaaaaaaaaaaaaaaaaaaaaaaaaaaaaaugcaucccccccccccccccccccccccccccccccaaaggcucuuuucagagccaccagaauu

SEQ ID NO: 6922 - RNA, 1979 nt, Artificial Sequence
  mRNA product Design c-4 comprising derived and/or modified sequence from HRSV(A2)__F_DSCav1_mut7 (opt11)
gggagaguccgcucagccagguugcagaagcggcuuagcguguguccuaaucuucucucugcguguagguaggccugugccgcaaacaagcuuaccauggaacuacucauacuuaaagccaacgcaauaaccacaauccucaccgccgucacauucugcuucgccucgggacaaaacauaaccgaagaauuuuaccagucuaccugcuccgccgucuccaaggguuaccucuccgcgcuccgcaccgggugguacaccagcguuaucaccaucgaacuaucuaacauaaaagaaaacaagugcaacggaaccgacgcaaaagucaaacucaucaaacaagaacuagacaaauacaagaaugccgucaccgaacuacaaaugcucaugugcuccacccccgccaccggauccggcuccgccauugccuccggcgucgccguaugcaaaguccuucacuuggaaggagaaguuaacaaaauaaaaagcgcccuccugucgaccaacaaagcgguggucagccucuccaacggcgucucuguccucaccuucaaaguccucgaccucaagaacuacauagauaaacaacuacuccccauccuaaacaaacagucaugcagcauauccaacaucgaaaccgucauggaguuccaacagaaaaacaaccgccuccuugaaaucacccgcgaguucucugucaacgccggcgucaccacccccgucuccaccuacaugcucacaaacuccgaacuccucagccucaucaacgacaugccaaucaccaacgaccaaaagaaacucauguccaacaacguacaaaucguucgucaacaaucauacucaaucaugugcaucauuaaagaagaaguccucgcauacgucguccaacucccccucuauggggucaucgacaccccaugcuggaaacuccacaccucuccccuaugcaccaccaacaccaaagaaggcuccaacaucugccuaacccgaaccgaccgcggaugguacugcgacaacgccggcuccgucuccuucuucccccaggccgaaacauguaaagucugcuccaaccguguguucugcgacaccaugaacucacuaacccuccccuccgaagucaaccucugcaacgucgacaucuucaacccgaaauacgacugcaaaauaaugaccagcaaaacagacguauccucuagcgucauuaccagccuaggugcaaucguguccugcuacggcaaaacaaaaugcaccgccuccaacaaaaauaaaggaaucauaaaaaccuucuccaacggcugcgacuacgucagcaacaaaggagucgacaccgucuccguaggaaauacucuauacuaugucaacaaacaagaggguaaaucccucuacgucaaaggcgaacccaucaucaacuucuacgacccccucgucuuccccucugacgaguucgacgccagcauaucacaaguaaacgaaaagaucaaccaaucccucgcauucauucgcaaauccgacgaacuccuacacaacgucaacgccggaaaauccaccaccaacaucaugaucacuacuaucauuaucgucaucaucgucauccuccucucccucaucgcagucggccuucuacucuacugcaaggcacgcucuacacccguaacccugucuaaagaccaacucuccggcaucaacaacaucgcuuucuccaacuaaggacuaguggaagcauuuuccuggcugauuaaaagaaauuacucagcuauggucaucuguuccuguuagaaggcuaugcagcauauuauauacuaugcgcauguuaugaaaugcauaauaaaaaauuuuaaaaaaucuaaaagaucuaaaaaaaaaaaaaaaaaaaaaaaaaaaaaaaaaaaaaaaaaaaaaaaaaaaaaaaaaaaaaaaaugcaucccccccccccccccccccccccccccccccaaaggcucuuuucagagccaccagaauu

SEQ ID NO: 6923 - RNA, 1897 nt, Artificial Sequence
  mRNA product Design c-5 comprising derived and/or modified sequence from HRSV(A2)__F_DSCav1_mut7 (opt1)
gggagagcggcucggccauuuugucccagucaguccggaggcugcggcugcagaaguaccgccugcggaguaacugcaaagaagcuuaccauggagcugcucauccugaaggccaacgccaucaccaccauccugacggcggugaccuucugcuucgccagcggccagaacaucaccgaggaguucuaccaguccacgugcagcgccgucuccaagggguaccucagcgcccugcggaccggcugguacaccuccgugaucaccaucgagcugagcaacaucaaggagaacaagugcaacgggaccgacgccaaggugaagcucaucaagcaggagcuggacaaguacaagaacgcggucacggagcugcagaugcugaugugcuccaccccggcaaccggcuccggcuccgccaucgcgagcggcgucgccgugugcaaggugcugcaccucgagggggaggucaacaagaucaagagcgcccugcuguccaccaacaaggccguggugagccucuccaacggcgucagcgugcugaccuucaaggugcuggaccucaagaacuacaucgacaagcagcugcugcccauccugaacaagcagagcugcuccaucagcaacaucgagacggugauggaguuccagcagaagaacaaccggcuccuggagaucacccgcgaguucagcgugaacgccggggucaccacccccguguccacguacaugcugaccaacagcgagcuccugucccugaucaacgacaugccgaucaccaacgaccagaagaagcucaugagcaacaacgugcagaucguccggcagcaguccuacagcaucaugugcaucaucaaggaggaggugcuggcguacgugguccagcugccccucuacggcgugaucgacacccccugcuggaagcugcacacgagcccccugugcaccaccaacaccaaggagggguccaacaucugccucacgcgcaccgaccggggcugguacugcgacaacgccggcagcgucuccuucuucccgcaggccgagaccugcaaggugugcagcaaccgcguguucugcgacaccaugaacucccugacgcugcccagcgagguaaaccucugcaacgucgacaucuucaaccccaaguacgacugcaagaucaugaccuccaagaccgacgugagcuccagcgugaucaccucccugggggccaucgucagcugcuacggcaagacgaagugcaccgccagcaacaagaacaaggggaucaucaagaccuucuccaacggcugcgacuacgugagcaacaagggcguggacaccguguccgucgggaacacccuguacuacgugaacaagcaggagggcaagagccucuacgugaagggggagcccaucaucaacuucuacgacccgcuggucuuccccuccgacgaguucgacgcgagcaucucccaggugaacgagaagaucaaccagagccuggccuucauccgcaaguccgacgagcugcuccacaacgugaacgccggcaagagcacgaccaacaucaugaucaccaccaucaucaucgucaucaucgugauccugcugucccucaucgccguggggcugcugcucuacugcaaggcccggagcacgcccgucacccuguccaaggaccagcugagcggcaucaacaacaucgcguucuccaacugaggacuagucccuguucccagagcccacuuuuuuuucuuuuuuugaaauaaaauagccugucuuucagaucuaaaaaaaaaaaaaaaaaaaaaaaaaaaaaaaaaaaaaaaaaaaaaaaaaaaaaaaaaaaaaaaaugcaucccccccccccccccccccccccccccccccaaaggcucuuuucagagccaccagaauu

SEQ ID NO: 6924 - RNA, 1897 nt, Artificial Sequence
  mRNA product Design c-5 comprising derived and/or modified sequence from HRSV(A2)__F_DSCav1_mut7 (opt1)
gggagagcggcucggccauuuugucccagucaguccggaggcugcggcugcagaaguaccgccugcggaguaacugcaaagaagcuuaccauggagcugcucauccugaaggccaacgccaucaccaccauccugacggcggugaccuucugcuucgccagcggccagaacaucaccgaggaguucuaccaguccacgugcagcgccgucuccaagggguaccucagcgcccugcgcaccggcugguacaccuccgugaucaccaucgagcugagcaacaucaaggagaacaagugcaacgggaccgacgccaaggugaagcucaucaagcaggagcuggacaaguacaagaacgcggucacggagcugcagaugcucaugugcuccacccccgccaccggcagcggguccgccaucgccagcggcguggcggugugcaagguccugcaccuggagggcgaggugaacaagaucaaguccgcccuccugagcaccaacaaggccguggucucccugagcaacgggguguccgugcucacguucaagguccuggaccugaagaacuacaucgacaagcagcuccugccgauccugaacaagcagagcugcuccaucagcaacaucgagaccgugauggaguuccagcagaagaacaaccggcuccuggagaucacccgcgaguucuccgugaacgccggcgucaccacgcccgugagcaccuacaugcugaccaacagcgagcuccugucccugaucaacgacaugcccaucaccaacgaccagaagaagcucaugagcaacaacgugcagaucguccggcagcaguccuacagcaucaugugcaucaucaaggaggaggugcuggccuacgugguccagcugccccucuacggggugaucgacacgccgugcuggaagcugcacaccagcccccugugcaccaccaacacgaaggagggcagcaacaucugccucacccgcaccgaccgggggugguacugcgacaacgcgggcuccgugagcuucuucccccaggccgagaccugcaaggucugcuccaaccgcguguucugcgacacgaugaacagccugacccugcccuccgaggucaaccucugcaacguggacaucuucaacccgaaguacgacugcaagaucaugaccagcaagaccgacguguccagcuccgucaucacgagccugggcgccaucguguccugcuacgggaagaccaagugcaccgccagcaacaagaacaagggcaucaucaagaccuucuccaacgggugcgacuacgugagcaacaagggcgucgacacggugagcgugggcaacacccuguacuacgucaacaagcaggaggggaagucccucuacgugaagggcgagcccaucaucaacuucuacgacccccugguguuccccagcgacgaguucgacgccuccaucagccaggucaacgagaagaucaaccagucccuggcguucauccggaaguccgacgagcuccugcacaacgugaacgccgggaaguccaccaccaacaucaugaucaccacgaucaucaucgugaucaucgucauccugcucagccugaucgccgugggccugcuccuguacugcaaggcccgcuccaccccggugacccugagcaaggaccagcuguccgggaucaacaacaucgccuucagcaacugaggacuagucccuguucccagagcccacuuuuuuuucuuuuuuugaaauaaaauagccugucuuucagaucuaaaaaaaaaaaaaaaaaaaaaaaaaaaaaaaaaaaaaaaaaaaaaaaaaaaaaaaaaaaaaaaaugcaucccccccccccccccccccccccccccccccaaaggcucuuuucagagccaccagaauu

SEQ ID NO: 6925 - RNA, 1897 nt, Artificial Sequence
  mRNA product Design c-5 comprising derived and/or modified sequence from HRSV(A2)__F_DSCav1_mut7 (opt2)
gggagagcggcucggccauuuugucccagucaguccggaggcugcggcugcagaaguaccgccugcggaguaacugcaaagaagcuuaccauggagcuccucauccucaaggccaacgccaucaccaccauccucaccgccgucaccuucugcuucgccuccggccagaacaucaccgaggaguucuaccaguccaccugcuccgccgucuccaagggcuaccucuccgcccuccgcaccggcugguacaccuccgucaucaccaucgagcucuccaacaucaaggagaacaagugcaacggcaccgacgccaaggucaagcucaucaagcaggagcucgacaaguacaagaacgccgucaccgagcuccagaugcucaugugcuccacccccgccaccggcuccggcuccgccaucgccuccggcgucgccgucugcaagguccuccaccucgagggcgaggucaacaagaucaaguccgcccuccucuccaccaacaaggccgucgucucccucuccaacggcgucuccguccucaccuucaagguccucgaccucaagaacuacaucgacaagcagcuccuccccauccucaacaagcaguccugcuccaucuccaacaucgagaccgucauggaguuccagcagaagaacaaccgccuccucgagaucacccgcgaguucuccgucaacgccggcgucaccacccccgucuccaccuacaugcucaccaacuccgagcuccucucccucaucaacgacaugcccaucaccaacgaccagaagaagcucauguccaacaacguccagaucguccgccagcaguccuacuccaucaugugcaucaucaaggaggagguccucgccuacgucguccagcucccccucuacggcgucaucgacacccccugcuggaagcuccacaccuccccccucugcaccaccaacaccaaggagggcuccaacaucugccucacccgcaccgaccgcggcugguacugcgacaacgccggcuccgucuccuucuucccccaggccgagaccugcaaggucugcuccaaccgcgucuucugcgacaccaugaacucccucacccuccccuccgaggucaaccucugcaacgucgacaucuucaaccccaaguacgacugcaagaucaugaccuccaagaccgacgucuccuccuccgucaucaccucccucggcgccaucgucuccugcuacggcaagaccaagugcaccgccuccaacaagaacaagggcaucaucaagaccuucuccaacggcugcgacuacgucuccaacaagggcgucgacaccgucuccgucggcaacacccucuacuacgucaacaagcaggagggcaagucccucuacgucaagggcgagcccaucaucaacuucuacgacccccucgucuuccccuccgacgaguucgacgccuccaucucccaggucaacgagaagaucaaccagucccucgccuucauccgcaaguccgacgagcuccuccacaacgucaacgccggcaaguccaccaccaacaucaugaucaccaccaucaucaucgucaucaucgucauccuccucucccucaucgccgucggccuccuccucuacugcaaggcccgcuccacccccgucacccucuccaaggaccagcucuccggcaucaacaacaucgccuucuccaacugaggacuagucccuguucccagagcccacuuuuuuuucuuuuuuugaaauaaaauagccugucuuucagaucuaaaaaaaaaaaaaaaaaaaaaaaaaaaaaaaaaaaaaaaaaaaaaaaaaaaaaaaaaaaaaaaaugcaucccccccccccccccccccccccccccccccaaaggcucuuuucagagccaccagaauu

SEQ ID NO: 6926 - RNA, 1897 nt, Artificial Sequence
  mRNA product Design c-5 comprising derived and/or modified sequence from HRSV(A2)__F_DSCav1_mut7 (opt3)
gggagagcggcucggccauuuugucccagucaguccggaggcugcggcugcagaaguaccgccugcggaguaacugcaaagaagcuuaccauggagcugcucauccuuaaggccaacgcuauuaccacaauacugacugcagugacguucugcuuugccagcggccagaauaucaccgaagaguucuaccaauccacauguucugcggucucaaaaggguauuugagugcuuuaagaacuggaugguacaccagcguuauuacaaucgaacuguccaacauuaaggagaauaaaugcaacgguaccgacgccaaggugaaacuaaucaagcaggaacucgauaaguauaaaaaugcaguaacugagcugcagaugcuuauguguucuacacccgccaccggcucggggucagcuauagcaagcggaguggccgucugcaaggugcugcacuuggagggcgaaguuaacaaaaucaagagugcucuccuguccacgaauaaagccguggucucucugagcaacgguguguccguacucacuuuuaagguuuuagaccugaagaauuacauugauaaacagcuuuugccuauccugaacaagcaaucauguaguauuagcaauaucgagaccgugauggaguuccagcagaaaaacaauaggcuacucgaaauaacacgggaguuuucugucaacgcgggggugacuaccccaguguccacauauaugcugaccaauucagaacuucugagcuugauuaacgacaugccgaucacgaacgaucagaagaaacucaugaguaauaacguccaaauuguucgccagcagucuuacuccaucaugugcaucauuaaggaggaagugcuggcauauguagugcaguuaccccuguacggagucauagacacuccuuguuggaaacuccauacaagcccacuuugcaccacuaauacaaaggagggcucgaacaucugucugacccgaacggaucguggcugguacugcgacaaugccgggucuguguccuucuuuccccaagcugaaaccuguaagguuugcucaaacagaguguucugcgauacaaugaauaguuugacucuaccuagcgaggucaaccuguguaauguggacauuuuuaacccaaaauaugauugcaagaucaugaccuccaaaacagacguaucuagcucaguuauaacuagccucggagccauuguguccuguuacgguaagaccaaaugcacagcaagcaauaagaacaagggcaucaucaaaaccuucucuaaugggugugauuaugucucaaacaagggaguggacacugucagugugggcaauacgcuguacuauguuaacaaacaggaggguaagagccuuuacgugaaaggggaacccauuaucaacuuuuaugacccucugguauucccauccgaugaguuugacgcuucuauuucgcaggucaaugaaaagauaaaccaaaguuuggccuucaucaggaaguccgaugagcuccugcacaaugugaacgcgggaaaaucaacaaccaauauuaugaucacuaccaucauuauaguuaucauugugaucuuacugagucuaauugccgucggccuccugcuuuacugcaaggcacggucuacaccggugaccuugagcaaagaccagcuguccggcaucaacaauauagcuuucucaaacugaggacuagucccuguucccagagcccacuuuuuuuucuuuuuuugaaauaaaauagccugucuuucagaucuaaaaaaaaaaaaaaaaaaaaaaaaaaaaaaaaaaaaaaaaaaaaaaaaaaaaaaaaaaaaaaaaugcaucccccccccccccccccccccccccccccccaaaggcucuuuucagagccaccagaauu

SEQ ID NO: 6927 - RNA, 1897 nt, Artificial Sequence
  mRNA product Design c-5 comprising derived and/or modified sequence from HRSV(A2)__F_DSCav1_mut7 (opt4)
gggagagcggcucggccauuuugucccagucaguccggaggcugcggcugcagaaguaccgccugcggaguaacugcaaagaagcuuaccauggagcugcugauccugaaggccaacgccaucaccaccauccugaccgccgugaccuucugcuucgccagcggccagaacaucaccgaggaguucuaccagagcaccugcagcgccgugagcaagggcuaccugagcgcccugagaaccggcugguacaccagcgugaucaccaucgagcugagcaacaucaaggagaacaagugcaacggcaccgacgccaaggugaagcugaucaagcaggagcuggacaaguacaagaacgccgugaccgagcugcagaugcugaugugcagcacccccgccaccggcagcggcagcgccaucgccagcggcguggccgugugcaaggugcugcaccuggagggcgaggugaacaagaucaagagcgcccugcugagcaccaacaaggccguggugagccugagcaacggcgugagcgugcugaccuucaaggugcuggaccugaagaacuacaucgacaagcagcugcugcccauccugaacaagcagagcugcagcaucagcaacaucgagaccgugauggaguuccagcagaagaacaacagacugcuggagaucaccagagaguucagcgugaacgccggcgugaccacccccgugagcaccuacaugcugaccaacagcgagcugcugagccugaucaacgacaugcccaucaccaacgaccagaagaagcugaugagcaacaacgugcagaucgugagacagcagagcuacagcaucaugugcaucaucaaggaggaggugcuggccuacguggugcagcugccccuguacggcgugaucgacacccccugcuggaagcugcacaccagcccccugugcaccaccaacaccaaggagggcagcaacaucugccugaccagaaccgacagaggcugguacugcgacaacgccggcagcgugagcuucuucccccaggccgagaccugcaaggugugcagcaacagaguguucugcgacaccaugaacagccugacccugcccagcgaggugaaccugugcaacguggacaucuucaaccccaaguacgacugcaagaucaugaccagcaagaccgacgugagcagcagcgugaucaccagccugggcgccaucgugagcugcuacggcaagaccaagugcaccgccagcaacaagaacaagggcaucaucaagaccuucagcaacggcugcgacuacgugagcaacaagggcguggacaccgugagcgugggcaacacccuguacuacgugaacaagcaggagggcaagagccuguacgugaagggcgagcccaucaucaacuucuacgacccccugguguuccccagcgacgaguucgacgccagcaucagccaggugaacgagaagaucaaccagagccuggccuucaucagaaagagcgacgagcugcugcacaacgugaacgccggcaagagcaccaccaacaucaugaucaccaccaucaucaucgugaucaucgugauccugcugagccugaucgccgugggccugcugcuguacugcaaggccagaagcacccccgugacccugagcaaggaccagcugagcggcaucaacaacaucgccuucagcaacugaggacuagucccuguucccagagcccacuuuuuuuucuuuuuuugaaauaaaauagccugucuuucagaucuaaaaaaaaaaaaaaaaaaaaaaaaaaaaaaaaaaaaaaaaaaaaaaaaaaaaaaaaaaaaaaaaugcaucccccccccccccccccccccccccccccccaaaggcucuuuucagagccaccagaauu

SEQ ID NO: 6928 - RNA, 1897 nt, Artificial Sequence
  mRNA product Design c-5 comprising derived and/or modified sequence from HRSV(A2)__F_DSCav1_mut7 (opt5)
gggagagcggcucggccauuuugucccagucaguccggaggcugcggcugcagaaguaccgccugcggaguaacugcaaagaagcuuaccauggagcugcucauccugaaggccaacgcuauuaccacaauccuuacggccgugaccuucugcuuugcgagcggccagaauauuacagaagaguucuaccaauccaccuguucugcugucagcaaaggguaucuguccgcccucagaacaggaugguacaccucuguuaucacaauugaacugagcaacaucaaggagaauaaaugcaacggcaccgacgccaaggugaaacuuaucaagcaggaacuggauaaguauaaaaaugcugugacggagcuccagaugcugauguguuccacccccgccacagggucuggaagcgcuauugccuccggcgucgcggugugcaagguucugcaccucgagggggaagugaacaaaaucaagagcgcccugcuuucuaccaauaaagcugucgugucccugagcaacggaguuucugugcucacauuuaagguccuggaccuuaagaauuacauugauaaacagcugcucccuauccugaacaagcaauccuguagcauuucuaauaucgagaccgugauggaguuccagcagaaaaacaaucggcugcucgaaauuacgcgcgaguuuuccgugaacgccggcgucacaaccccgguuagcacauauaugcugaccaauuccgaacuucugucucucaucaacgacaugcccaucaccaacgaucagaagaaacugaugagcaauaacgugcaaauugugagacagcaguccuacagcaucaugugcauuaucaaggaggaaguccuugcuuaugugguucagcugccucucuacggcgugauugacacacccuguuggaaacugcauacgucuccucugugcaccacaaauaccaaggagggguccaacaucugucucacacggaccgaucgcggaugguacugcgacaaugccggcagcgucucuuucuuuccccaagcggaaacguguaaggugugcagcaacagaguuuucugcgauacaaugaacucccugacccuuccuucugaggugaaucuguguaaugucgacaucuuuaacccgaaauaugauugcaagauuaugaccagcaaaacagacguguccagcucugucaucaccucccucggggccauugugagcuguuacggaaagacaaaaugcacggcuucuaauaagaacaagggcaucauuaaaaccuucuccaaugggugugauuauguuagcaacaagggaguggacacagucuccgugggcaauacccuguacuauguuaacaaacaggagggcaagucucuuuacgugaaaggggaacccaucaucaacuuuuaugacccucuggucuuccccagcgaugaguuugacgccuccauuucucaggugaaugaaaagaucaaccaaagccucgcuuucauucggaaguccgaugagcugcugcacaaugugaacgccggaaaaagcacaaccaauaucaugauuacgaccaucauuaucguuaucauugucauccuccugucucuuauugccgugggccugcuccuguacugcaaggcucgcuccacaccugugacccugagcaaagaccagcuuucugggaucaacaauauugcguucuccaacugaggacuagucccuguucccagagcccacuuuuuuuucuuuuuuugaaauaaaauagccugucuuucagaucuaaaaaaaaaaaaaaaaaaaaaaaaaaaaaaaaaaaaaaaaaaaaaaaaaaaaaaaaaaaaaaaaugcaucccccccccccccccccccccccccccccccaaaggcucuuuucagagccaccagaauu

SEQ ID NO: 6929 - RNA, 1897 nt, Artificial Sequence
  mRNA product Design c-5 comprising derived and/or modified sequence from HRSV(A2)__F_DSCav1_mut7 (opt6)
gggagagcggcucggccauuuugucccagucaguccggaggcugcggcugcagaaguaccgccugcggaguaacugcaaagaagcuuaccauggaauuacucauacucaaagcaaaugcaauuaccacuauacucacagcuguaacuuuuuguuucgccucaggacaaaacaucacagaagaauuuuaucaauccacaugcucugccguaucaaaaggcuaccuaucugcccuaagaacagguugguacacaucuguaauaacaaucgaauuauccaacaucaaagaaaacaaaugcaacggcacagacgcaaaagucaaacucaucaaacaagaauuagauaaauauaaaaacgcaguaacagaacuacaaaugcuaaugugcucuacacccgccacaggaucaggauccgcaaucgcuucuggaguagccguuugcaaaguauuacaccuagaaggagaaguaaauaaaauaaaauccgcacuacuaucaacuaauaaagcaguaguaucacuuucuaaugguguaucaguauuaacauucaaaguccucgaccuaaaaaauuacaucgacaaacaacuauuacccauccuuaauaaacaaucaugcuccauaucaaacauagaaacugucauggaauuucaacaaaaaaacaauagacuucuagaaaucacaagagaauuuucuguaaaugcaggaguaacuacaccaguaucaacauauauguuaaccaacuccgaacuacuaucacucauaaacgacaugccaauaacaaacgaccaaaaaaaacuaaugucaaauaacguucaaauaguaagacaacaaucauacucaaucaugugcauaauaaaagaagaaguuuuagcauacgucguacaacuuccccuauacggaguaauagacaccccuugcuggaaacuccacaccucaccacuaugcacuacaaacacaaaagaagguuccaacaucugcuuaacaagaaccgaucgaggaugguacugcgacaacgcugguuccguaucuuucuucccacaagcagaaacaugcaaaguaugcuccaauagaguauucugcgacaccaugaacucacuaacucuaccauccgaaguaaaccuaugcaacgucgacauauuuaauccaaaauaugacugcaaaauaaugacuucaaaaacagacguauccucaucaguaauaacauccuuaggagcaauaguaucauguuacggcaagacaaaauguacagccucaaacaaaaacaaagguaucauuaaaaccuucuccaacggcugcgacuacguaucaaauaaaggugucgauacaguaucaguaggaaacacacucuauuacguuaauaaacaagaaggaaagucauuauacguaaaaggagaaccaauaaucaauuucuacgauccccuagucuuucccucagaugaauuugacgcaagcaucucucaagucaacgaaaaaauaaaccaaucccuagccuucauaagaaaaucagaugaacuacuucauaacgucaacgccggaaaaucaacaaccaacauaaugaucacuacaaucauaauuguaauuauaguaauacuacuaucgcuaauugccguuggacuacuacuauauuguaaagcaagaucaacacccguuacucuauccaaagaucaauuaucaggaaucaacaacauagccuucucaaauuaaggacuagucccuguucccagagcccacuuuuuuuucuuuuuuugaaauaaaauagccugucuuucagaucuaaaaaaaaaaaaaaaaaaaaaaaaaaaaaaaaaaaaaaaaaaaaaaaaaaaaaaaaaaaaaaaaugcaucccccccccccccccccccccccccccccccaaaggcucuuuucagagccaccagaauu

SEQ ID NO: 6930 - RNA, 1897 nt, Artificial Sequence
  mRNA product Design c-5 comprising derived and/or modified sequence from HRSV(A2)__F_DSCav1_mut7 (opt11)
gggagagcggcucggccauuuugucccagucaguccggaggcugcggcugcagaaguaccgccugcggaguaacugcaaagaagcuuaccauggaacuacucauacuuaaagccaacgcaauaaccacaauccucaccgccgucacauucugcuucgccucgggacaaaacauaaccgaagaauuuuaccagucuaccugcuccgccgucuccaaggguuaccucuccgcgcuccgcaccgggugguacaccagcguuaucaccaucgaacuaucuaacauaaaagaaaacaagugcaacggaaccgacgcaaaagucaaacucaucaaacaagaacuagacaaauacaagaaugccgucaccgaacuacaaaugcucaugugcuccacccccgccaccggauccggcuccgccauugccuccggcgucgccguaugcaaaguccuucacuuggaaggagaaguuaacaaaauaaaaagcgcccuccugucgaccaacaaagcgguggucagccucuccaacggcgucucuguccucaccuucaaaguccucgaccucaagaacuacauagauaaacaacuacuccccauccuaaacaaacagucaugcagcauauccaacaucgaaaccgucauggaguuccaacagaaaaacaaccgccuccuugaaaucacccgcgaguucucugucaacgccggcgucaccacccccgucuccaccuacaugcucacaaacuccgaacuccucagccucaucaacgacaugccaaucaccaacgaccaaaagaaacucauguccaacaacguacaaaucguucgucaacaaucauacucaaucaugugcaucauuaaagaagaaguccucgcauacgucguccaacucccccucuauggggucaucgacaccccaugcuggaaacuccacaccucuccccuaugcaccaccaacaccaaagaaggcuccaacaucugccuaacccgaaccgaccgcggaugguacugcgacaacgccggcuccgucuccuucuucccccaggccgaaacauguaaagucugcuccaaccguguguucugcgacaccaugaacucacuaacccuccccuccgaagucaaccucugcaacgucgacaucuucaacccgaaauacgacugcaaaauaaugaccagcaaaacagacguauccucuagcgucauuaccagccuaggugcaaucguguccugcuacggcaaaacaaaaugcaccgccuccaacaaaaauaaaggaaucauaaaaaccuucuccaacggcugcgacuacgucagcaacaaaggagucgacaccgucuccguaggaaauacucuauacuaugucaacaaacaagaggguaaaucccucuacgucaaaggcgaacccaucaucaacuucuacgacccccucgucuuccccucugacgaguucgacgccagcauaucacaaguaaacgaaaagaucaaccaaucccucgcauucauucgcaaauccgacgaacuccuacacaacgucaacgccggaaaauccaccaccaacaucaugaucacuacuaucauuaucgucaucaucgucauccuccucucccucaucgcagucggccuucuacucuacugcaaggcacgcucuacacccguaacccugucuaaagaccaacucuccggcaucaacaacaucgcuuucuccaacuaaggacuagucccuguucccagagcccacuuuuuuuucuuuuuuugaaauaaaauagccugucuuucagaucuaaaaaaaaaaaaaaaaaaaaaaaaaaaaaaaaaaaaaaaaaaaaaaaaaaaaaaaaaaaaaaaaugcaucccccccccccccccccccccccccccccccaaaggcucuuuucagagccaccagaauu

SEQ ID NO: 6931 - RNA, 1906 nt, Artificial Sequence
  mRNA product Design d-1 comprising derived and/or modified sequence from HRSV(A2)__F_DSCav1_mut7 (opt1)
gggagacccgugacccggaaguuguacggcuacgcgacuuucccucccacaaacccucgcgcccuuccuuuccuacuugggcccggcagaaagcuuaccauggagcugcucauccugaaggccaacgccaucaccaccauccugacggcggugaccuucugcuucgccagcggccagaacaucaccgaggaguucuaccaguccacgugcagcgccgucuccaagggguaccucagcgcccugcggaccggcugguacaccuccgugaucaccaucgagcugagcaacaucaaggagaacaagugcaacgggaccgacgccaaggugaagcucaucaagcaggagcuggacaaguacaagaacgcggucacggagcugcagaugcugaugugcuccaccccggcaaccggcuccggcuccgccaucgcgagcggcgucgccgugugcaaggugcugcaccucgagggggaggucaacaagaucaagagcgcccugcuguccaccaacaaggccguggugagccucuccaacggcgucagcgugcugaccuucaaggugcuggaccucaagaacuacaucgacaagcagcugcugcccauccugaacaagcagagcugcuccaucagcaacaucgagacggugauggaguuccagcagaagaacaaccggcuccuggagaucacccgcgaguucagcgugaacgccggggucaccacccccguguccacguacaugcugaccaacagcgagcuccugucccugaucaacgacaugccgaucaccaacgaccagaagaagcucaugagcaacaacgugcagaucguccggcagcaguccuacagcaucaugugcaucaucaaggaggaggugcuggcguacgugguccagcugccccucuacggcgugaucgacacccccugcuggaagcugcacacgagcccccugugcaccaccaacaccaaggagggguccaacaucugccucacgcgcaccgaccggggcugguacugcgacaacgccggcagcgucuccuucuucccgcaggccgagaccugcaaggugugcagcaaccgcguguucugcgacaccaugaacucccugacgcugcccagcgagguaaaccucugcaacgucgacaucuucaaccccaaguacgacugcaagaucaugaccuccaagaccgacgugagcuccagcgugaucaccucccugggggccaucgucagcugcuacggcaagacgaagugcaccgccagcaacaagaacaaggggaucaucaagaccuucuccaacggcugcgacuacgugagcaacaagggcguggacaccguguccgucgggaacacccuguacuacgugaacaagcaggagggcaagagccucuacgugaagggggagcccaucaucaacuucuacgacccgcuggucuuccccuccgacgaguucgacgcgagcaucucccaggugaacgagaagaucaaccagagccuggccuucauccgcaaguccgacgagcugcuccacaacgugaacgccggcaagagcacgaccaacaucaugaucaccaccaucaucaucgucaucaucgugauccugcugucccucaucgccguggggcugcugcucuacugcaaggcccggagcacgcccgucacccuguccaaggaccagcugagcggcaucaacaacaucgcguucuccaacugaggacuagucccuguucccagagcccacuuuuuuuucuuuuuuugaaauaaaauagccugucuuucagaucuaaaaaaaaaaaaaaaaaaaaaaaaaaaaaaaaaaaaaaaaaaaaaaaaaaaaaaaaaaaaaaaaugcaucccccccccccccccccccccccccccccccaaaggcucuuuucagagccaccagaauu

SEQ ID NO: 6932 - RNA, 1906 nt, Artificial Sequence
  mRNA product Design d-1 comprising derived and/or modified sequence from HRSV(A2)__F_DSCav1_mut7 (opt1)
gggagacccgugacccggaaguuguacggcuacgcgacuuucccucccacaaacccucgcgcccuuccuuuccuacuugggcccggcagaaagcuuaccauggagcugcucauccugaaggccaacgccaucaccaccauccugacggcggugaccuucugcuucgccagcggccagaacaucaccgaggaguucuaccaguccacgugcagcgccgucuccaagggguaccucagcgcccugcgcaccggcugguacaccuccgugaucaccaucgagcugagcaacaucaaggagaacaagugcaacgggaccgacgccaaggugaagcucaucaagcaggagcuggacaaguacaagaacgcggucacggagcugcagaugcucaugugcuccacccccgccaccggcagcggguccgccaucgccagcggcguggcggugugcaagguccugcaccuggagggcgaggugaacaagaucaaguccgcccuccugagcaccaacaaggccguggucucccugagcaacgggguguccgugcucacguucaagguccuggaccugaagaacuacaucgacaagcagcuccugccgauccugaacaagcagagcugcuccaucagcaacaucgagaccgugauggaguuccagcagaagaacaaccggcuccuggagaucacccgcgaguucuccgugaacgccggcgucaccacgcccgugagcaccuacaugcugaccaacagcgagcuccugucccugaucaacgacaugcccaucaccaacgaccagaagaagcucaugagcaacaacgugcagaucguccggcagcaguccuacagcaucaugugcaucaucaaggaggaggugcuggccuacgugguccagcugccccucuacggggugaucgacacgccgugcuggaagcugcacaccagcccccugugcaccaccaacacgaaggagggcagcaacaucugccucacccgcaccgaccgggggugguacugcgacaacgcgggcuccgugagcuucuucccccaggccgagaccugcaaggucugcuccaaccgcguguucugcgacacgaugaacagccugacccugcccuccgaggucaaccucugcaacguggacaucuucaacccgaaguacgacugcaagaucaugaccagcaagaccgacguguccagcuccgucaucacgagccugggcgccaucguguccugcuacgggaagaccaagugcaccgccagcaacaagaacaagggcaucaucaagaccuucuccaacgggugcgacuacgugagcaacaagggcgucgacacggugagcgugggcaacacccuguacuacgucaacaagcaggaggggaagucccucuacgugaagggcgagcccaucaucaacuucuacgacccccugguguuccccagcgacgaguucgacgccuccaucagccaggucaacgagaagaucaaccagucccuggcguucauccggaaguccgacgagcuccugcacaacgugaacgccgggaaguccaccaccaacaucaugaucaccacgaucaucaucgugaucaucgucauccugcucagccugaucgccgugggccugcuccuguacugcaaggcccgcuccaccccggugacccugagcaaggaccagcuguccgggaucaacaacaucgccuucagcaacugaggacuagucccuguucccagagcccacuuuuuuuucuuuuuuugaaauaaaauagccugucuuucagaucuaaaaaaaaaaaaaaaaaaaaaaaaaaaaaaaaaaaaaaaaaaaaaaaaaaaaaaaaaaaaaaaaugcaucccccccccccccccccccccccccccccccaaaggcucuuuucagagccaccagaauu

SEQ ID NO: 6933 - RNA, 1906 nt, Artificial Sequence
  mRNA product Design d-1 comprising derived and/or modified sequence from HRSV(A2)__F_DSCav1_mut7 (opt2)
gggagacccgugacccggaaguuguacggcuacgcgacuuucccucccacaaacccucgcgcccuuccuuuccuacuugggcccggcagaaagcuuaccauggagcuccucauccucaaggccaacgccaucaccaccauccucaccgccgucaccuucugcuucgccuccggccagaacaucaccgaggaguucuaccaguccaccugcuccgccgucuccaagggcuaccucuccgcccuccgcaccggcugguacaccuccgucaucaccaucgagcucuccaacaucaaggagaacaagugcaacggcaccgacgccaaggucaagcucaucaagcaggagcucgacaaguacaagaacgccgucaccgagcuccagaugcucaugugcuccacccccgccaccggcuccggcuccgccaucgccuccggcgucgccgucugcaagguccuccaccucgagggcgaggucaacaagaucaaguccgcccuccucuccaccaacaaggccgucgucucccucuccaacggcgucuccguccucaccuucaagguccucgaccucaagaacuacaucgacaagcagcuccuccccauccucaacaagcaguccugcuccaucuccaacaucgagaccgucauggaguuccagcagaagaacaaccgccuccucgagaucacccgcgaguucuccgucaacgccggcgucaccacccccgucuccaccuacaugcucaccaacuccgagcuccucucccucaucaacgacaugcccaucaccaacgaccagaagaagcucauguccaacaacguccagaucguccgccagcaguccuacuccaucaugugcaucaucaaggaggagguccucgccuacgucguccagcucccccucuacggcgucaucgacacccccugcuggaagcuccacaccuccccccucugcaccaccaacaccaaggagggcuccaacaucugccucacccgcaccgaccgcggcugguacugcgacaacgccggcuccgucuccuucuucccccaggccgagaccugcaaggucugcuccaaccgcgucuucugcgacaccaugaacucccucacccuccccuccgaggucaaccucugcaacgucgacaucuucaaccccaaguacgacugcaagaucaugaccuccaagaccgacgucuccuccuccgucaucaccucccucggcgccaucgucuccugcuacggcaagaccaagugcaccgccuccaacaagaacaagggcaucaucaagaccuucuccaacggcugcgacuacgucuccaacaagggcgucgacaccgucuccgucggcaacacccucuacuacgucaacaagcaggagggcaagucccucuacgucaagggcgagcccaucaucaacuucuacgacccccucgucuuccccuccgacgaguucgacgccuccaucucccaggucaacgagaagaucaaccagucccucgccuucauccgcaaguccgacgagcuccuccacaacgucaacgccggcaaguccaccaccaacaucaugaucaccaccaucaucaucgucaucaucgucauccuccucucccucaucgccgucggccuccuccucuacugcaaggcccgcuccacccccgucacccucuccaaggaccagcucuccggcaucaacaacaucgccuucuccaacugaggacuagucccuguucccagagcccacuuuuuuuucuuuuuuugaaauaaaauagccugucuuucagaucuaaaaaaaaaaaaaaaaaaaaaaaaaaaaaaaaaaaaaaaaaaaaaaaaaaaaaaaaaaaaaaaaugcaucccccccccccccccccccccccccccccccaaaggcucuuuucagagccaccagaauu

SEQ ID NO: 6934 - RNA, 1906 nt, Artificial Sequence
  mRNA product Design d-1 comprising derived and/or modified sequence from HRSV(A2)__F_DSCav1_mut7 (opt3)
gggagacccgugacccggaaguuguacggcuacgcgacuuucccucccacaaacccucgcgcccuuccuuuccuacuugggcccggcagaaagcuuaccauggagcugcucauccuuaaggccaacgcuauuaccacaauacugacugcagugacguucugcuuugccagcggccagaauaucaccgaagaguucuaccaauccacauguucugcggucucaaaaggguauuugagugcuuuaagaacuggaugguacaccagcguuauuacaaucgaacuguccaacauuaaggagaauaaaugcaacgguaccgacgccaaggugaaacuaaucaagcaggaacucgauaaguauaaaaaugcaguaacugagcugcagaugcuuauguguucuacacccgccaccggcucggggucagcuauagcaagcggaguggccgucugcaaggugcugcacuuggagggcgaaguuaacaaaaucaagagugcucuccuguccacgaauaaagccguggucucucugagcaacgguguguccguacucacuuuuaagguuuuagaccugaagaauuacauugauaaacagcuuuugccuauccugaacaagcaaucauguaguauuagcaauaucgagaccgugauggaguuccagcagaaaaacaauaggcuacucgaaauaacacgggaguuuucugucaacgcgggggugacuaccccaguguccacauauaugcugaccaauucagaacuucugagcuugauuaacgacaugccgaucacgaacgaucagaagaaacucaugaguaauaacguccaaauuguucgccagcagucuuacuccaucaugugcaucauuaaggaggaagugcuggcauauguagugcaguuaccccuguacggagucauagacacuccuuguuggaaacuccauacaagcccacuuugcaccacuaauacaaaggagggcucgaacaucugucugacccgaacggaucguggcugguacugcgacaaugccgggucuguguccuucuuuccccaagcugaaaccuguaagguuugcucaaacagaguguucugcgauacaaugaauaguuugacucuaccuagcgaggucaaccuguguaauguggacauuuuuaacccaaaauaugauugcaagaucaugaccuccaaaacagacguaucuagcucaguuauaacuagccucggagccauuguguccuguuacgguaagaccaaaugcacagcaagcaauaagaacaagggcaucaucaaaaccuucucuaaugggugugauuaugucucaaacaagggaguggacacugucagugugggcaauacgcuguacuauguuaacaaacaggaggguaagagccuuuacgugaaaggggaacccauuaucaacuuuuaugacccucugguauucccauccgaugaguuugacgcuucuauuucgcaggucaaugaaaagauaaaccaaaguuuggccuucaucaggaaguccgaugagcuccugcacaaugugaacgcgggaaaaucaacaaccaauauuaugaucacuaccaucauuauaguuaucauugugaucuuacugagucuaauugccgucggccuccugcuuuacugcaaggcacggucuacaccggugaccuugagcaaagaccagcuguccggcaucaacaauauagcuuucucaaacugaggacuagucccuguucccagagcccacuuuuuuuucuuuuuuugaaauaaaauagccugucuuucagaucuaaaaaaaaaaaaaaaaaaaaaaaaaaaaaaaaaaaaaaaaaaaaaaaaaaaaaaaaaaaaaaaaugcaucccccccccccccccccccccccccccccccaaaggcucuuuucagagccaccagaauu

SEQ ID NO: 6935 - RNA, 1906 nt, Artificial Sequence
  mRNA product Design d-1 comprising derived and/or modified sequence from HRSV(A2)__F_DSCav1_mut7 (opt4)
gggagacccgugacccggaaguuguacggcuacgcgacuuucccucccacaaacccucgcgcccuuccuuuccuacuugggcccggcagaaagcuuaccauggagcugcugauccugaaggccaacgccaucaccaccauccugaccgccgugaccuucugcuucgccagcggccagaacaucaccgaggaguucuaccagagcaccugcagcgccgugagcaagggcuaccugagcgcccugagaaccggcugguacaccagcgugaucaccaucgagcugagcaacaucaaggagaacaagugcaacggcaccgacgccaaggugaagcugaucaagcaggagcuggacaaguacaagaacgccgugaccgagcugcagaugcugaugugcagcacccccgccaccggcagcggcagcgccaucgccagcggcguggccgugugcaaggugcugcaccuggagggcgaggugaacaagaucaagagcgcccugcugagcaccaacaaggccguggugagccugagcaacggcgugagcgugcugaccuucaaggugcuggaccugaagaacuacaucgacaagcagcugcugcccauccugaacaagcagagcugcagcaucagcaacaucgagaccgugauggaguuccagcagaagaacaacagacugcuggagaucaccagagaguucagcgugaacgccggcgugaccacccccgugagcaccuacaugcugaccaacagcgagcugcugagccugaucaacgacaugcccaucaccaacgaccagaagaagcugaugagcaacaacgugcagaucgugagacagcagagcuacagcaucaugugcaucaucaaggaggaggugcuggccuacguggugcagcugccccuguacggcgugaucgacacccccugcuggaagcugcacaccagcccccugugcaccaccaacaccaaggagggcagcaacaucugccugaccagaaccgacagaggcugguacugcgacaacgccggcagcgugagcuucuucccccaggccgagaccugcaaggugugcagcaacagaguguucugcgacaccaugaacagccugacccugcccagcgaggugaaccugugcaacguggacaucuucaaccccaaguacgacugcaagaucaugaccagcaagaccgacgugagcagcagcgugaucaccagccugggcgccaucgugagcugcuacggcaagaccaagugcaccgccagcaacaagaacaagggcaucaucaagaccuucagcaacggcugcgacuacgugagcaacaagggcguggacaccgugagcgugggcaacacccuguacuacgugaacaagcaggagggcaagagccuguacgugaagggcgagcccaucaucaacuucuacgacccccugguguuccccagcgacgaguucgacgccagcaucagccaggugaacgagaagaucaaccagagccuggccuucaucagaaagagcgacgagcugcugcacaacgugaacgccggcaagagcaccaccaacaucaugaucaccaccaucaucaucgugaucaucgugauccugcugagccugaucgccgugggccugcugcuguacugcaaggccagaagcacccccgugacccugagcaaggaccagcugagcggcaucaacaacaucgccuucagcaacugaggacuagucccuguucccagagcccacuuuuuuuucuuuuuuugaaauaaaauagccugucuuucagaucuaaaaaaaaaaaaaaaaaaaaaaaaaaaaaaaaaaaaaaaaaaaaaaaaaaaaaaaaaaaaaaaaugcaucccccccccccccccccccccccccccccccaaaggcucuuuucagagccaccagaauu

SEQ ID NO: 6936 - RNA, 1906 nt, Artificial Sequence
  mRNA product Design d-1 comprising derived and/or modified sequence from HRSV(A2)__F_DSCav1_mut7 (opt5)
gggagacccgugacccggaaguuguacggcuacgcgacuuucccucccacaaacccucgcgcccuuccuuuccuacuugggcccggcagaaagcuuaccauggagcugcucauccugaaggccaacgcuauuaccacaauccuuacggccgugaccuucugcuuugcgagcggccagaauauuacagaagaguucuaccaauccaccuguucugcugucagcaaaggguaucuguccgcccucagaacaggaugguacaccucuguuaucacaauugaacugagcaacaucaaggagaauaaaugcaacggcaccgacgccaaggugaaacuuaucaagcaggaacuggauaaguauaaaaaugcugugacggagcuccagaugcugauguguuccacccccgccacagggucuggaagcgcuauugccuccggcgucgcggugugcaagguucugcaccucgagggggaagugaacaaaaucaagagcgcccugcuuucuaccaauaaagcugucgugucccugagcaacggaguuucugugcucacauuuaagguccuggaccuuaagaauuacauugauaaacagcugcucccuauccugaacaagcaauccuguagcauuucuaauaucgagaccgugauggaguuccagcagaaaaacaaucggcugcucgaaauuacgcgcgaguuuuccgugaacgccggcgucacaaccccgguuagcacauauaugcugaccaauuccgaacuucugucucucaucaacgacaugcccaucaccaacgaucagaagaaacugaugagcaauaacgugcaaauugugagacagcaguccuacagcaucaugugcauuaucaaggaggaaguccuugcuuaugugguucagcugccucucuacggcgugauugacacacccuguuggaaacugcauacgucuccucugugcaccacaaauaccaaggagggguccaacaucugucucacacggaccgaucgcggaugguacugcgacaaugccggcagcgucucuuucuuuccccaagcggaaacguguaaggugugcagcaacagaguuuucugcgauacaaugaacucccugacccuuccuucugaggugaaucuguguaaugucgacaucuuuaacccgaaauaugauugcaagauuaugaccagcaaaacagacguguccagcucugucaucaccucccucggggccauugugagcuguuacggaaagacaaaaugcacggcuucuaauaagaacaagggcaucauuaaaaccuucuccaaugggugugauuauguuagcaacaagggaguggacacagucuccgugggcaauacccuguacuauguuaacaaacaggagggcaagucucuuuacgugaaaggggaacccaucaucaacuuuuaugacccucuggucuuccccagcgaugaguuugacgccuccauuucucaggugaaugaaaagaucaaccaaagccucgcuuucauucggaaguccgaugagcugcugcacaaugugaacgccggaaaaagcacaaccaauaucaugauuacgaccaucauuaucguuaucauugucauccuccugucucuuauugccgugggccugcuccuguacugcaaggcucgcuccacaccugugacccugagcaaagaccagcuuucugggaucaacaauauugcguucuccaacugaggacuagucccuguucccagagcccacuuuuuuuucuuuuuuugaaauaaaauagccugucuuucagaucuaaaaaaaaaaaaaaaaaaaaaaaaaaaaaaaaaaaaaaaaaaaaaaaaaaaaaaaaaaaaaaaaugcaucccccccccccccccccccccccccccccccaaaggcucuuuucagagccaccagaauu

SEQ ID NO: 6937 - RNA, 1906 nt, Artificial Sequence
  mRNA product Design d-1 comprising derived and/or modified sequence from HRSV(A2)__F_DSCav1_mut7 (opt6)
gggagacccgugacccggaaguuguacggcuacgcgacuuucccucccacaaacccucgcgcccuuccuuuccuacuugggcccggcagaaagcuuaccauggaauuacucauacucaaagcaaaugcaauuaccacuauacucacagcuguaacuuuuuguuucgccucaggacaaaacaucacagaagaauuuuaucaauccacaugcucugccguaucaaaaggcuaccuaucugcccuaagaacagguugguacacaucuguaauaacaaucgaauuauccaacaucaaagaaaacaaaugcaacggcacagacgcaaaagucaaacucaucaaacaagaauuagauaaauauaaaaacgcaguaacagaacuacaaaugcuaaugugcucuacacccgccacaggaucaggauccgcaaucgcuucuggaguagccguuugcaaaguauuacaccuagaaggagaaguaaauaaaauaaaauccgcacuacuaucaacuaauaaagcaguaguaucacuuucuaaugguguaucaguauuaacauucaaaguccucgaccuaaaaaauuacaucgacaaacaacuauuacccauccuuaauaaacaaucaugcuccauaucaaacauagaaacugucauggaauuucaacaaaaaaacaauagacuucuagaaaucacaagagaauuuucuguaaaugcaggaguaacuacaccaguaucaacauauauguuaaccaacuccgaacuacuaucacucauaaacgacaugccaauaacaaacgaccaaaaaaaacuaaugucaaauaacguucaaauaguaagacaacaaucauacucaaucaugugcauaauaaaagaagaaguuuuagcauacgucguacaacuuccccuauacggaguaauagacaccccuugcuggaaacuccacaccucaccacuaugcacuacaaacacaaaagaagguuccaacaucugcuuaacaagaaccgaucgaggaugguacugcgacaacgcugguuccguaucuuucuucccacaagcagaaacaugcaaaguaugcuccaauagaguauucugcgacaccaugaacucacuaacucuaccauccgaaguaaaccuaugcaacgucgacauauuuaauccaaaauaugacugcaaaauaaugacuucaaaaacagacguauccucaucaguaauaacauccuuaggagcaauaguaucauguuacggcaagacaaaauguacagccucaaacaaaaacaaagguaucauuaaaaccuucuccaacggcugcgacuacguaucaaauaaaggugucgauacaguaucaguaggaaacacacucuauuacguuaauaaacaagaaggaaagucauuauacguaaaaggagaaccaauaaucaauuucuacgauccccuagucuuucccucagaugaauuugacgcaagcaucucucaagucaacgaaaaaauaaaccaaucccuagccuucauaagaaaaucagaugaacuacuucauaacgucaacgccggaaaaucaacaaccaacauaaugaucacuacaaucauaauuguaauuauaguaauacuacuaucgcuaauugccguuggacuacuacuauauuguaaagcaagaucaacacccguuacucuauccaaagaucaauuaucaggaaucaacaacauagccuucucaaauuaaggacuagucccuguucccagagcccacuuuuuuuucuuuuuuugaaauaaaauagccugucuuucagaucuaaaaaaaaaaaaaaaaaaaaaaaaaaaaaaaaaaaaaaaaaaaaaaaaaaaaaaaaaaaaaaaaugcaucccccccccccccccccccccccccccccccaaaggcucuuuucagagccaccagaauu

SEQ ID NO: 6938 - RNA, 1906 nt, Artificial Sequence
  mRNA product Design d-1 comprising derived and/or modified sequence from HRSV(A2)__F_DSCav1_mut7 (opt11)
gggagacccgugacccggaaguuguacggcuacgcgacuuucccucccacaaacccucgcgcccuuccuuuccuacuugggcccggcagaaagcuuaccauggaacuacucauacuuaaagccaacgcaauaaccacaauccucaccgccgucacauucugcuucgccucgggacaaaacauaaccgaagaauuuuaccagucuaccugcuccgccgucuccaaggguuaccucuccgcgcuccgcaccgggugguacaccagcguuaucaccaucgaacuaucuaacauaaaagaaaacaagugcaacggaaccgacgcaaaagucaaacucaucaaacaagaacuagacaaauacaagaaugccgucaccgaacuacaaaugcucaugugcuccacccccgccaccggauccggcuccgccauugccuccggcgucgccguaugcaaaguccuucacuuggaaggagaaguuaacaaaauaaaaagcgcccuccugucgaccaacaaagcgguggucagccucuccaacggcgucucuguccucaccuucaaaguccucgaccucaagaacuacauagauaaacaacuacuccccauccuaaacaaacagucaugcagcauauccaacaucgaaaccgucauggaguuccaacagaaaaacaaccgccuccuugaaaucacccgcgaguucucugucaacgccggcgucaccacccccgucuccaccuacaugcucacaaacuccgaacuccucagccucaucaacgacaugccaaucaccaacgaccaaaagaaacucauguccaacaacguacaaaucguucgucaacaaucauacucaaucaugugcaucauuaaagaagaaguccucgcauacgucguccaacucccccucuauggggucaucgacaccccaugcuggaaacuccacaccucuccccuaugcaccaccaacaccaaagaaggcuccaacaucugccuaacccgaaccgaccgcggaugguacugcgacaacgccggcuccgucuccuucuucccccaggccgaaacauguaaagucugcuccaaccguguguucugcgacaccaugaacucacuaacccuccccuccgaagucaaccucugcaacgucgacaucuucaacccgaaauacgacugcaaaauaaugaccagcaaaacagacguauccucuagcgucauuaccagccuaggugcaaucguguccugcuacggcaaaacaaaaugcaccgccuccaacaaaaauaaaggaaucauaaaaaccuucuccaacggcugcgacuacgucagcaacaaaggagucgacaccgucuccguaggaaauacucuauacuaugucaacaaacaagaggguaaaucccucuacgucaaaggcgaacccaucaucaacuucuacgacccccucgucuuccccucugacgaguucgacgccagcauaucacaaguaaacgaaaagaucaaccaaucccucgcauucauucgcaaauccgacgaacuccuacacaacgucaacgccggaaaauccaccaccaacaucaugaucacuacuaucauuaucgucaucaucgucauccuccucucccucaucgcagucggccuucuacucuacugcaaggcacgcucuacacccguaacccugucuaaagaccaacucuccggcaucaacaacaucgcuuucuccaacuaaggacuagucccuguucccagagcccacuuuuuuuucuuuuuuugaaauaaaauagccugucuuucagaucuaaaaaaaaaaaaaaaaaaaaaaaaaaaaaaaaaaaaaaaaaaaaaaaaaaaaaaaaaaaaaaaaugcaucccccccccccccccccccccccccccccccaaaggcucuuuucagagccaccagaauu

SEQ ID NO: 6939 - RNA, 1961 nt, Artificial Sequence
  mRNA product Design d-2 comprising derived and/or modified sequence from HRSV(A2)__F_DSCav1_mut7 (opt1)
gggagagcggcucggccauuuugucccagucaguccggaggcugcggcugcagaaguaccgccugcggaguaacugcaaagaagcuuaccauggagcugcucauccugaaggccaacgccaucaccaccauccugacggcggugaccuucugcuucgccagcggccagaacaucaccgaggaguucuaccaguccacgugcagcgccgucuccaagggguaccucagcgcccugcggaccggcugguacaccuccgugaucaccaucgagcugagcaacaucaaggagaacaagugcaacgggaccgacgccaaggugaagcucaucaagcaggagcuggacaaguacaagaacgcggucacggagcugcagaugcugaugugcuccaccccggcaaccggcuccggcuccgccaucgcgagcggcgucgccgugugcaaggugcugcaccucgagggggaggucaacaagaucaagagcgcccugcuguccaccaacaaggccguggugagccucuccaacggcgucagcgugcugaccuucaaggugcuggaccucaagaacuacaucgacaagcagcugcugcccauccugaacaagcagagcugcuccaucagcaacaucgagacggugauggaguuccagcagaagaacaaccggcuccuggagaucacccgcgaguucagcgugaacgccggggucaccacccccguguccacguacaugcugaccaacagcgagcuccugucccugaucaacgacaugccgaucaccaacgaccagaagaagcucaugagcaacaacgugcagaucguccggcagcaguccuacagcaucaugugcaucaucaaggaggaggugcuggcguacgugguccagcugccccucuacggcgugaucgacacccccugcuggaagcugcacacgagcccccugugcaccaccaacaccaaggagggguccaacaucugccucacgcgcaccgaccggggcugguacugcgacaacgccggcagcgucuccuucuucccgcaggccgagaccugcaaggugugcagcaaccgcguguucugcgacaccaugaacucccugacgcugcccagcgagguaaaccucugcaacgucgacaucuucaaccccaaguacgacugcaagaucaugaccuccaagaccgacgugagcuccagcgugaucaccucccugggggccaucgucagcugcuacggcaagacgaagugcaccgccagcaacaagaacaaggggaucaucaagaccuucuccaacggcugcgacuacgugagcaacaagggcguggacaccguguccgucgggaacacccuguacuacgugaacaagcaggagggcaagagccucuacgugaagggggagcccaucaucaacuucuacgacccgcuggucuuccccuccgacgaguucgacgcgagcaucucccaggugaacgagaagaucaaccagagccuggccuucauccgcaaguccgacgagcugcuccacaacgugaacgccggcaagagcacgaccaacaucaugaucaccaccaucaucaucgucaucaucgugauccugcugucccucaucgccguggggcugcugcucuacugcaaggcccggagcacgcccgucacccuguccaaggaccagcugagcggcaucaacaacaucgcguucuccaacugaggacuaguaauaaggaaacuguaugaaugucugugggcaggaagugaagagauccuucuguaaagguuuuuggaauuaugucugcugaauaauaaacuuuuuugaaauaauaaaucugguagaaaaaugagaucuaaaaaaaaaaaaaaaaaaaaaaaaaaaaaaaaaaaaaaaaaaaaaaaaaaaaaaaaaaaaaaaaugcaucccccccccccccccccccccccccccccccaaaggcucuuuucagagccaccagaauu

SEQ ID NO: 6940 - RNA, 1961 nt, Artificial Sequence
  mRNA product Design d-2 comprising derived and/or modified sequence from HRSV(A2)__F_DSCav1_mut7 (opt1)
gggagagcggcucggccauuuugucccagucaguccggaggcugcggcugcagaaguaccgccugcggaguaacugcaaagaagcuuaccauggagcugcucauccugaaggccaacgccaucaccaccauccugacggcggugaccuucugcuucgccagcggccagaacaucaccgaggaguucuaccaguccacgugcagcgccgucuccaagggguaccucagcgcccugcgcaccggcugguacaccuccgugaucaccaucgagcugagcaacaucaaggagaacaagugcaacgggaccgacgccaaggugaagcucaucaagcaggagcuggacaaguacaagaacgcggucacggagcugcagaugcucaugugcuccacccccgccaccggcagcggguccgccaucgccagcggcguggcggugugcaagguccugcaccuggagggcgaggugaacaagaucaaguccgcccuccugagcaccaacaaggccguggucucccugagcaacgggguguccgugcucacguucaagguccuggaccugaagaacuacaucgacaagcagcuccugccgauccugaacaagcagagcugcuccaucagcaacaucgagaccgugauggaguuccagcagaagaacaaccggcuccuggagaucacccgcgaguucuccgugaacgccggcgucaccacgcccgugagcaccuacaugcugaccaacagcgagcuccugucccugaucaacgacaugcccaucaccaacgaccagaagaagcucaugagcaacaacgugcagaucguccggcagcaguccuacagcaucaugugcaucaucaaggaggaggugcuggccuacgugguccagcugccccucuacggggugaucgacacgccgugcuggaagcugcacaccagcccccugugcaccaccaacacgaaggagggcagcaacaucugccucacccgcaccgaccgggggugguacugcgacaacgcgggcuccgugagcuucuucccccaggccgagaccugcaaggucugcuccaaccgcguguucugcgacacgaugaacagccugacccugcccuccgaggucaaccucugcaacguggacaucuucaacccgaaguacgacugcaagaucaugaccagcaagaccgacguguccagcuccgucaucacgagccugggcgccaucguguccugcuacgggaagaccaagugcaccgccagcaacaagaacaagggcaucaucaagaccuucuccaacgggugcgacuacgugagcaacaagggcgucgacacggugagcgugggcaacacccuguacuacgucaacaagcaggaggggaagucccucuacgugaagggcgagcccaucaucaacuucuacgacccccugguguuccccagcgacgaguucgacgccuccaucagccaggucaacgagaagaucaaccagucccuggcguucauccggaaguccgacgagcuccugcacaacgugaacgccgggaaguccaccaccaacaucaugaucaccacgaucaucaucgugaucaucgucauccugcucagccugaucgccgugggccugcuccuguacugcaaggcccgcuccaccccggugacccugagcaaggaccagcuguccgggaucaacaacaucgccuucagcaacugaggacuaguaauaaggaaacuguaugaaugucugugggcaggaagugaagagauccuucuguaaagguuuuuggaauuaugucugcugaauaauaaacuuuuuugaaauaauaaaucugguagaaaaaugagaucuaaaaaaaaaaaaaaaaaaaaaaaaaaaaaaaaaaaaaaaaaaaaaaaaaaaaaaaaaaaaaaaaugcaucccccccccccccccccccccccccccccccaaaggcucuuuucagagccaccagaauu

SEQ ID NO: 6941 - RNA, 1961 nt, Artificial Sequence
  mRNA product Design d-2 comprising derived and/or modified sequence from HRSV(A2)__F_DSCav1_mut7 (opt2)
gggagagcggcucggccauuuugucccagucaguccggaggcugcggcugcagaaguaccgccugcggaguaacugcaaagaagcuuaccauggagcuccucauccucaaggccaacgccaucaccaccauccucaccgccgucaccuucugcuucgccuccggccagaacaucaccgaggaguucuaccaguccaccugcuccgccgucuccaagggcuaccucuccgcccuccgcaccggcugguacaccuccgucaucaccaucgagcucuccaacaucaaggagaacaagugcaacggcaccgacgccaaggucaagcucaucaagcaggagcucgacaaguacaagaacgccgucaccgagcuccagaugcucaugugcuccacccccgccaccggcuccggcuccgccaucgccuccggcgucgccgucugcaagguccuccaccucgagggcgaggucaacaagaucaaguccgcccuccucuccaccaacaaggccgucgucucccucuccaacggcgucuccguccucaccuucaagguccucgaccucaagaacuacaucgacaagcagcuccuccccauccucaacaagcaguccugcuccaucuccaacaucgagaccgucauggaguuccagcagaagaacaaccgccuccucgagaucacccgcgaguucuccgucaacgccggcgucaccacccccgucuccaccuacaugcucaccaacuccgagcuccucucccucaucaacgacaugcccaucaccaacgaccagaagaagcucauguccaacaacguccagaucguccgccagcaguccuacuccaucaugugcaucaucaaggaggagguccucgccuacgucguccagcucccccucuacggcgucaucgacacccccugcuggaagcuccacaccuccccccucugcaccaccaacaccaaggagggcuccaacaucugccucacccgcaccgaccgcggcugguacugcgacaacgccggcuccgucuccuucuucccccaggccgagaccugcaaggucugcuccaaccgcgucuucugcgacaccaugaacucccucacccuccccuccgaggucaaccucugcaacgucgacaucuucaaccccaaguacgacugcaagaucaugaccuccaagaccgacgucuccuccuccgucaucaccucccucggcgccaucgucuccugcuacggcaagaccaagugcaccgccuccaacaagaacaagggcaucaucaagaccuucuccaacggcugcgacuacgucuccaacaagggcgucgacaccgucuccgucggcaacacccucuacuacgucaacaagcaggagggcaagucccucuacgucaagggcgagcccaucaucaacuucuacgacccccucgucuuccccuccgacgaguucgacgccuccaucucccaggucaacgagaagaucaaccagucccucgccuucauccgcaaguccgacgagcuccuccacaacgucaacgccggcaaguccaccaccaacaucaugaucaccaccaucaucaucgucaucaucgucauccuccucucccucaucgccgucggccuccuccucuacugcaaggcccgcuccacccccgucacccucuccaaggaccagcucuccggcaucaacaacaucgccuucuccaacugaggacuaguaauaaggaaacuguaugaaugucugugggcaggaagugaagagauccuucuguaaagguuuuuggaauuaugucugcugaauaauaaacuuuuuugaaauaauaaaucugguagaaaaaugagaucuaaaaaaaaaaaaaaaaaaaaaaaaaaaaaaaaaaaaaaaaaaaaaaaaaaaaaaaaaaaaaaaaugcaucccccccccccccccccccccccccccccccaaaggcucuuuucagagccaccagaauu

SEQ ID NO: 6942 - RNA, 1961 nt, Artificial Sequence
  mRNA product Design d-2 comprising derived and/or modified sequence from HRSV(A2)__F_DSCav1_mut7 (opt3)
gggagagcggcucggccauuuugucccagucaguccggaggcugcggcugcagaaguaccgccugcggaguaacugcaaagaagcuuaccauggagcugcucauccuuaaggccaacgcuauuaccacaauacugacugcagugacguucugcuuugccagcggccagaauaucaccgaagaguucuaccaauccacauguucugcggucucaaaaggguauuugagugcuuuaagaacuggaugguacaccagcguuauuacaaucgaacuguccaacauuaaggagaauaaaugcaacgguaccgacgccaaggugaaacuaaucaagcaggaacucgauaaguauaaaaaugcaguaacugagcugcagaugcuuauguguucuacacccgccaccggcucggggucagcuauagcaagcggaguggccgucugcaaggugcugcacuuggagggcgaaguuaacaaaaucaagagugcucuccuguccacgaauaaagccguggucucucugagcaacgguguguccguacucacuuuuaagguuuuagaccugaagaauuacauugauaaacagcuuuugccuauccugaacaagcaaucauguaguauuagcaauaucgagaccgugauggaguuccagcagaaaaacaauaggcuacucgaaauaacacgggaguuuucugucaacgcgggggugacuaccccaguguccacauauaugcugaccaauucagaacuucugagcuugauuaacgacaugccgaucacgaacgaucagaagaaacucaugaguaauaacguccaaauuguucgccagcagucuuacuccaucaugugcaucauuaaggaggaagugcuggcauauguagugcaguuaccccuguacggagucauagacacuccuuguuggaaacuccauacaagcccacuuugcaccacuaauacaaaggagggcucgaacaucugucugacccgaacggaucguggcugguacugcgacaaugccgggucuguguccuucuuuccccaagcugaaaccuguaagguuugcucaaacagaguguucugcgauacaaugaauaguuugacucuaccuagcgaggucaaccuguguaauguggacauuuuuaacccaaaauaugauugcaagaucaugaccuccaaaacagacguaucuagcucaguuauaacuagccucggagccauuguguccuguuacgguaagaccaaaugcacagcaagcaauaagaacaagggcaucaucaaaaccuucucuaaugggugugauuaugucucaaacaagggaguggacacugucagugugggcaauacgcuguacuauguuaacaaacaggaggguaagagccuuuacgugaaaggggaacccauuaucaacuuuuaugacccucugguauucccauccgaugaguuugacgcuucuauuucgcaggucaaugaaaagauaaaccaaaguuuggccuucaucaggaaguccgaugagcuccugcacaaugugaacgcgggaaaaucaacaaccaauauuaugaucacuaccaucauuauaguuaucauugugaucuuacugagucuaauugccgucggccuccugcuuuacugcaaggcacggucuacaccggugaccuugagcaaagaccagcuguccggcaucaacaauauagcuuucucaaacugaggacuaguaauaaggaaacuguaugaaugucugugggcaggaagugaagagauccuucuguaaagguuuuuggaauuaugucugcugaauaauaaacuuuuuugaaauaauaaaucugguagaaaaaugagaucuaaaaaaaaaaaaaaaaaaaaaaaaaaaaaaaaaaaaaaaaaaaaaaaaaaaaaaaaaaaaaaaaugcaucccccccccccccccccccccccccccccccaaaggcucuuuucagagccaccagaauu

SEQ ID NO: 6943 - RNA, 1961 nt, Artificial Sequence
  mRNA product Design d-2 comprising derived and/or modified sequence from HRSV(A2)__F_DSCav1_mut7 (opt4)
gggagagcggcucggccauuuugucccagucaguccggaggcugcggcugcagaaguaccgccugcggaguaacugcaaagaagcuuaccauggagcugcugauccugaaggccaacgccaucaccaccauccugaccgccgugaccuucugcuucgccagcggccagaacaucaccgaggaguucuaccagagcaccugcagcgccgugagcaagggcuaccugagcgcccugagaaccggcugguacaccagcgugaucaccaucgagcugagcaacaucaaggagaacaagugcaacggcaccgacgccaaggugaagcugaucaagcaggagcuggacaaguacaagaacgccgugaccgagcugcagaugcugaugugcagcacccccgccaccggcagcggcagcgccaucgccagcggcguggccgugugcaaggugcugcaccuggagggcgaggugaacaagaucaagagcgcccugcugagcaccaacaaggccguggugagccugagcaacggcgugagcgugcugaccuucaaggugcuggaccugaagaacuacaucgacaagcagcugcugcccauccugaacaagcagagcugcagcaucagcaacaucgagaccgugauggaguuccagcagaagaacaacagacugcuggagaucaccagagaguucagcgugaacgccggcgugaccacccccgugagcaccuacaugcugaccaacagcgagcugcugagccugaucaacgacaugcccaucaccaacgaccagaagaagcugaugagcaacaacgugcagaucgugagacagcagagcuacagcaucaugugcaucaucaaggaggaggugcuggccuacguggugcagcugccccuguacggcgugaucgacacccccugcuggaagcugcacaccagcccccugugcaccaccaacaccaaggagggcagcaacaucugccugaccagaaccgacagaggcugguacugcgacaacgccggcagcgugagcuucuucccccaggccgagaccugcaaggugugcagcaacagaguguucugcgacaccaugaacagccugacccugcccagcgaggugaaccugugcaacguggacaucuucaaccccaaguacgacugcaagaucaugaccagcaagaccgacgugagcagcagcgugaucaccagccugggcgccaucgugagcugcuacggcaagaccaagugcaccgccagcaacaagaacaagggcaucaucaagaccuucagcaacggcugcgacuacgugagcaacaagggcguggacaccgugagcgugggcaacacccuguacuacgugaacaagcaggagggcaagagccuguacgugaagggcgagcccaucaucaacuucuacgacccccugguguuccccagcgacgaguucgacgccagcaucagccaggugaacgagaagaucaaccagagccuggccuucaucagaaagagcgacgagcugcugcacaacgugaacgccggcaagagcaccaccaacaucaugaucaccaccaucaucaucgugaucaucgugauccugcugagccugaucgccgugggccugcugcuguacugcaaggccagaagcacccccgugacccugagcaaggaccagcugagcggcaucaacaacaucgccuucagcaacugaggacuaguaauaaggaaacuguaugaaugucugugggcaggaagugaagagauccuucuguaaagguuuuuggaauuaugucugcugaauaauaaacuuuuuugaaauaauaaaucugguagaaaaaugagaucuaaaaaaaaaaaaaaaaaaaaaaaaaaaaaaaaaaaaaaaaaaaaaaaaaaaaaaaaaaaaaaaaugcaucccccccccccccccccccccccccccccccaaaggcucuuuucagagccaccagaauu

SEQ ID NO: 6944 - RNA, 1961 nt, Artificial Sequence
  mRNA product Design d-2 comprising derived and/or modified sequence from HRSV(A2)__F_DSCav1_mut7 (opt5)
gggagagcggcucggccauuuugucccagucaguccggaggcugcggcugcagaaguaccgccugcggaguaacugcaaagaagcuuaccauggagcugcucauccugaaggccaacgcuauuaccacaauccuuacggccgugaccuucugcuuugcgagcggccagaauauuacagaagaguucuaccaauccaccuguucugcugucagcaaaggguaucuguccgcccucagaacaggaugguacaccucuguuaucacaauugaacugagcaacaucaaggagaauaaaugcaacggcaccgacgccaaggugaaacuuaucaagcaggaacuggauaaguauaaaaaugcugugacggagcuccagaugcugauguguuccacccccgccacagggucuggaagcgcuauugccuccggcgucgcggugugcaagguucugcaccucgagggggaagugaacaaaaucaagagcgcccugcuuucuaccaauaaagcugucgugucccugagcaacggaguuucugugcucacauuuaagguccuggaccuuaagaauuacauugauaaacagcugcucccuauccugaacaagcaauccuguagcauuucuaauaucgagaccgugauggaguuccagcagaaaaacaaucggcugcucgaaauuacgcgcgaguuuuccgugaacgccggcgucacaaccccgguuagcacauauaugcugaccaauuccgaacuucugucucucaucaacgacaugcccaucaccaacgaucagaagaaacugaugagcaauaacgugcaaauugugagacagcaguccuacagcaucaugugcauuaucaaggaggaaguccuugcuuaugugguucagcugccucucuacggcgugauugacacacccuguuggaaacugcauacgucuccucugugcaccacaaauaccaaggagggguccaacaucugucucacacggaccgaucgcggaugguacugcgacaaugccggcagcgucucuuucuuuccccaagcggaaacguguaaggugugcagcaacagaguuuucugcgauacaaugaacucccugacccuuccuucugaggugaaucuguguaaugucgacaucuuuaacccgaaauaugauugcaagauuaugaccagcaaaacagacguguccagcucugucaucaccucccucggggccauugugagcuguuacggaaagacaaaaugcacggcuucuaauaagaacaagggcaucauuaaaaccuucuccaaugggugugauuauguuagcaacaagggaguggacacagucuccgugggcaauacccuguacuauguuaacaaacaggagggcaagucucuuuacgugaaaggggaacccaucaucaacuuuuaugacccucuggucuuccccagcgaugaguuugacgccuccauuucucaggugaaugaaaagaucaaccaaagccucgcuuucauucggaaguccgaugagcugcugcacaaugugaacgccggaaaaagcacaaccaauaucaugauuacgaccaucauuaucguuaucauugucauccuccugucucuuauugccgugggccugcuccuguacugcaaggcucgcuccacaccugugacccugagcaaagaccagcuuucugggaucaacaauauugcguucuccaacugaggacuaguaauaaggaaacuguaugaaugucugugggcaggaagugaagagauccuucuguaaagguuuuuggaauuaugucugcugaauaauaaacuuuuuugaaauaauaaaucugguagaaaaaugagaucuaaaaaaaaaaaaaaaaaaaaaaaaaaaaaaaaaaaaaaaaaaaaaaaaaaaaaaaaaaaaaaaaugcaucccccccccccccccccccccccccccccccaaaggcucuuuucagagccaccagaauu

SEQ ID NO: 6945 - RNA, 1961 nt, Artificial Sequence
  mRNA product Design d-2 comprising derived and/or modified sequence from HRSV(A2)__F_DSCav1_mut7 (opt6)
gggagagcggcucggccauuuugucccagucaguccggaggcugcggcugcagaaguaccgccugcggaguaacugcaaagaagcuuaccauggaauuacucauacucaaagcaaaugcaauuaccacuauacucacagcuguaacuuuuuguuucgccucaggacaaaacaucacagaagaauuuuaucaauccacaugcucugccguaucaaaaggcuaccuaucugcccuaagaacagguugguacacaucuguaauaacaaucgaauuauccaacaucaaagaaaacaaaugcaacggcacagacgcaaaagucaaacucaucaaacaagaauuagauaaauauaaaaacgcaguaacagaacuacaaaugcuaaugugcucuacacccgccacaggaucaggauccgcaaucgcuucuggaguagccguuugcaaaguauuacaccuagaaggagaaguaaauaaaauaaaauccgcacuacuaucaacuaauaaagcaguaguaucacuuucuaaugguguaucaguauuaacauucaaaguccucgaccuaaaaaauuacaucgacaaacaacuauuacccauccuuaauaaacaaucaugcuccauaucaaacauagaaacugucauggaauuucaacaaaaaaacaauagacuucuagaaaucacaagagaauuuucuguaaaugcaggaguaacuacaccaguaucaacauauauguuaaccaacuccgaacuacuaucacucauaaacgacaugccaauaacaaacgaccaaaaaaaacuaaugucaaauaacguucaaauaguaagacaacaaucauacucaaucaugugcauaauaaaagaagaaguuuuagcauacgucguacaacuuccccuauacggaguaauagacaccccuugcuggaaacuccacaccucaccacuaugcacuacaaacacaaaagaagguuccaacaucugcuuaacaagaaccgaucgaggaugguacugcgacaacgcugguuccguaucuuucuucccacaagcagaaacaugcaaaguaugcuccaauagaguauucugcgacaccaugaacucacuaacucuaccauccgaaguaaaccuaugcaacgucgacauauuuaauccaaaauaugacugcaaaauaaugacuucaaaaacagacguauccucaucaguaauaacauccuuaggagcaauaguaucauguuacggcaagacaaaauguacagccucaaacaaaaacaaagguaucauuaaaaccuucuccaacggcugcgacuacguaucaaauaaaggugucgauacaguaucaguaggaaacacacucuauuacguuaauaaacaagaaggaaagucauuauacguaaaaggagaaccaauaaucaauuucuacgauccccuagucuuucccucagaugaauuugacgcaagcaucucucaagucaacgaaaaaauaaaccaaucccuagccuucauaagaaaaucagaugaacuacuucauaacgucaacgccggaaaaucaacaaccaacauaaugaucacuacaaucauaauuguaauuauaguaauacuacuaucgcuaauugccguuggacuacuacuauauuguaaagcaagaucaacacccguuacucuauccaaagaucaauuaucaggaaucaacaacauagccuucucaaauuaaggacuaguaauaaggaaacuguaugaaugucugugggcaggaagugaagagauccuucuguaaagguuuuuggaauuaugucugcugaauaauaaacuuuuuugaaauaauaaaucugguagaaaaaugagaucuaaaaaaaaaaaaaaaaaaaaaaaaaaaaaaaaaaaaaaaaaaaaaaaaaaaaaaaaaaaaaaaaugcaucccccccccccccccccccccccccccccccaaaggcucuuuucagagccaccagaauu

SEQ ID NO: 6946 - RNA, 1961 nt, Artificial Sequence
  mRNA product Design d-2 comprising derived and/or modified sequence from HRSV(A2)__F_DSCav1_mut7 (opt11)
gggagagcggcucggccauuuugucccagucaguccggaggcugcggcugcagaaguaccgccugcggaguaacugcaaagaagcuuaccauggaacuacucauacuuaaagccaacgcaauaaccacaauccucaccgccgucacauucugcuucgccucgggacaaaacauaaccgaagaauuuuaccagucuaccugcuccgccgucuccaaggguuaccucuccgcgcuccgcaccgggugguacaccagcguuaucaccaucgaacuaucuaacauaaaagaaaacaagugcaacggaaccgacgcaaaagucaaacucaucaaacaagaacuagacaaauacaagaaugccgucaccgaacuacaaaugcucaugugcuccacccccgccaccggauccggcuccgccauugccuccggcgucgccguaugcaaaguccuucacuuggaaggagaaguuaacaaaauaaaaagcgcccuccugucgaccaacaaagcgguggucagccucuccaacggcgucucuguccucaccuucaaaguccucgaccucaagaacuacauagauaaacaacuacuccccauccuaaacaaacagucaugcagcauauccaacaucgaaaccgucauggaguuccaacagaaaaacaaccgccuccuugaaaucacccgcgaguucucugucaacgccggcgucaccacccccgucuccaccuacaugcucacaaacuccgaacuccucagccucaucaacgacaugccaaucaccaacgaccaaaagaaacucauguccaacaacguacaaaucguucgucaacaaucauacucaaucaugugcaucauuaaagaagaaguccucgcauacgucguccaacucccccucuauggggucaucgacaccccaugcuggaaacuccacaccucuccccuaugcaccaccaacaccaaagaaggcuccaacaucugccuaacccgaaccgaccgcggaugguacugcgacaacgccggcuccgucuccuucuucccccaggccgaaacauguaaagucugcuccaaccguguguucugcgacaccaugaacucacuaacccuccccuccgaagucaaccucugcaacgucgacaucuucaacccgaaauacgacugcaaaauaaugaccagcaaaacagacguauccucuagcgucauuaccagccuaggugcaaucguguccugcuacggcaaaacaaaaugcaccgccuccaacaaaaauaaaggaaucauaaaaaccuucuccaacggcugcgacuacgucagcaacaaaggagucgacaccgucuccguaggaaauacucuauacuaugucaacaaacaagaggguaaaucccucuacgucaaaggcgaacccaucaucaacuucuacgacccccucgucuuccccucugacgaguucgacgccagcauaucacaaguaaacgaaaagaucaaccaaucccucgcauucauucgcaaauccgacgaacuccuacacaacgucaacgccggaaaauccaccaccaacaucaugaucacuacuaucauuaucgucaucaucgucauccuccucucccucaucgcagucggccuucuacucuacugcaaggcacgcucuacacccguaacccugucuaaagaccaacucuccggcaucaacaacaucgcuuucuccaacuaaggacuaguaauaaggaaacuguaugaaugucugugggcaggaagugaagagauccuucuguaaagguuuuuggaauuaugucugcugaauaauaaacuuuuuugaaauaauaaaucugguagaaaaaugagaucuaaaaaaaaaaaaaaaaaaaaaaaaaaaaaaaaaaaaaaaaaaaaaaaaaaaaaaaaaaaaaaaaugcaucccccccccccccccccccccccccccccccaaaggcucuuuucagagccaccagaauu

SEQ ID NO: 6947 - RNA, 2277 nt, Artificial Sequence
  mRNA product Design d-3 comprising derived and/or modified sequence from HRSV(A2)__F_DSCav1_mut7 (opt1)
gggagagggcgcuuggcuugcaaggacccugagcugcggcauugaagcacacccaacccaacucgacugaagucagccucacugaaccggaucugagaaucuucucucucugggcuugccagggcucuccgaaccuagcuagcauccucuucaauuccaacuagaaagcuuaccauggagcugcucauccugaaggccaacgccaucaccaccauccugacggcggugaccuucugcuucgccagcggccagaacaucaccgaggaguucuaccaguccacgugcagcgccgucuccaagggguaccucagcgcccugcggaccggcugguacaccuccgugaucaccaucgagcugagcaacaucaaggagaacaagugcaacgggaccgacgccaaggugaagcucaucaagcaggagcuggacaaguacaagaacgcggucacggagcugcagaugcugaugugcuccaccccggcaaccggcuccggcuccgccaucgcgagcggcgucgccgugugcaaggugcugcaccucgagggggaggucaacaagaucaagagcgcccugcuguccaccaacaaggccguggugagccucuccaacggcgucagcgugcugaccuucaaggugcuggaccucaagaacuacaucgacaagcagcugcugcccauccugaacaagcagagcugcuccaucagcaacaucgagacggugauggaguuccagcagaagaacaaccggcuccuggagaucacccgcgaguucagcgugaacgccggggucaccacccccguguccacguacaugcugaccaacagcgagcuccugucccugaucaacgacaugccgaucaccaacgaccagaagaagcucaugagcaacaacgugcagaucguccggcagcaguccuacagcaucaugugcaucaucaaggaggaggugcuggcguacgugguccagcugccccucuacggcgugaucgacacccccugcuggaagcugcacacgagcccccugugcaccaccaacaccaaggagggguccaacaucugccucacgcgcaccgaccggggcugguacugcgacaacgccggcagcgucuccuucuucccgcaggccgagaccugcaaggugugcagcaaccgcguguucugcgacaccaugaacucccugacgcugcccagcgagguaaaccucugcaacgucgacaucuucaaccccaaguacgacugcaagaucaugaccuccaagaccgacgugagcuccagcgugaucaccucccugggggccaucgucagcugcuacggcaagacgaagugcaccgccagcaacaagaacaaggggaucaucaagaccuucuccaacggcugcgacuacgugagcaacaagggcguggacaccguguccgucgggaacacccuguacuacgugaacaagcaggagggcaagagccucuacgugaagggggagcccaucaucaacuucuacgacccgcuggucuuccccuccgacgaguucgacgcgagcaucucccaggugaacgagaagaucaaccagagccuggccuucauccgcaaguccgacgagcugcuccacaacgugaacgccggcaagagcacgaccaacaucaugaucaccaccaucaucaucgucaucaucgugauccugcugucccucaucgccguggggcugcugcucuacugcaaggcccggagcacgcccgucacccuguccaaggaccagcugagcggcaucaacaacaucgcguucuccaacugaggacuagugaagggaacacccaaauuuaauucagccuuaagcacaauuaauuaagagugaaacguaauuguacaagcaguuggucacccaccauagggcaugaucaacaccgcaaccuuuccuuuuucccccagugauucugaaaaaccccucuucccuucagcuugcuuagauguuccaaauuuaguaagcuuaaggcggccuacagaagaaaaagaaaaaaaaggccacaaaaguucccucucacuuucaguaaauaaaauaaaagcagcaacagaaauaaagaaauaaaugaaauucaaaaugaaauaaauauuguguugugcagcauuaaaaaaucaauaaaaauuaaaaaugagcaagaucuaaaaaaaaaaaaaaaaaaaaaaaaaaaaaaaaaaaaaaaaaaaaaaaaaaaaaaaaaaaaaaaaugcaucccccccccccccccccccccccccccccccaaaggcucuuuucagagccaccagaauu

SEQ ID NO: 6948 - RNA, 2277 nt, Artificial Sequence
  mRNA product Design d-3 comprising derived and/or modified sequence from HRSV(A2)__F_DSCav1_mut7 (opt1)
gggagagggcgcuuggcuugcaaggacccugagcugcggcauugaagcacacccaacccaacucgacugaagucagccucacugaaccggaucugagaaucuucucucucugggcuugccagggcucuccgaaccuagcuagcauccucuucaauuccaacuagaaagcuuaccauggagcugcucauccugaaggccaacgccaucaccaccauccugacggcggugaccuucugcuucgccagcggccagaacaucaccgaggaguucuaccaguccacgugcagcgccgucuccaagggguaccucagcgcccugcgcaccggcugguacaccuccgugaucaccaucgagcugagcaacaucaaggagaacaagugcaacgggaccgacgccaaggugaagcucaucaagcaggagcuggacaaguacaagaacgcggucacggagcugcagaugcucaugugcuccacccccgccaccggcagcggguccgccaucgccagcggcguggcggugugcaagguccugcaccuggagggcgaggugaacaagaucaaguccgcccuccugagcaccaacaaggccguggucucccugagcaacgggguguccgugcucacguucaagguccuggaccugaagaacuacaucgacaagcagcuccugccgauccugaacaagcagagcugcuccaucagcaacaucgagaccgugauggaguuccagcagaagaacaaccggcuccuggagaucacccgcgaguucuccgugaacgccggcgucaccacgcccgugagcaccuacaugcugaccaacagcgagcuccugucccugaucaacgacaugcccaucaccaacgaccagaagaagcucaugagcaacaacgugcagaucguccggcagcaguccuacagcaucaugugcaucaucaaggaggaggugcuggccuacgugguccagcugccccucuacggggugaucgacacgccgugcuggaagcugcacaccagcccccugugcaccaccaacacgaaggagggcagcaacaucugccucacccgcaccgaccgggggugguacugcgacaacgcgggcuccgugagcuucuucccccaggccgagaccugcaaggucugcuccaaccgcguguucugcgacacgaugaacagccugacccugcccuccgaggucaaccucugcaacguggacaucuucaacccgaaguacgacugcaagaucaugaccagcaagaccgacguguccagcuccgucaucacgagccugggcgccaucguguccugcuacgggaagaccaagugcaccgccagcaacaagaacaagggcaucaucaagaccuucuccaacgggugcgacuacgugagcaacaagggcgucgacacggugagcgugggcaacacccuguacuacgucaacaagcaggaggggaagucccucuacgugaagggcgagcccaucaucaacuucuacgacccccugguguuccccagcgacgaguucgacgccuccaucagccaggucaacgagaagaucaaccagucccuggcguucauccggaaguccgacgagcuccugcacaacgugaacgccgggaaguccaccaccaacaucaugaucaccacgaucaucaucgugaucaucgucauccugcucagccugaucgccgugggccugcuccuguacugcaaggcccgcuccaccccggugacccugagcaaggaccagcuguccgggaucaacaacaucgccuucagcaacugaggacuagugaagggaacacccaaauuuaauucagccuuaagcacaauuaauuaagagugaaacguaauuguacaagcaguuggucacccaccauagggcaugaucaacaccgcaaccuuuccuuuuucccccagugauucugaaaaaccccucuucccuucagcuugcuuagauguuccaaauuuaguaagcuuaaggcggccuacagaagaaaaagaaaaaaaaggccacaaaaguucccucucacuuucaguaaauaaaauaaaagcagcaacagaaauaaagaaauaaaugaaauucaaaaugaaauaaauauuguguugugcagcauuaaaaaaucaauaaaaauuaaaaaugagcaagaucuaaaaaaaaaaaaaaaaaaaaaaaaaaaaaaaaaaaaaaaaaaaaaaaaaaaaaaaaaaaaaaaaugcaucccccccccccccccccccccccccccccccaaaggcucuuuucagagccaccagaauu

SEQ ID NO: 6949 - RNA, 2277 nt, Artificial Sequence
  mRNA product Design d-3 comprising derived and/or modified sequence from HRSV(A2)__F_DSCav1_mut7 (opt2)
gggagagggcgcuuggcuugcaaggacccugagcugcggcauugaagcacacccaacccaacucgacugaagucagccucacugaaccggaucugagaaucuucucucucugggcuugccagggcucuccgaaccuagcuagcauccucuucaauuccaacuagaaagcuuaccauggagcuccucauccucaaggccaacgccaucaccaccauccucaccgccgucaccuucugcuucgccuccggccagaacaucaccgaggaguucuaccaguccaccugcuccgccgucuccaagggcuaccucuccgcccuccgcaccggcugguacaccuccgucaucaccaucgagcucuccaacaucaaggagaacaagugcaacggcaccgacgccaaggucaagcucaucaagcaggagcucgacaaguacaagaacgccgucaccgagcuccagaugcucaugugcuccacccccgccaccggcuccggcuccgccaucgccuccggcgucgccgucugcaagguccuccaccucgagggcgaggucaacaagaucaaguccgcccuccucuccaccaacaaggccgucgucucccucuccaacggcgucuccguccucaccuucaagguccucgaccucaagaacuacaucgacaagcagcuccuccccauccucaacaagcaguccugcuccaucuccaacaucgagaccgucauggaguuccagcagaagaacaaccgccuccucgagaucacccgcgaguucuccgucaacgccggcgucaccacccccgucuccaccuacaugcucaccaacuccgagcuccucucccucaucaacgacaugcccaucaccaacgaccagaagaagcucauguccaacaacguccagaucguccgccagcaguccuacuccaucaugugcaucaucaaggaggagguccucgccuacgucguccagcucccccucuacggcgucaucgacacccccugcuggaagcuccacaccuccccccucugcaccaccaacaccaaggagggcuccaacaucugccucacccgcaccgaccgcggcugguacugcgacaacgccggcuccgucuccuucuucccccaggccgagaccugcaaggucugcuccaaccgcgucuucugcgacaccaugaacucccucacccuccccuccgaggucaaccucugcaacgucgacaucuucaaccccaaguacgacugcaagaucaugaccuccaagaccgacgucuccuccuccgucaucaccucccucggcgccaucgucuccugcuacggcaagaccaagugcaccgccuccaacaagaacaagggcaucaucaagaccuucuccaacggcugcgacuacgucuccaacaagggcgucgacaccgucuccgucggcaacacccucuacuacgucaacaagcaggagggcaagucccucuacgucaagggcgagcccaucaucaacuucuacgacccccucgucuuccccuccgacgaguucgacgccuccaucucccaggucaacgagaagaucaaccagucccucgccuucauccgcaaguccgacgagcuccuccacaacgucaacgccggcaaguccaccaccaacaucaugaucaccaccaucaucaucgucaucaucgucauccuccucucccucaucgccgucggccuccuccucuacugcaaggcccgcuccacccccgucacccucuccaaggaccagcucuccggcaucaacaacaucgccuucuccaacugaggacuagugaagggaacacccaaauuuaauucagccuuaagcacaauuaauuaagagugaaacguaauuguacaagcaguuggucacccaccauagggcaugaucaacaccgcaaccuuuccuuuuucccccagugauucugaaaaaccccucuucccuucagcuugcuuagauguuccaaauuuaguaagcuuaaggcggccuacagaagaaaaagaaaaaaaaggccacaaaaguucccucucacuuucaguaaauaaaauaaaagcagcaacagaaauaaagaaauaaaugaaauucaaaaugaaauaaauauuguguugugcagcauuaaaaaaucaauaaaaauuaaaaaugagcaagaucuaaaaaaaaaaaaaaaaaaaaaaaaaaaaaaaaaaaaaaaaaaaaaaaaaaaaaaaaaaaaaaaaugcaucccccccccccccccccccccccccccccccaaaggcucuuuucagagccaccagaauu

SEQ ID NO: 6950 - RNA, 2277 nt, Artificial Sequence
  mRNA product Design d-3 comprising derived and/or modified sequence from HRSV(A2)__F_DSCav1_mut7 (opt3)
gggagagggcgcuuggcuugcaaggacccugagcugcggcauugaagcacacccaacccaacucgacugaagucagccucacugaaccggaucugagaaucuucucucucugggcuugccagggcucuccgaaccuagcuagcauccucuucaauuccaacuagaaagcuuaccauggagcugcucauccuuaaggccaacgcuauuaccacaauacugacugcagugacguucugcuuugccagcggccagaauaucaccgaagaguucuaccaauccacauguucugcggucucaaaaggguauuugagugcuuuaagaacuggaugguacaccagcguuauuacaaucgaacuguccaacauuaaggagaauaaaugcaacgguaccgacgccaaggugaaacuaaucaagcaggaacucgauaaguauaaaaaugcaguaacugagcugcagaugcuuauguguucuacacccgccaccggcucggggucagcuauagcaagcggaguggccgucugcaaggugcugcacuuggagggcgaaguuaacaaaaucaagagugcucuccuguccacgaauaaagccguggucucucugagcaacgguguguccguacucacuuuuaagguuuuagaccugaagaauuacauugauaaacagcuuuugccuauccugaacaagcaaucauguaguauuagcaauaucgagaccgugauggaguuccagcagaaaaacaauaggcuacucgaaauaacacgggaguuuucugucaacgcgggggugacuaccccaguguccacauauaugcugaccaauucagaacuucugagcuugauuaacgacaugccgaucacgaacgaucagaagaaacucaugaguaauaacguccaaauuguucgccagcagucuuacuccaucaugugcaucauuaaggaggaagugcuggcauauguagugcaguuaccccuguacggagucauagacacuccuuguuggaaacuccauacaagcccacuuugcaccacuaauacaaaggagggcucgaacaucugucugacccgaacggaucguggcugguacugcgacaaugccgggucuguguccuucuuuccccaagcugaaaccuguaagguuugcucaaacagaguguucugcgauacaaugaauaguuugacucuaccuagcgaggucaaccuguguaauguggacauuuuuaacccaaaauaugauugcaagaucaugaccuccaaaacagacguaucuagcucaguuauaacuagccucggagccauuguguccuguuacgguaagaccaaaugcacagcaagcaauaagaacaagggcaucaucaaaaccuucucuaaugggugugauuaugucucaaacaagggaguggacacugucagugugggcaauacgcuguacuauguuaacaaacaggaggguaagagccuuuacgugaaaggggaacccauuaucaacuuuuaugacccucugguauucccauccgaugaguuugacgcuucuauuucgcaggucaaugaaaagauaaaccaaaguuuggccuucaucaggaaguccgaugagcuccugcacaaugugaacgcgggaaaaucaacaaccaauauuaugaucacuaccaucauuauaguuaucauugugaucuuacugagucuaauugccgucggccuccugcuuuacugcaaggcacggucuacaccggugaccuugagcaaagaccagcuguccggcaucaacaauauagcuuucucaaacugaggacuagugaagggaacacccaaauuuaauucagccuuaagcacaauuaauuaagagugaaacguaauuguacaagcaguuggucacccaccauagggcaugaucaacaccgcaaccuuuccuuuuucccccagugauucugaaaaaccccucuucccuucagcuugcuuagauguuccaaauuuaguaagcuuaaggcggccuacagaagaaaaagaaaaaaaaggccacaaaaguucccucucacuuucaguaaauaaaauaaaagcagcaacagaaauaaagaaauaaaugaaauucaaaaugaaauaaauauuguguugugcagcauuaaaaaaucaauaaaaauuaaaaaugagcaagaucuaaaaaaaaaaaaaaaaaaaaaaaaaaaaaaaaaaaaaaaaaaaaaaaaaaaaaaaaaaaaaaaaugcaucccccccccccccccccccccccccccccccaaaggcucuuuucagagccaccagaauu

SEQ ID NO: 6951 - RNA, 2277 nt, Artificial Sequence
  mRNA product Design d-3 comprising derived and/or modified sequence from HRSV(A2)__F_DSCav1_mut7 (opt4)
gggagagggcgcuuggcuugcaaggacccugagcugcggcauugaagcacacccaacccaacucgacugaagucagccucacugaaccggaucugagaaucuucucucucugggcuugccagggcucuccgaaccuagcuagcauccucuucaauuccaacuagaaagcuuaccauggagcugcugauccugaaggccaacgccaucaccaccauccugaccgccgugaccuucugcuucgccagcggccagaacaucaccgaggaguucuaccagagcaccugcagcgccgugagcaagggcuaccugagcgcccugagaaccggcugguacaccagcgugaucaccaucgagcugagcaacaucaaggagaacaagugcaacggcaccgacgccaaggugaagcugaucaagcaggagcuggacaaguacaagaacgccgugaccgagcugcagaugcugaugugcagcacccccgccaccggcagcggcagcgccaucgccagcggcguggccgugugcaaggugcugcaccuggagggcgaggugaacaagaucaagagcgcccugcugagcaccaacaaggccguggugagccugagcaacggcgugagcgugcugaccuucaaggugcuggaccugaagaacuacaucgacaagcagcugcugcccauccugaacaagcagagcugcagcaucagcaacaucgagaccgugauggaguuccagcagaagaacaacagacugcuggagaucaccagagaguucagcgugaacgccggcgugaccacccccgugagcaccuacaugcugaccaacagcgagcugcugagccugaucaacgacaugcccaucaccaacgaccagaagaagcugaugagcaacaacgugcagaucgugagacagcagagcuacagcaucaugugcaucaucaaggaggaggugcuggccuacguggugcagcugccccuguacggcgugaucgacacccccugcuggaagcugcacaccagcccccugugcaccaccaacaccaaggagggcagcaacaucugccugaccagaaccgacagaggcugguacugcgacaacgccggcagcgugagcuucuucccccaggccgagaccugcaaggugugcagcaacagaguguucugcgacaccaugaacagccugacccugcccagcgaggugaaccugugcaacguggacaucuucaaccccaaguacgacugcaagaucaugaccagcaagaccgacgugagcagcagcgugaucaccagccugggcgccaucgugagcugcuacggcaagaccaagugcaccgccagcaacaagaacaagggcaucaucaagaccuucagcaacggcugcgacuacgugagcaacaagggcguggacaccgugagcgugggcaacacccuguacuacgugaacaagcaggagggcaagagccuguacgugaagggcgagcccaucaucaacuucuacgacccccugguguuccccagcgacgaguucgacgccagcaucagccaggugaacgagaagaucaaccagagccuggccuucaucagaaagagcgacgagcugcugcacaacgugaacgccggcaagagcaccaccaacaucaugaucaccaccaucaucaucgugaucaucgugauccugcugagccugaucgccgugggccugcugcuguacugcaaggccagaagcacccccgugacccugagcaaggaccagcugagcggcaucaacaacaucgccuucagcaacugaggacuagugaagggaacacccaaauuuaauucagccuuaagcacaauuaauuaagagugaaacguaauuguacaagcaguuggucacccaccauagggcaugaucaacaccgcaaccuuuccuuuuucccccagugauucugaaaaaccccucuucccuucagcuugcuuagauguuccaaauuuaguaagcuuaaggcggccuacagaagaaaaagaaaaaaaaggccacaaaaguucccucucacuuucaguaaauaaaauaaaagcagcaacagaaauaaagaaauaaaugaaauucaaaaugaaauaaauauuguguugugcagcauuaaaaaaucaauaaaaauuaaaaaugagcaagaucuaaaaaaaaaaaaaaaaaaaaaaaaaaaaaaaaaaaaaaaaaaaaaaaaaaaaaaaaaaaaaaaaugcaucccccccccccccccccccccccccccccccaaaggcucuuuucagagccaccagaauu

SEQ ID NO: 6952 - RNA, 2277 nt, Artificial Sequence
  mRNA product Design d-3 comprising derived and/or modified sequence from HRSV(A2)__F_DSCav1_mut7 (opt5)
gggagagggcgcuuggcuugcaaggacccugagcugcggcauugaagcacacccaacccaacucgacugaagucagccucacugaaccggaucugagaaucuucucucucugggcuugccagggcucuccgaaccuagcuagcauccucuucaauuccaacuagaaagcuuaccauggagcugcucauccugaaggccaacgcuauuaccacaauccuuacggccgugaccuucugcuuugcgagcggccagaauauuacagaagaguucuaccaauccaccuguucugcugucagcaaaggguaucuguccgcccucagaacaggaugguacaccucuguuaucacaauugaacugagcaacaucaaggagaauaaaugcaacggcaccgacgccaaggugaaacuuaucaagcaggaacuggauaaguauaaaaaugcugugacggagcuccagaugcugauguguuccacccccgccacagggucuggaagcgcuauugccuccggcgucgcggugugcaagguucugcaccucgagggggaagugaacaaaaucaagagcgcccugcuuucuaccaauaaagcugucgugucccugagcaacggaguuucugugcucacauuuaagguccuggaccuuaagaauuacauugauaaacagcugcucccuauccugaacaagcaauccuguagcauuucuaauaucgagaccgugauggaguuccagcagaaaaacaaucggcugcucgaaauuacgcgcgaguuuuccgugaacgccggcgucacaaccccgguuagcacauauaugcugaccaauuccgaacuucugucucucaucaacgacaugcccaucaccaacgaucagaagaaacugaugagcaauaacgugcaaauugugagacagcaguccuacagcaucaugugcauuaucaaggaggaaguccuugcuuaugugguucagcugccucucuacggcgugauugacacacccuguuggaaacugcauacgucuccucugugcaccacaaauaccaaggagggguccaacaucugucucacacggaccgaucgcggaugguacugcgacaaugccggcagcgucucuuucuuuccccaagcggaaacguguaaggugugcagcaacagaguuuucugcgauacaaugaacucccugacccuuccuucugaggugaaucuguguaaugucgacaucuuuaacccgaaauaugauugcaagauuaugaccagcaaaacagacguguccagcucugucaucaccucccucggggccauugugagcuguuacggaaagacaaaaugcacggcuucuaauaagaacaagggcaucauuaaaaccuucuccaaugggugugauuauguuagcaacaagggaguggacacagucuccgugggcaauacccuguacuauguuaacaaacaggagggcaagucucuuuacgugaaaggggaacccaucaucaacuuuuaugacccucuggucuuccccagcgaugaguuugacgccuccauuucucaggugaaugaaaagaucaaccaaagccucgcuuucauucggaaguccgaugagcugcugcacaaugugaacgccggaaaaagcacaaccaauaucaugauuacgaccaucauuaucguuaucauugucauccuccugucucuuauugccgugggccugcuccuguacugcaaggcucgcuccacaccugugacccugagcaaagaccagcuuucugggaucaacaauauugcguucuccaacugaggacuagugaagggaacacccaaauuuaauucagccuuaagcacaauuaauuaagagugaaacguaauuguacaagcaguuggucacccaccauagggcaugaucaacaccgcaaccuuuccuuuuucccccagugauucugaaaaaccccucuucccuucagcuugcuuagauguuccaaauuuaguaagcuuaaggcggccuacagaagaaaaagaaaaaaaaggccacaaaaguucccucucacuuucaguaaauaaaauaaaagcagcaacagaaauaaagaaauaaaugaaauucaaaaugaaauaaauauuguguugugcagcauuaaaaaaucaauaaaaauuaaaaaugagcaagaucuaaaaaaaaaaaaaaaaaaaaaaaaaaaaaaaaaaaaaaaaaaaaaaaaaaaaaaaaaaaaaaaaugcaucccccccccccccccccccccccccccccccaaaggcucuuuucagagccaccagaauu

SEQ ID NO: 6953 - RNA, 2277 nt, Artificial Sequence
  mRNA product Design d-3 comprising derived and/or modified sequence from HRSV(A2)__F_DSCav1_mut7 (opt6)
gggagagggcgcuuggcuugcaaggacccugagcugcggcauugaagcacacccaacccaacucgacugaagucagccucacugaaccggaucugagaaucuucucucucugggcuugccagggcucuccgaaccuagcuagcauccucuucaauuccaacuagaaagcuuaccauggaauuacucauacucaaagcaaaugcaauuaccacuauacucacagcuguaacuuuuuguuucgccucaggacaaaacaucacagaagaauuuuaucaauccacaugcucugccguaucaaaaggcuaccuaucugcccuaagaacagguugguacacaucuguaauaacaaucgaauuauccaacaucaaagaaaacaaaugcaacggcacagacgcaaaagucaaacucaucaaacaagaauuagauaaauauaaaaacgcaguaacagaacuacaaaugcuaaugugcucuacacccgccacaggaucaggauccgcaaucgcuucuggaguagccguuugcaaaguauuacaccuagaaggagaaguaaauaaaauaaaauccgcacuacuaucaacuaauaaagcaguaguaucacuuucuaaugguguaucaguauuaacauucaaaguccucgaccuaaaaaauuacaucgacaaacaacuauuacccauccuuaauaaacaaucaugcuccauaucaaacauagaaacugucauggaauuucaacaaaaaaacaauagacuucuagaaaucacaagagaauuuucuguaaaugcaggaguaacuacaccaguaucaacauauauguuaaccaacuccgaacuacuaucacucauaaacgacaugccaauaacaaacgaccaaaaaaaacuaaugucaaauaacguucaaauaguaagacaacaaucauacucaaucaugugcauaauaaaagaagaaguuuuagcauacgucguacaacuuccccuauacggaguaauagacaccccuugcuggaaacuccacaccucaccacuaugcacuacaaacacaaaagaagguuccaacaucugcuuaacaagaaccgaucgaggaugguacugcgacaacgcugguuccguaucuuucuucccacaagcagaaacaugcaaaguaugcuccaauagaguauucugcgacaccaugaacucacuaacucuaccauccgaaguaaaccuaugcaacgucgacauauuuaauccaaaauaugacugcaaaauaaugacuucaaaaacagacguauccucaucaguaauaacauccuuaggagcaauaguaucauguuacggcaagacaaaauguacagccucaaacaaaaacaaagguaucauuaaaaccuucuccaacggcugcgacuacguaucaaauaaaggugucgauacaguaucaguaggaaacacacucuauuacguuaauaaacaagaaggaaagucauuauacguaaaaggagaaccaauaaucaauuucuacgauccccuagucuuucccucagaugaauuugacgcaagcaucucucaagucaacgaaaaaauaaaccaaucccuagccuucauaagaaaaucagaugaacuacuucauaacgucaacgccggaaaaucaacaaccaacauaaugaucacuacaaucauaauuguaauuauaguaauacuacuaucgcuaauugccguuggacuacuacuauauuguaaagcaagaucaacacccguuacucuauccaaagaucaauuaucaggaaucaacaacauagccuucucaaauuaaggacuagugaagggaacacccaaauuuaauucagccuuaagcacaauuaauuaagagugaaacguaauuguacaagcaguuggucacccaccauagggcaugaucaacaccgcaaccuuuccuuuuucccccagugauucugaaaaaccccucuucccuucagcuugcuuagauguuccaaauuuaguaagcuuaaggcggccuacagaagaaaaagaaaaaaaaggccacaaaaguucccucucacuuucaguaaauaaaauaaaagcagcaacagaaauaaagaaauaaaugaaauucaaaaugaaauaaauauuguguugugcagcauuaaaaaaucaauaaaaauuaaaaaugagcaagaucuaaaaaaaaaaaaaaaaaaaaaaaaaaaaaaaaaaaaaaaaaaaaaaaaaaaaaaaaaaaaaaaaugcaucccccccccccccccccccccccccccccccaaaggcucuuuucagagccaccagaauu

SEQ ID NO: 6954 - RNA, 2277 nt, Artificial Sequence
  mRNA product Design d-3 comprising derived and/or modified sequence from HRSV(A2)__F_DSCav1_mut7 (opt11)
gggagagggcgcuuggcuugcaaggacccugagcugcggcauugaagcacacccaacccaacucgacugaagucagccucacugaaccggaucugagaaucuucucucucugggcuugccagggcucuccgaaccuagcuagcauccucuucaauuccaacuagaaagcuuaccauggaacuacucauacuuaaagccaacgcaauaaccacaauccucaccgccgucacauucugcuucgccucgggacaaaacauaaccgaagaauuuuaccagucuaccugcuccgccgucuccaaggguuaccucuccgcgcuccgcaccgggugguacaccagcguuaucaccaucgaacuaucuaacauaaaagaaaacaagugcaacggaaccgacgcaaaagucaaacucaucaaacaagaacuagacaaauacaagaaugccgucaccgaacuacaaaugcucaugugcuccacccccgccaccggauccggcuccgccauugccuccggcgucgccguaugcaaaguccuucacuuggaaggagaaguuaacaaaauaaaaagcgcccuccugucgaccaacaaagcgguggucagccucuccaacggcgucucuguccucaccuucaaaguccucgaccucaagaacuacauagauaaacaacuacuccccauccuaaacaaacagucaugcagcauauccaacaucgaaaccgucauggaguuccaacagaaaaacaaccgccuccuugaaaucacccgcgaguucucugucaacgccggcgucaccacccccgucuccaccuacaugcucacaaacuccgaacuccucagccucaucaacgacaugccaaucaccaacgaccaaaagaaacucauguccaacaacguacaaaucguucgucaacaaucauacucaaucaugugcaucauuaaagaagaaguccucgcauacgucguccaacucccccucuauggggucaucgacaccccaugcuggaaacuccacaccucuccccuaugcaccaccaacaccaaagaaggcuccaacaucugccuaacccgaaccgaccgcggaugguacugcgacaacgccggcuccgucuccuucuucccccaggccgaaacauguaaagucugcuccaaccguguguucugcgacaccaugaacucacuaacccuccccuccgaagucaaccucugcaacgucgacaucuucaacccgaaauacgacugcaaaauaaugaccagcaaaacagacguauccucuagcgucauuaccagccuaggugcaaucguguccugcuacggcaaaacaaaaugcaccgccuccaacaaaaauaaaggaaucauaaaaaccuucuccaacggcugcgacuacgucagcaacaaaggagucgacaccgucuccguaggaaauacucuauacuaugucaacaaacaagaggguaaaucccucuacgucaaaggcgaacccaucaucaacuucuacgacccccucgucuuccccucugacgaguucgacgccagcauaucacaaguaaacgaaaagaucaaccaaucccucgcauucauucgcaaauccgacgaacuccuacacaacgucaacgccggaaaauccaccaccaacaucaugaucacuacuaucauuaucgucaucaucgucauccuccucucccucaucgcagucggccuucuacucuacugcaaggcacgcucuacacccguaacccugucuaaagaccaacucuccggcaucaacaacaucgcuuucuccaacuaaggacuagugaagggaacacccaaauuuaauucagccuuaagcacaauuaauuaagagugaaacguaauuguacaagcaguuggucacccaccauagggcaugaucaacaccgcaaccuuuccuuuuucccccagugauucugaaaaaccccucuucccuucagcuugcuuagauguuccaaauuuaguaagcuuaaggcggccuacagaagaaaaagaaaaaaaaggccacaaaaguucccucucacuuucaguaaauaaaauaaaagcagcaacagaaauaaagaaauaaaugaaauucaaaaugaaauaaauauuguguugugcagcauuaaaaaaucaauaaaaauuaaaaaugagcaagaucuaaaaaaaaaaaaaaaaaaaaaaaaaaaaaaaaaaaaaaaaaaaaaaaaaaaaaaaaaaaaaaaaugcaucccccccccccccccccccccccccccccccaaaggcucuuuucagagccaccagaauu

SEQ ID NO: 6955 - RNA, 1960 nt, Artificial Sequence
  mRNA product Design d-4 comprising derived and/or modified sequence from HRSV(A2)__F_DSCav1_mut7 (opt1)
gggagagucccgcagucggcguccagcggcucugcuuguucgugugugugucguugcaggccuuauucaagcuuaccauggagcugcucauccugaaggccaacgccaucaccaccauccugacggcggugaccuucugcuucgccagcggccagaacaucaccgaggaguucuaccaguccacgugcagcgccgucuccaagggguaccucagcgcccugcggaccggcugguacaccuccgugaucaccaucgagcugagcaacaucaaggagaacaagugcaacgggaccgacgccaaggugaagcucaucaagcaggagcuggacaaguacaagaacgcggucacggagcugcagaugcugaugugcuccaccccggcaaccggcuccggcuccgccaucgcgagcggcgucgccgugugcaaggugcugcaccucgagggggaggucaacaagaucaagagcgcccugcuguccaccaacaaggccguggugagccucuccaacggcgucagcgugcugaccuucaaggugcuggaccucaagaacuacaucgacaagcagcugcugcccauccugaacaagcagagcugcuccaucagcaacaucgagacggugauggaguuccagcagaagaacaaccggcuccuggagaucacccgcgaguucagcgugaacgccggggucaccacccccguguccacguacaugcugaccaacagcgagcuccugucccugaucaacgacaugccgaucaccaacgaccagaagaagcucaugagcaacaacgugcagaucguccggcagcaguccuacagcaucaugugcaucaucaaggaggaggugcuggcguacgugguccagcugccccucuacggcgugaucgacacccccugcuggaagcugcacacgagcccccugugcaccaccaacaccaaggagggguccaacaucugccucacgcgcaccgaccggggcugguacugcgacaacgccggcagcgucuccuucuucccgcaggccgagaccugcaaggugugcagcaaccgcguguucugcgacaccaugaacucccugacgcugcccagcgagguaaaccucugcaacgucgacaucuucaaccccaaguacgacugcaagaucaugaccuccaagaccgacgugagcuccagcgugaucaccucccugggggccaucgucagcugcuacggcaagacgaagugcaccgccagcaacaagaacaaggggaucaucaagaccuucuccaacggcugcgacuacgugagcaacaagggcguggacaccguguccgucgggaacacccuguacuacgugaacaagcaggagggcaagagccucuacgugaagggggagcccaucaucaacuucuacgacccgcuggucuuccccuccgacgaguucgacgcgagcaucucccaggugaacgagaagaucaaccagagccuggccuucauccgcaaguccgacgagcugcuccacaacgugaacgccggcaagagcacgaccaacaucaugaucaccaccaucaucaucgucaucaucgugauccugcugucccucaucgccguggggcugcugcucuacugcaaggcccggagcacgcccgucacccuguccaaggaccagcugagcggcaucaacaacaucgcguucuccaacugaggacuaguggaagcauuuuccuggcugauuaaaagaaauuacucagcuauggucaucuguuccuguuagaaggcuaugcagcauauuauauacuaugcgcauguuaugaaaugcauaauaaaaaauuuuaaaaaaucuaaaagaucuaaaaaaaaaaaaaaaaaaaaaaaaaaaaaaaaaaaaaaaaaaaaaaaaaaaaaaaaaaaaaaaaugcaucccccccccccccccccccccccccccccccaaaggcucuuuucagagccaccagaauu

SEQ ID NO: 6956 - RNA, 1960 nt, Artificial Sequence
  mRNA product Design d-4 comprising derived and/or modified sequence from HRSV(A2)__F_DSCav1_mut7 (opt1)
gggagagucccgcagucggcguccagcggcucugcuuguucgugugugugucguugcaggccuuauucaagcuuaccauggagcugcucauccugaaggccaacgccaucaccaccauccugacggcggugaccuucugcuucgccagcggccagaacaucaccgaggaguucuaccaguccacgugcagcgccgucuccaagggguaccucagcgcccugcgcaccggcugguacaccuccgugaucaccaucgagcugagcaacaucaaggagaacaagugcaacgggaccgacgccaaggugaagcucaucaagcaggagcuggacaaguacaagaacgcggucacggagcugcagaugcucaugugcuccacccccgccaccggcagcggguccgccaucgccagcggcguggcggugugcaagguccugcaccuggagggcgaggugaacaagaucaaguccgcccuccugagcaccaacaaggccguggucucccugagcaacgggguguccgugcucacguucaagguccuggaccugaagaacuacaucgacaagcagcuccugccgauccugaacaagcagagcugcuccaucagcaacaucgagaccgugauggaguuccagcagaagaacaaccggcuccuggagaucacccgcgaguucuccgugaacgccggcgucaccacgcccgugagcaccuacaugcugaccaacagcgagcuccugucccugaucaacgacaugcccaucaccaacgaccagaagaagcucaugagcaacaacgugcagaucguccggcagcaguccuacagcaucaugugcaucaucaaggaggaggugcuggccuacgugguccagcugccccucuacggggugaucgacacgccgugcuggaagcugcacaccagcccccugugcaccaccaacacgaaggagggcagcaacaucugccucacccgcaccgaccgggggugguacugcgacaacgcgggcuccgugagcuucuucccccaggccgagaccugcaaggucugcuccaaccgcguguucugcgacacgaugaacagccugacccugcccuccgaggucaaccucugcaacguggacaucuucaacccgaaguacgacugcaagaucaugaccagcaagaccgacguguccagcuccgucaucacgagccugggcgccaucguguccugcuacgggaagaccaagugcaccgccagcaacaagaacaagggcaucaucaagaccuucuccaacgggugcgacuacgugagcaacaagggcgucgacacggugagcgugggcaacacccuguacuacgucaacaagcaggaggggaagucccucuacgugaagggcgagcccaucaucaacuucuacgacccccugguguuccccagcgacgaguucgacgccuccaucagccaggucaacgagaagaucaaccagucccuggcguucauccggaaguccgacgagcuccugcacaacgugaacgccgggaaguccaccaccaacaucaugaucaccacgaucaucaucgugaucaucgucauccugcucagccugaucgccgugggccugcuccuguacugcaaggcccgcuccaccccggugacccugagcaaggaccagcuguccgggaucaacaacaucgccuucagcaacugaggacuaguggaagcauuuuccuggcugauuaaaagaaauuacucagcuauggucaucuguuccuguuagaaggcuaugcagcauauuauauacuaugcgcauguuaugaaaugcauaauaaaaaauuuuaaaaaaucuaaaagaucuaaaaaaaaaaaaaaaaaaaaaaaaaaaaaaaaaaaaaaaaaaaaaaaaaaaaaaaaaaaaaaaaugcaucccccccccccccccccccccccccccccccaaaggcucuuuucagagccaccagaauu

SEQ ID NO: 6957 - RNA, 1960 nt, Artificial Sequence
  mRNA product Design d-4 comprising derived and/or modified sequence from HRSV(A2)__F_DSCav1_mut7 (opt2)
gggagagucccgcagucggcguccagcggcucugcuuguucgugugugugucguugcaggccuuauucaagcuuaccauggagcuccucauccucaaggccaacgccaucaccaccauccucaccgccgucaccuucugcuucgccuccggccagaacaucaccgaggaguucuaccaguccaccugcuccgccgucuccaagggcuaccucuccgcccuccgcaccggcugguacaccuccgucaucaccaucgagcucuccaacaucaaggagaacaagugcaacggcaccgacgccaaggucaagcucaucaagcaggagcucgacaaguacaagaacgccgucaccgagcuccagaugcucaugugcuccacccccgccaccggcuccggcuccgccaucgccuccggcgucgccgucugcaagguccuccaccucgagggcgaggucaacaagaucaaguccgcccuccucuccaccaacaaggccgucgucucccucuccaacggcgucuccguccucaccuucaagguccucgaccucaagaacuacaucgacaagcagcuccuccccauccucaacaagcaguccugcuccaucuccaacaucgagaccgucauggaguuccagcagaagaacaaccgccuccucgagaucacccgcgaguucuccgucaacgccggcgucaccacccccgucuccaccuacaugcucaccaacuccgagcuccucucccucaucaacgacaugcccaucaccaacgaccagaagaagcucauguccaacaacguccagaucguccgccagcaguccuacuccaucaugugcaucaucaaggaggagguccucgccuacgucguccagcucccccucuacggcgucaucgacacccccugcuggaagcuccacaccuccccccucugcaccaccaacaccaaggagggcuccaacaucugccucacccgcaccgaccgcggcugguacugcgacaacgccggcuccgucuccuucuucccccaggccgagaccugcaaggucugcuccaaccgcgucuucugcgacaccaugaacucccucacccuccccuccgaggucaaccucugcaacgucgacaucuucaaccccaaguacgacugcaagaucaugaccuccaagaccgacgucuccuccuccgucaucaccucccucggcgccaucgucuccugcuacggcaagaccaagugcaccgccuccaacaagaacaagggcaucaucaagaccuucuccaacggcugcgacuacgucuccaacaagggcgucgacaccgucuccgucggcaacacccucuacuacgucaacaagcaggagggcaagucccucuacgucaagggcgagcccaucaucaacuucuacgacccccucgucuuccccuccgacgaguucgacgccuccaucucccaggucaacgagaagaucaaccagucccucgccuucauccgcaaguccgacgagcuccuccacaacgucaacgccggcaaguccaccaccaacaucaugaucaccaccaucaucaucgucaucaucgucauccuccucucccucaucgccgucggccuccuccucuacugcaaggcccgcuccacccccgucacccucuccaaggaccagcucuccggcaucaacaacaucgccuucuccaacugaggacuaguggaagcauuuuccuggcugauuaaaagaaauuacucagcuauggucaucuguuccuguuagaaggcuaugcagcauauuauauacuaugcgcauguuaugaaaugcauaauaaaaaauuuuaaaaaaucuaaaagaucuaaaaaaaaaaaaaaaaaaaaaaaaaaaaaaaaaaaaaaaaaaaaaaaaaaaaaaaaaaaaaaaaugcaucccccccccccccccccccccccccccccccaaaggcucuuuucagagccaccagaauu

SEQ ID NO: 6958 - RNA, 1960 nt, Artificial Sequence
  mRNA product Design d-4 comprising derived and/or modified sequence from HRSV(A2)__F_DSCav1_mut7 (opt3)
gggagagucccgcagucggcguccagcggcucugcuuguucgugugugugucguugcaggccuuauucaagcuuaccauggagcugcucauccuuaaggccaacgcuauuaccacaauacugacugcagugacguucugcuuugccagcggccagaauaucaccgaagaguucuaccaauccacauguucugcggucucaaaaggguauuugagugcuuuaagaacuggaugguacaccagcguuauuacaaucgaacuguccaacauuaaggagaauaaaugcaacgguaccgacgccaaggugaaacuaaucaagcaggaacucgauaaguauaaaaaugcaguaacugagcugcagaugcuuauguguucuacacccgccaccggcucggggucagcuauagcaagcggaguggccgucugcaaggugcugcacuuggagggcgaaguuaacaaaaucaagagugcucuccuguccacgaauaaagccguggucucucugagcaacgguguguccguacucacuuuuaagguuuuagaccugaagaauuacauugauaaacagcuuuugccuauccugaacaagcaaucauguaguauuagcaauaucgagaccgugauggaguuccagcagaaaaacaauaggcuacucgaaauaacacgggaguuuucugucaacgcgggggugacuaccccaguguccacauauaugcugaccaauucagaacuucugagcuugauuaacgacaugccgaucacgaacgaucagaagaaacucaugaguaauaacguccaaauuguucgccagcagucuuacuccaucaugugcaucauuaaggaggaagugcuggcauauguagugcaguuaccccuguacggagucauagacacuccuuguuggaaacuccauacaagcccacuuugcaccacuaauacaaaggagggcucgaacaucugucugacccgaacggaucguggcugguacugcgacaaugccgggucuguguccuucuuuccccaagcugaaaccuguaagguuugcucaaacagaguguucugcgauacaaugaauaguuugacucuaccuagcgaggucaaccuguguaauguggacauuuuuaacccaaaauaugauugcaagaucaugaccuccaaaacagacguaucuagcucaguuauaacuagccucggagccauuguguccuguuacgguaagaccaaaugcacagcaagcaauaagaacaagggcaucaucaaaaccuucucuaaugggugugauuaugucucaaacaagggaguggacacugucagugugggcaauacgcuguacuauguuaacaaacaggaggguaagagccuuuacgugaaaggggaacccauuaucaacuuuuaugacccucugguauucccauccgaugaguuugacgcuucuauuucgcaggucaaugaaaagauaaaccaaaguuuggccuucaucaggaaguccgaugagcuccugcacaaugugaacgcgggaaaaucaacaaccaauauuaugaucacuaccaucauuauaguuaucauugugaucuuacugagucuaauugccgucggccuccugcuuuacugcaaggcacggucuacaccggugaccuugagcaaagaccagcuguccggcaucaacaauauagcuuucucaaacugaggacuaguggaagcauuuuccuggcugauuaaaagaaauuacucagcuauggucaucuguuccuguuagaaggcuaugcagcauauuauauacuaugcgcauguuaugaaaugcauaauaaaaaauuuuaaaaaaucuaaaagaucuaaaaaaaaaaaaaaaaaaaaaaaaaaaaaaaaaaaaaaaaaaaaaaaaaaaaaaaaaaaaaaaaugcaucccccccccccccccccccccccccccccccaaaggcucuuuucagagccaccagaauu

SEQ ID NO: 6959 - RNA, 1960 nt, Artificial Sequence
  mRNA product Design d-4 comprising derived and/or modified sequence from HRSV(A2)__F_DSCav1_mut7 (opt4)
gggagagucccgcagucggcguccagcggcucugcuuguucgugugugugucguugcaggccuuauucaagcuuaccauggagcugcugauccugaaggccaacgccaucaccaccauccugaccgccgugaccuucugcuucgccagcggccagaacaucaccgaggaguucuaccagagcaccugcagcgccgugagcaagggcuaccugagcgcccugagaaccggcugguacaccagcgugaucaccaucgagcugagcaacaucaaggagaacaagugcaacggcaccgacgccaaggugaagcugaucaagcaggagcuggacaaguacaagaacgccgugaccgagcugcagaugcugaugugcagcacccccgccaccggcagcggcagcgccaucgccagcggcguggccgugugcaaggugcugcaccuggagggcgaggugaacaagaucaagagcgcccugcugagcaccaacaaggccguggugagccugagcaacggcgugagcgugcugaccuucaaggugcuggaccugaagaacuacaucgacaagcagcugcugcccauccugaacaagcagagcugcagcaucagcaacaucgagaccgugauggaguuccagcagaagaacaacagacugcuggagaucaccagagaguucagcgugaacgccggcgugaccacccccgugagcaccuacaugcugaccaacagcgagcugcugagccugaucaacgacaugcccaucaccaacgaccagaagaagcugaugagcaacaacgugcagaucgugagacagcagagcuacagcaucaugugcaucaucaaggaggaggugcuggccuacguggugcagcugccccuguacggcgugaucgacacccccugcuggaagcugcacaccagcccccugugcaccaccaacaccaaggagggcagcaacaucugccugaccagaaccgacagaggcugguacugcgacaacgccggcagcgugagcuucuucccccaggccgagaccugcaaggugugcagcaacagaguguucugcgacaccaugaacagccugacccugcccagcgaggugaaccugugcaacguggacaucuucaaccccaaguacgacugcaagaucaugaccagcaagaccgacgugagcagcagcgugaucaccagccugggcgccaucgugagcugcuacggcaagaccaagugcaccgccagcaacaagaacaagggcaucaucaagaccuucagcaacggcugcgacuacgugagcaacaagggcguggacaccgugagcgugggcaacacccuguacuacgugaacaagcaggagggcaagagccuguacgugaagggcgagcccaucaucaacuucuacgacccccugguguuccccagcgacgaguucgacgccagcaucagccaggugaacgagaagaucaaccagagccuggccuucaucagaaagagcgacgagcugcugcacaacgugaacgccggcaagagcaccaccaacaucaugaucaccaccaucaucaucgugaucaucgugauccugcugagccugaucgccgugggccugcugcuguacugcaaggccagaagcacccccgugacccugagcaaggaccagcugagcggcaucaacaacaucgccuucagcaacugaggacuaguggaagcauuuuccuggcugauuaaaagaaauuacucagcuauggucaucuguuccuguuagaaggcuaugcagcauauuauauacuaugcgcauguuaugaaaugcauaauaaaaaauuuuaaaaaaucuaaaagaucuaaaaaaaaaaaaaaaaaaaaaaaaaaaaaaaaaaaaaaaaaaaaaaaaaaaaaaaaaaaaaaaaugcaucccccccccccccccccccccccccccccccaaaggcucuuuucagagccaccagaauu

SEQ ID NO: 6960 - RNA, 1960 nt, Artificial Sequence
  mRNA product Design d-4 comprising derived and/or modified sequence from HRSV(A2)__F_DSCav1_mut7 (opt5)
gggagagucccgcagucggcguccagcggcucugcuuguucgugugugugucguugcaggccuuauucaagcuuaccauggagcugcucauccugaaggccaacgcuauuaccacaauccuuacggccgugaccuucugcuuugcgagcggccagaauauuacagaagaguucuaccaauccaccuguucugcugucagcaaaggguaucuguccgcccucagaacaggaugguacaccucuguuaucacaauugaacugagcaacaucaaggagaauaaaugcaacggcaccgacgccaaggugaaacuuaucaagcaggaacuggauaaguauaaaaaugcugugacggagcuccagaugcugauguguuccacccccgccacagggucuggaagcgcuauugccuccggcgucgcggugugcaagguucugcaccucgagggggaagugaacaaaaucaagagcgcccugcuuucuaccaauaaagcugucgugucccugagcaacggaguuucugugcucacauuuaagguccuggaccuuaagaauuacauugauaaacagcugcucccuauccugaacaagcaauccuguagcauuucuaauaucgagaccgugauggaguuccagcagaaaaacaaucggcugcucgaaauuacgcgcgaguuuuccgugaacgccggcgucacaaccccgguuagcacauauaugcugaccaauuccgaacuucugucucucaucaacgacaugcccaucaccaacgaucagaagaaacugaugagcaauaacgugcaaauugugagacagcaguccuacagcaucaugugcauuaucaaggaggaaguccuugcuuaugugguucagcugccucucuacggcgugauugacacacccuguuggaaacugcauacgucuccucugugcaccacaaauaccaaggagggguccaacaucugucucacacggaccgaucgcggaugguacugcgacaaugccggcagcgucucuuucuuuccccaagcggaaacguguaaggugugcagcaacagaguuuucugcgauacaaugaacucccugacccuuccuucugaggugaaucuguguaaugucgacaucuuuaacccgaaauaugauugcaagauuaugaccagcaaaacagacguguccagcucugucaucaccucccucggggccauugugagcuguuacggaaagacaaaaugcacggcuucuaauaagaacaagggcaucauuaaaaccuucuccaaugggugugauuauguuagcaacaagggaguggacacagucuccgugggcaauacccuguacuauguuaacaaacaggagggcaagucucuuuacgugaaaggggaacccaucaucaacuuuuaugacccucuggucuuccccagcgaugaguuugacgccuccauuucucaggugaaugaaaagaucaaccaaagccucgcuuucauucggaaguccgaugagcugcugcacaaugugaacgccggaaaaagcacaaccaauaucaugauuacgaccaucauuaucguuaucauugucauccuccugucucuuauugccgugggccugcuccuguacugcaaggcucgcuccacaccugugacccugagcaaagaccagcuuucugggaucaacaauauugcguucuccaacugaggacuaguggaagcauuuuccuggcugauuaaaagaaauuacucagcuauggucaucuguuccuguuagaaggcuaugcagcauauuauauacuaugcgcauguuaugaaaugcauaauaaaaaauuuuaaaaaaucuaaaagaucuaaaaaaaaaaaaaaaaaaaaaaaaaaaaaaaaaaaaaaaaaaaaaaaaaaaaaaaaaaaaaaaaugcaucccccccccccccccccccccccccccccccaaaggcucuuuucagagccaccagaauu

SEQ ID NO: 6961 - RNA, 1960 nt, Artificial Sequence
  mRNA product Design d-4 comprising derived and/or modified sequence from HRSV(A2)__F_DSCav1_mut7 (opt6)
gggagagucccgcagucggcguccagcggcucugcuuguucgugugugugucguugcaggccuuauucaagcuuaccauggaauuacucauacucaaagcaaaugcaauuaccacuauacucacagcuguaacuuuuuguuucgccucaggacaaaacaucacagaagaauuuuaucaauccacaugcucugccguaucaaaaggcuaccuaucugcccuaagaacagguugguacacaucuguaauaacaaucgaauuauccaacaucaaagaaaacaaaugcaacggcacagacgcaaaagucaaacucaucaaacaagaauuagauaaauauaaaaacgcaguaacagaacuacaaaugcuaaugugcucuacacccgccacaggaucaggauccgcaaucgcuucuggaguagccguuugcaaaguauuacaccuagaaggagaaguaaauaaaauaaaauccgcacuacuaucaacuaauaaagcaguaguaucacuuucuaaugguguaucaguauuaacauucaaaguccucgaccuaaaaaauuacaucgacaaacaacuauuacccauccuuaauaaacaaucaugcuccauaucaaacauagaaacugucauggaauuucaacaaaaaaacaauagacuucuagaaaucacaagagaauuuucuguaaaugcaggaguaacuacaccaguaucaacauauauguuaaccaacuccgaacuacuaucacucauaaacgacaugccaauaacaaacgaccaaaaaaaacuaaugucaaauaacguucaaauaguaagacaacaaucauacucaaucaugugcauaauaaaagaagaaguuuuagcauacgucguacaacuuccccuauacggaguaauagacaccccuugcuggaaacuccacaccucaccacuaugcacuacaaacacaaaagaagguuccaacaucugcuuaacaagaaccgaucgaggaugguacugcgacaacgcugguuccguaucuuucuucccacaagcagaaacaugcaaaguaugcuccaauagaguauucugcgacaccaugaacucacuaacucuaccauccgaaguaaaccuaugcaacgucgacauauuuaauccaaaauaugacugcaaaauaaugacuucaaaaacagacguauccucaucaguaauaacauccuuaggagcaauaguaucauguuacggcaagacaaaauguacagccucaaacaaaaacaaagguaucauuaaaaccuucuccaacggcugcgacuacguaucaaauaaaggugucgauacaguaucaguaggaaacacacucuauuacguuaauaaacaagaaggaaagucauuauacguaaaaggagaaccaauaaucaauuucuacgauccccuagucuuucccucagaugaauuugacgcaagcaucucucaagucaacgaaaaaauaaaccaaucccuagccuucauaagaaaaucagaugaacuacuucauaacgucaacgccggaaaaucaacaaccaacauaaugaucacuacaaucauaauuguaauuauaguaauacuacuaucgcuaauugccguuggacuacuacuauauuguaaagcaagaucaacacccguuacucuauccaaagaucaauuaucaggaaucaacaacauagccuucucaaauuaaggacuaguggaagcauuuuccuggcugauuaaaagaaauuacucagcuauggucaucuguuccuguuagaaggcuaugcagcauauuauauacuaugcgcauguuaugaaaugcauaauaaaaaauuuuaaaaaaucuaaaagaucuaaaaaaaaaaaaaaaaaaaaaaaaaaaaaaaaaaaaaaaaaaaaaaaaaaaaaaaaaaaaaaaaugcaucccccccccccccccccccccccccccccccaaaggcucuuuucagagccaccagaauu

SEQ ID NO: 6962 - RNA, 1960 nt, Artificial Sequence
  mRNA product Design d-4 comprising derived and/or modified sequence from HRSV(A2)__F_DSCav1_mut7 (opt11)
gggagagucccgcagucggcguccagcggcucugcuuguucgugugugugucguugcaggccuuauucaagcuuaccauggaacuacucauacuuaaagccaacgcaauaaccacaauccucaccgccgucacauucugcuucgccucgggacaaaacauaaccgaagaauuuuaccagucuaccugcuccgccgucuccaaggguuaccucuccgcgcuccgcaccgggugguacaccagcguuaucaccaucgaacuaucuaacauaaaagaaaacaagugcaacggaaccgacgcaaaagucaaacucaucaaacaagaacuagacaaauacaagaaugccgucaccgaacuacaaaugcucaugugcuccacccccgccaccggauccggcuccgccauugccuccggcgucgccguaugcaaaguccuucacuuggaaggagaaguuaacaaaauaaaaagcgcccuccugucgaccaacaaagcgguggucagccucuccaacggcgucucuguccucaccuucaaaguccucgaccucaagaacuacauagauaaacaacuacuccccauccuaaacaaacagucaugcagcauauccaacaucgaaaccgucauggaguuccaacagaaaaacaaccgccuccuugaaaucacccgcgaguucucugucaacgccggcgucaccacccccgucuccaccuacaugcucacaaacuccgaacuccucagccucaucaacgacaugccaaucaccaacgaccaaaagaaacucauguccaacaacguacaaaucguucgucaacaaucauacucaaucaugugcaucauuaaagaagaaguccucgcauacgucguccaacucccccucuauggggucaucgacaccccaugcuggaaacuccacaccucuccccuaugcaccaccaacaccaaagaaggcuccaacaucugccuaacccgaaccgaccgcggaugguacugcgacaacgccggcuccgucuccuucuucccccaggccgaaacauguaaagucugcuccaaccguguguucugcgacaccaugaacucacuaacccuccccuccgaagucaaccucugcaacgucgacaucuucaacccgaaauacgacugcaaaauaaugaccagcaaaacagacguauccucuagcgucauuaccagccuaggugcaaucguguccugcuacggcaaaacaaaaugcaccgccuccaacaaaaauaaaggaaucauaaaaaccuucuccaacggcugcgacuacgucagcaacaaaggagucgacaccgucuccguaggaaauacucuauacuaugucaacaaacaagaggguaaaucccucuacgucaaaggcgaacccaucaucaacuucuacgacccccucgucuuccccucugacgaguucgacgccagcauaucacaaguaaacgaaaagaucaaccaaucccucgcauucauucgcaaauccgacgaacuccuacacaacgucaacgccggaaaauccaccaccaacaucaugaucacuacuaucauuaucgucaucaucgucauccuccucucccucaucgcagucggccuucuacucuacugcaaggcacgcucuacacccguaacccugucuaaagaccaacucuccggcaucaacaacaucgcuuucuccaacuaaggacuaguggaagcauuuuccuggcugauuaaaagaaauuacucagcuauggucaucuguuccuguuagaaggcuaugcagcauauuauauacuaugcgcauguuaugaaaugcauaauaaaaaauuuuaaaaaaucuaaaagaucuaaaaaaaaaaaaaaaaaaaaaaaaaaaaaaaaaaaaaaaaaaaaaaaaaaaaaaaaaaaaaaaaugcaucccccccccccccccccccccccccccccccaaaggcucuuuucagagccaccagaauu

SEQ ID NO: 6963 - RNA, 2057 nt, Artificial Sequence
  mRNA product Design d-5 comprising derived and/or modified sequence from HRSV(A2)__F_DSCav1_mut7 (opt1)
gggagagggcgcuuggcuugcaaggacccugagcugcggcauugaagcacacccaacccaacucgacugaagucagccucacugaaccggaucugagaaucuucucucucugggcuugccagggcucuccgaaccuagcuagcauccucuucaauuccaacuagaaagcuuaccauggagcugcucauccugaaggccaacgccaucaccaccauccugacggcggugaccuucugcuucgccagcggccagaacaucaccgaggaguucuaccaguccacgugcagcgccgucuccaagggguaccucagcgcccugcggaccggcugguacaccuccgugaucaccaucgagcugagcaacaucaaggagaacaagugcaacgggaccgacgccaaggugaagcucaucaagcaggagcuggacaaguacaagaacgcggucacggagcugcagaugcugaugugcuccaccccggcaaccggcuccggcuccgccaucgcgagcggcgucgccgugugcaaggugcugcaccucgagggggaggucaacaagaucaagagcgcccugcuguccaccaacaaggccguggugagccucuccaacggcgucagcgugcugaccuucaaggugcuggaccucaagaacuacaucgacaagcagcugcugcccauccugaacaagcagagcugcuccaucagcaacaucgagacggugauggaguuccagcagaagaacaaccggcuccuggagaucacccgcgaguucagcgugaacgccggggucaccacccccguguccacguacaugcugaccaacagcgagcuccugucccugaucaacgacaugccgaucaccaacgaccagaagaagcucaugagcaacaacgugcagaucguccggcagcaguccuacagcaucaugugcaucaucaaggaggaggugcuggcguacgugguccagcugccccucuacggcgugaucgacacccccugcuggaagcugcacacgagcccccugugcaccaccaacaccaaggagggguccaacaucugccucacgcgcaccgaccggggcugguacugcgacaacgccggcagcgucuccuucuucccgcaggccgagaccugcaaggugugcagcaaccgcguguucugcgacaccaugaacucccugacgcugcccagcgagguaaaccucugcaacgucgacaucuucaaccccaaguacgacugcaagaucaugaccuccaagaccgacgugagcuccagcgugaucaccucccugggggccaucgucagcugcuacggcaagacgaagugcaccgccagcaacaagaacaaggggaucaucaagaccuucuccaacggcugcgacuacgugagcaacaagggcguggacaccguguccgucgggaacacccuguacuacgugaacaagcaggagggcaagagccucuacgugaagggggagcccaucaucaacuucuacgacccgcuggucuuccccuccgacgaguucgacgcgagcaucucccaggugaacgagaagaucaaccagagccuggccuucauccgcaaguccgacgagcugcuccacaacgugaacgccggcaagagcacgaccaacaucaugaucaccaccaucaucaucgucaucaucgugauccugcugucccucaucgccguggggcugcugcucuacugcaaggcccggagcacgcccgucacccuguccaaggaccagcugagcggcaucaacaacaucgcguucuccaacugaggacuaguggaagcauuuuccuggcugauuaaaagaaauuacucagcuauggucaucuguuccuguuagaaggcuaugcagcauauuauauacuaugcgcauguuaugaaaugcauaauaaaaaauuuuaaaaaaucuaaaagaucuaaaaaaaaaaaaaaaaaaaaaaaaaaaaaaaaaaaaaaaaaaaaaaaaaaaaaaaaaaaaaaaaugcaucccccccccccccccccccccccccccccccaaaggcucuuuucagagccaccagaauu

SEQ ID NO: 6964 - RNA, 2057 nt, Artificial Sequence
  mRNA product Design d-5 comprising derived and/or modified sequence from HRSV(A2)__F_DSCav1_mut7 (opt1)
gggagagggcgcuuggcuugcaaggacccugagcugcggcauugaagcacacccaacccaacucgacugaagucagccucacugaaccggaucugagaaucuucucucucugggcuugccagggcucuccgaaccuagcuagcauccucuucaauuccaacuagaaagcuuaccauggagcugcucauccugaaggccaacgccaucaccaccauccugacggcggugaccuucugcuucgccagcggccagaacaucaccgaggaguucuaccaguccacgugcagcgccgucuccaagggguaccucagcgcccugcgcaccggcugguacaccuccgugaucaccaucgagcugagcaacaucaaggagaacaagugcaacgggaccgacgccaaggugaagcucaucaagcaggagcuggacaaguacaagaacgcggucacggagcugcagaugcucaugugcuccacccccgccaccggcagcggguccgccaucgccagcggcguggcggugugcaagguccugcaccuggagggcgaggugaacaagaucaaguccgcccuccugagcaccaacaaggccguggucucccugagcaacgggguguccgugcucacguucaagguccuggaccugaagaacuacaucgacaagcagcuccugccgauccugaacaagcagagcugcuccaucagcaacaucgagaccgugauggaguuccagcagaagaacaaccggcuccuggagaucacccgcgaguucuccgugaacgccggcgucaccacgcccgugagcaccuacaugcugaccaacagcgagcuccugucccugaucaacgacaugcccaucaccaacgaccagaagaagcucaugagcaacaacgugcagaucguccggcagcaguccuacagcaucaugugcaucaucaaggaggaggugcuggccuacgugguccagcugccccucuacggggugaucgacacgccgugcuggaagcugcacaccagcccccugugcaccaccaacacgaaggagggcagcaacaucugccucacccgcaccgaccgggggugguacugcgacaacgcgggcuccgugagcuucuucccccaggccgagaccugcaaggucugcuccaaccgcguguucugcgacacgaugaacagccugacccugcccuccgaggucaaccucugcaacguggacaucuucaacccgaaguacgacugcaagaucaugaccagcaagaccgacguguccagcuccgucaucacgagccugggcgccaucguguccugcuacgggaagaccaagugcaccgccagcaacaagaacaagggcaucaucaagaccuucuccaacgggugcgacuacgugagcaacaagggcgucgacacggugagcgugggcaacacccuguacuacgucaacaagcaggaggggaagucccucuacgugaagggcgagcccaucaucaacuucuacgacccccugguguuccccagcgacgaguucgacgccuccaucagccaggucaacgagaagaucaaccagucccuggcguucauccggaaguccgacgagcuccugcacaacgugaacgccgggaaguccaccaccaacaucaugaucaccacgaucaucaucgugaucaucgucauccugcucagccugaucgccgugggccugcuccuguacugcaaggcccgcuccaccccggugacccugagcaaggaccagcuguccgggaucaacaacaucgccuucagcaacugaggacuaguggaagcauuuuccuggcugauuaaaagaaauuacucagcuauggucaucuguuccuguuagaaggcuaugcagcauauuauauacuaugcgcauguuaugaaaugcauaauaaaaaauuuuaaaaaaucuaaaagaucuaaaaaaaaaaaaaaaaaaaaaaaaaaaaaaaaaaaaaaaaaaaaaaaaaaaaaaaaaaaaaaaaugcaucccccccccccccccccccccccccccccccaaaggcucuuuucagagccaccagaauu

SEQ ID NO: 6965 - RNA, 2057 nt, Artificial Sequence
  mRNA product Design d-5 comprising derived and/or modified sequence from HRSV(A2)__F_DSCav1_mut7 (opt2)
gggagagggcgcuuggcuugcaaggacccugagcugcggcauugaagcacacccaacccaacucgacugaagucagccucacugaaccggaucugagaaucuucucucucugggcuugccagggcucuccgaaccuagcuagcauccucuucaauuccaacuagaaagcuuaccauggagcuccucauccucaaggccaacgccaucaccaccauccucaccgccgucaccuucugcuucgccuccggccagaacaucaccgaggaguucuaccaguccaccugcuccgccgucuccaagggcuaccucuccgcccuccgcaccggcugguacaccuccgucaucaccaucgagcucuccaacaucaaggagaacaagugcaacggcaccgacgccaaggucaagcucaucaagcaggagcucgacaaguacaagaacgccgucaccgagcuccagaugcucaugugcuccacccccgccaccggcuccggcuccgccaucgccuccggcgucgccgucugcaagguccuccaccucgagggcgaggucaacaagaucaaguccgcccuccucuccaccaacaaggccgucgucucccucuccaacggcgucuccguccucaccuucaagguccucgaccucaagaacuacaucgacaagcagcuccuccccauccucaacaagcaguccugcuccaucuccaacaucgagaccgucauggaguuccagcagaagaacaaccgccuccucgagaucacccgcgaguucuccgucaacgccggcgucaccacccccgucuccaccuacaugcucaccaacuccgagcuccucucccucaucaacgacaugcccaucaccaacgaccagaagaagcucauguccaacaacguccagaucguccgccagcaguccuacuccaucaugugcaucaucaaggaggagguccucgccuacgucguccagcucccccucuacggcgucaucgacacccccugcuggaagcuccacaccuccccccucugcaccaccaacaccaaggagggcuccaacaucugccucacccgcaccgaccgcggcugguacugcgacaacgccggcuccgucuccuucuucccccaggccgagaccugcaaggucugcuccaaccgcgucuucugcgacaccaugaacucccucacccuccccuccgaggucaaccucugcaacgucgacaucuucaaccccaaguacgacugcaagaucaugaccuccaagaccgacgucuccuccuccgucaucaccucccucggcgccaucgucuccugcuacggcaagaccaagugcaccgccuccaacaagaacaagggcaucaucaagaccuucuccaacggcugcgacuacgucuccaacaagggcgucgacaccgucuccgucggcaacacccucuacuacgucaacaagcaggagggcaagucccucuacgucaagggcgagcccaucaucaacuucuacgacccccucgucuuccccuccgacgaguucgacgccuccaucucccaggucaacgagaagaucaaccagucccucgccuucauccgcaaguccgacgagcuccuccacaacgucaacgccggcaaguccaccaccaacaucaugaucaccaccaucaucaucgucaucaucgucauccuccucucccucaucgccgucggccuccuccucuacugcaaggcccgcuccacccccgucacccucuccaaggaccagcucuccggcaucaacaacaucgccuucuccaacugaggacuaguggaagcauuuuccuggcugauuaaaagaaauuacucagcuauggucaucuguuccuguuagaaggcuaugcagcauauuauauacuaugcgcauguuaugaaaugcauaauaaaaaauuuuaaaaaaucuaaaagaucuaaaaaaaaaaaaaaaaaaaaaaaaaaaaaaaaaaaaaaaaaaaaaaaaaaaaaaaaaaaaaaaaugcaucccccccccccccccccccccccccccccccaaaggcucuuuucagagccaccagaauu

SEQ ID NO: 6966 - RNA, 2057 nt, Artificial Sequence
  mRNA product Design d-5 comprising derived and/or modified sequence from HRSV(A2)__F_DSCav1_mut7 (opt3)
gggagagggcgcuuggcuugcaaggacccugagcugcggcauugaagcacacccaacccaacucgacugaagucagccucacugaaccggaucugagaaucuucucucucugggcuugccagggcucuccgaaccuagcuagcauccucuucaauuccaacuagaaagcuuaccauggagcugcucauccuuaaggccaacgcuauuaccacaauacugacugcagugacguucugcuuugccagcggccagaauaucaccgaagaguucuaccaauccacauguucugcggucucaaaaggguauuugagugcuuuaagaacuggaugguacaccagcguuauuacaaucgaacuguccaacauuaaggagaauaaaugcaacgguaccgacgccaaggugaaacuaaucaagcaggaacucgauaaguauaaaaaugcaguaacugagcugcagaugcuuauguguucuacacccgccaccggcucggggucagcuauagcaagcggaguggccgucugcaaggugcugcacuuggagggcgaaguuaacaaaaucaagagugcucuccuguccacgaauaaagccguggucucucugagcaacgguguguccguacucacuuuuaagguuuuagaccugaagaauuacauugauaaacagcuuuugccuauccugaacaagcaaucauguaguauuagcaauaucgagaccgugauggaguuccagcagaaaaacaauaggcuacucgaaauaacacgggaguuuucugucaacgcgggggugacuaccccaguguccacauauaugcugaccaauucagaacuucugagcuugauuaacgacaugccgaucacgaacgaucagaagaaacucaugaguaauaacguccaaauuguucgccagcagucuuacuccaucaugugcaucauuaaggaggaagugcuggcauauguagugcaguuaccccuguacggagucauagacacuccuuguuggaaacuccauacaagcccacuuugcaccacuaauacaaaggagggcucgaacaucugucugacccgaacggaucguggcugguacugcgacaaugccgggucuguguccuucuuuccccaagcugaaaccuguaagguuugcucaaacagaguguucugcgauacaaugaauaguuugacucuaccuagcgaggucaaccuguguaauguggacauuuuuaacccaaaauaugauugcaagaucaugaccuccaaaacagacguaucuagcucaguuauaacuagccucggagccauuguguccuguuacgguaagaccaaaugcacagcaagcaauaagaacaagggcaucaucaaaaccuucucuaaugggugugauuaugucucaaacaagggaguggacacugucagugugggcaauacgcuguacuauguuaacaaacaggaggguaagagccuuuacgugaaaggggaacccauuaucaacuuuuaugacccucugguauucccauccgaugaguuugacgcuucuauuucgcaggucaaugaaaagauaaaccaaaguuuggccuucaucaggaaguccgaugagcuccugcacaaugugaacgcgggaaaaucaacaaccaauauuaugaucacuaccaucauuauaguuaucauugugaucuuacugagucuaauugccgucggccuccugcuuuacugcaaggcacggucuacaccggugaccuugagcaaagaccagcuguccggcaucaacaauauagcuuucucaaacugaggacuaguggaagcauuuuccuggcugauuaaaagaaauuacucagcuauggucaucuguuccuguuagaaggcuaugcagcauauuauauacuaugcgcauguuaugaaaugcauaauaaaaaauuuuaaaaaaucuaaaagaucuaaaaaaaaaaaaaaaaaaaaaaaaaaaaaaaaaaaaaaaaaaaaaaaaaaaaaaaaaaaaaaaaugcaucccccccccccccccccccccccccccccccaaaggcucuuuucagagccaccagaauu

SEQ ID NO: 6967 - RNA, 2057 nt, Artificial Sequence
  mRNA product Design d-5 comprising derived and/or modified sequence from HRSV(A2)__F_DSCav1_mut7 (opt4)
gggagagggcgcuuggcuugcaaggacccugagcugcggcauugaagcacacccaacccaacucgacugaagucagccucacugaaccggaucugagaaucuucucucucugggcuugccagggcucuccgaaccuagcuagcauccucuucaauuccaacuagaaagcuuaccauggagcugcugauccugaaggccaacgccaucaccaccauccugaccgccgugaccuucugcuucgccagcggccagaacaucaccgaggaguucuaccagagcaccugcagcgccgugagcaagggcuaccugagcgcccugagaaccggcugguacaccagcgugaucaccaucgagcugagcaacaucaaggagaacaagugcaacggcaccgacgccaaggugaagcugaucaagcaggagcuggacaaguacaagaacgccgugaccgagcugcagaugcugaugugcagcacccccgccaccggcagcggcagcgccaucgccagcggcguggccgugugcaaggugcugcaccuggagggcgaggugaacaagaucaagagcgcccugcugagcaccaacaaggccguggugagccugagcaacggcgugagcgugcugaccuucaaggugcuggaccugaagaacuacaucgacaagcagcugcugcccauccugaacaagcagagcugcagcaucagcaacaucgagaccgugauggaguuccagcagaagaacaacagacugcuggagaucaccagagaguucagcgugaacgccggcgugaccacccccgugagcaccuacaugcugaccaacagcgagcugcugagccugaucaacgacaugcccaucaccaacgaccagaagaagcugaugagcaacaacgugcagaucgugagacagcagagcuacagcaucaugugcaucaucaaggaggaggugcuggccuacguggugcagcugccccuguacggcgugaucgacacccccugcuggaagcugcacaccagcccccugugcaccaccaacaccaaggagggcagcaacaucugccugaccagaaccgacagaggcugguacugcgacaacgccggcagcgugagcuucuucccccaggccgagaccugcaaggugugcagcaacagaguguucugcgacaccaugaacagccugacccugcccagcgaggugaaccugugcaacguggacaucuucaaccccaaguacgacugcaagaucaugaccagcaagaccgacgugagcagcagcgugaucaccagccugggcgccaucgugagcugcuacggcaagaccaagugcaccgccagcaacaagaacaagggcaucaucaagaccuucagcaacggcugcgacuacgugagcaacaagggcguggacaccgugagcgugggcaacacccuguacuacgugaacaagcaggagggcaagagccuguacgugaagggcgagcccaucaucaacuucuacgacccccugguguuccccagcgacgaguucgacgccagcaucagccaggugaacgagaagaucaaccagagccuggccuucaucagaaagagcgacgagcugcugcacaacgugaacgccggcaagagcaccaccaacaucaugaucaccaccaucaucaucgugaucaucgugauccugcugagccugaucgccgugggccugcugcuguacugcaaggccagaagcacccccgugacccugagcaaggaccagcugagcggcaucaacaacaucgccuucagcaacugaggacuaguggaagcauuuuccuggcugauuaaaagaaauuacucagcuauggucaucuguuccuguuagaaggcuaugcagcauauuauauacuaugcgcauguuaugaaaugcauaauaaaaaauuuuaaaaaaucuaaaagaucuaaaaaaaaaaaaaaaaaaaaaaaaaaaaaaaaaaaaaaaaaaaaaaaaaaaaaaaaaaaaaaaaugcaucccccccccccccccccccccccccccccccaaaggcucuuuucagagccaccagaauu

SEQ ID NO: 6968 - RNA, 2057 nt, Artificial Sequence
  mRNA product Design d-5 comprising derived and/or modified sequence from HRSV(A2)__F_DSCav1_mut7 (opt5)
gggagagggcgcuuggcuugcaaggacccugagcugcggcauugaagcacacccaacccaacucgacugaagucagccucacugaaccggaucugagaaucuucucucucugggcuugccagggcucuccgaaccuagcuagcauccucuucaauuccaacuagaaagcuuaccauggagcugcucauccugaaggccaacgcuauuaccacaauccuuacggccgugaccuucugcuuugcgagcggccagaauauuacagaagaguucuaccaauccaccuguucugcugucagcaaaggguaucuguccgcccucagaacaggaugguacaccucuguuaucacaauugaacugagcaacaucaaggagaauaaaugcaacggcaccgacgccaaggugaaacuuaucaagcaggaacuggauaaguauaaaaaugcugugacggagcuccagaugcugauguguuccacccccgccacagggucuggaagcgcuauugccuccggcgucgcggugugcaagguucugcaccucgagggggaagugaacaaaaucaagagcgcccugcuuucuaccaauaaagcugucgugucccugagcaacggaguuucugugcucacauuuaagguccuggaccuuaagaauuacauugauaaacagcugcucccuauccugaacaagcaauccuguagcauuucuaauaucgagaccgugauggaguuccagcagaaaaacaaucggcugcucgaaauuacgcgcgaguuuuccgugaacgccggcgucacaaccccgguuagcacauauaugcugaccaauuccgaacuucugucucucaucaacgacaugcccaucaccaacgaucagaagaaacugaugagcaauaacgugcaaauugugagacagcaguccuacagcaucaugugcauuaucaaggaggaaguccuugcuuaugugguucagcugccucucuacggcgugauugacacacccuguuggaaacugcauacgucuccucugugcaccacaaauaccaaggagggguccaacaucugucucacacggaccgaucgcggaugguacugcgacaaugccggcagcgucucuuucuuuccccaagcggaaacguguaaggugugcagcaacagaguuuucugcgauacaaugaacucccugacccuuccuucugaggugaaucuguguaaugucgacaucuuuaacccgaaauaugauugcaagauuaugaccagcaaaacagacguguccagcucugucaucaccucccucggggccauugugagcuguuacggaaagacaaaaugcacggcuucuaauaagaacaagggcaucauuaaaaccuucuccaaugggugugauuauguuagcaacaagggaguggacacagucuccgugggcaauacccuguacuauguuaacaaacaggagggcaagucucuuuacgugaaaggggaacccaucaucaacuuuuaugacccucuggucuuccccagcgaugaguuugacgccuccauuucucaggugaaugaaaagaucaaccaaagccucgcuuucauucggaaguccgaugagcugcugcacaaugugaacgccggaaaaagcacaaccaauaucaugauuacgaccaucauuaucguuaucauugucauccuccugucucuuauugccgugggccugcuccuguacugcaaggcucgcuccacaccugugacccugagcaaagaccagcuuucugggaucaacaauauugcguucuccaacugaggacuaguggaagcauuuuccuggcugauuaaaagaaauuacucagcuauggucaucuguuccuguuagaaggcuaugcagcauauuauauacuaugcgcauguuaugaaaugcauaauaaaaaauuuuaaaaaaucuaaaagaucuaaaaaaaaaaaaaaaaaaaaaaaaaaaaaaaaaaaaaaaaaaaaaaaaaaaaaaaaaaaaaaaaugcaucccccccccccccccccccccccccccccccaaaggcucuuuucagagccaccagaauu

SEQ ID NO: 6969 - RNA, 2057 nt, Artificial Sequence
  mRNA product Design d-5 comprising derived and/or modified sequence from HRSV(A2)__F_DSCav1_mut7 (opt6)
gggagagggcgcuuggcuugcaaggacccugagcugcggcauugaagcacacccaacccaacucgacugaagucagccucacugaaccggaucugagaaucuucucucucugggcuugccagggcucuccgaaccuagcuagcauccucuucaauuccaacuagaaagcuuaccauggaauuacucauacucaaagcaaaugcaauuaccacuauacucacagcuguaacuuuuuguuucgccucaggacaaaacaucacagaagaauuuuaucaauccacaugcucugccguaucaaaaggcuaccuaucugcccuaagaacagguugguacacaucuguaauaacaaucgaauuauccaacaucaaagaaaacaaaugcaacggcacagacgcaaaagucaaacucaucaaacaagaauuagauaaauauaaaaacgcaguaacagaacuacaaaugcuaaugugcucuacacccgccacaggaucaggauccgcaaucgcuucuggaguagccguuugcaaaguauuacaccuagaaggagaaguaaauaaaauaaaauccgcacuacuaucaacuaauaaagcaguaguaucacuuucuaaugguguaucaguauuaacauucaaaguccucgaccuaaaaaauuacaucgacaaacaacuauuacccauccuuaauaaacaaucaugcuccauaucaaacauagaaacugucauggaauuucaacaaaaaaacaauagacuucuagaaaucacaagagaauuuucuguaaaugcaggaguaacuacaccaguaucaacauauauguuaaccaacuccgaacuacuaucacucauaaacgacaugccaauaacaaacgaccaaaaaaaacuaaugucaaauaacguucaaauaguaagacaacaaucauacucaaucaugugcauaauaaaagaagaaguuuuagcauacgucguacaacuuccccuauacggaguaauagacaccccuugcuggaaacuccacaccucaccacuaugcacuacaaacacaaaagaagguuccaacaucugcuuaacaagaaccgaucgaggaugguacugcgacaacgcugguuccguaucuuucuucccacaagcagaaacaugcaaaguaugcuccaauagaguauucugcgacaccaugaacucacuaacucuaccauccgaaguaaaccuaugcaacgucgacauauuuaauccaaaauaugacugcaaaauaaugacuucaaaaacagacguauccucaucaguaauaacauccuuaggagcaauaguaucauguuacggcaagacaaaauguacagccucaaacaaaaacaaagguaucauuaaaaccuucuccaacggcugcgacuacguaucaaauaaaggugucgauacaguaucaguaggaaacacacucuauuacguuaauaaacaagaaggaaagucauuauacguaaaaggagaaccaauaaucaauuucuacgauccccuagucuuucccucagaugaauuugacgcaagcaucucucaagucaacgaaaaaauaaaccaaucccuagccuucauaagaaaaucagaugaacuacuucauaacgucaacgccggaaaaucaacaaccaacauaaugaucacuacaaucauaauuguaauuauaguaauacuacuaucgcuaauugccguuggacuacuacuauauuguaaagcaagaucaacacccguuacucuauccaaagaucaauuaucaggaaucaacaacauagccuucucaaauuaaggacuaguggaagcauuuuccuggcugauuaaaagaaauuacucagcuauggucaucuguuccuguuagaaggcuaugcagcauauuauauacuaugcgcauguuaugaaaugcauaauaaaaaauuuuaaaaaaucuaaaagaucuaaaaaaaaaaaaaaaaaaaaaaaaaaaaaaaaaaaaaaaaaaaaaaaaaaaaaaaaaaaaaaaaugcaucccccccccccccccccccccccccccccccaaaggcucuuuucagagccaccagaauu

SEQ ID NO: 6970 - RNA, 2057 nt, Artificial Sequence
  mRNA product Design d-5 comprising derived and/or modified sequence from HRSV(A2)__F_DSCav1_mut7 (opt11)
gggagagggcgcuuggcuugcaaggacccugagcugcggcauugaagcacacccaacccaacucgacugaagucagccucacugaaccggaucugagaaucuucucucucugggcuugccagggcucuccgaaccuagcuagcauccucuucaauuccaacuagaaagcuuaccauggaacuacucauacuuaaagccaacgcaauaaccacaauccucaccgccgucacauucugcuucgccucgggacaaaacauaaccgaagaauuuuaccagucuaccugcuccgccgucuccaaggguuaccucuccgcgcuccgcaccgggugguacaccagcguuaucaccaucgaacuaucuaacauaaaagaaaacaagugcaacggaaccgacgcaaaagucaaacucaucaaacaagaacuagacaaauacaagaaugccgucaccgaacuacaaaugcucaugugcuccacccccgccaccggauccggcuccgccauugccuccggcgucgccguaugcaaaguccuucacuuggaaggagaaguuaacaaaauaaaaagcgcccuccugucgaccaacaaagcgguggucagccucuccaacggcgucucuguccucaccuucaaaguccucgaccucaagaacuacauagauaaacaacuacuccccauccuaaacaaacagucaugcagcauauccaacaucgaaaccgucauggaguuccaacagaaaaacaaccgccuccuugaaaucacccgcgaguucucugucaacgccggcgucaccacccccgucuccaccuacaugcucacaaacuccgaacuccucagccucaucaacgacaugccaaucaccaacgaccaaaagaaacucauguccaacaacguacaaaucguucgucaacaaucauacucaaucaugugcaucauuaaagaagaaguccucgcauacgucguccaacucccccucuauggggucaucgacaccccaugcuggaaacuccacaccucuccccuaugcaccaccaacaccaaagaaggcuccaacaucugccuaacccgaaccgaccgcggaugguacugcgacaacgccggcuccgucuccuucuucccccaggccgaaacauguaaagucugcuccaaccguguguucugcgacaccaugaacucacuaacccuccccuccgaagucaaccucugcaacgucgacaucuucaacccgaaauacgacugcaaaauaaugaccagcaaaacagacguauccucuagcgucauuaccagccuaggugcaaucguguccugcuacggcaaaacaaaaugcaccgccuccaacaaaaauaaaggaaucauaaaaaccuucuccaacggcugcgacuacgucagcaacaaaggagucgacaccgucuccguaggaaauacucuauacuaugucaacaaacaagaggguaaaucccucuacgucaaaggcgaacccaucaucaacuucuacgacccccucgucuuccccucugacgaguucgacgccagcauaucacaaguaaacgaaaagaucaaccaaucccucgcauucauucgcaaauccgacgaacuccuacacaacgucaacgccggaaaauccaccaccaacaucaugaucacuacuaucauuaucgucaucaucgucauccuccucucccucaucgcagucggccuucuacucuacugcaaggcacgcucuacacccguaacccugucuaaagaccaacucuccggcaucaacaacaucgcuuucuccaacuaaggacuaguggaagcauuuuccuggcugauuaaaagaaauuacucagcuauggucaucuguuccuguuagaaggcuaugcagcauauuauauacuaugcgcauguuaugaaaugcauaauaaaaaauuuuaaaaaaucuaaaagaucuaaaaaaaaaaaaaaaaaaaaaaaaaaaaaaaaaaaaaaaaaaaaaaaaaaaaaaaaaaaaaaaaugcaucccccccccccccccccccccccccccccccaaaggcucuuuucagagccaccagaauu

SEQ ID NO: 6971 - RNA, 1937 nt, Artificial Sequence
  mRNA product Design e-1 comprising derived and/or modified sequence from HRSV(A2)__F_DSCav1_mut7 (opt1)
gggagaauauaagcguuggcggagcgucgguuguagcacucugcgcgcccgcucuucugcugcuguuugucuacuuccuccugcuuccccgccgccgccgccgccaucaagcuuaccauggagcugcucauccugaaggccaacgccaucaccaccauccugacggcggugaccuucugcuucgccagcggccagaacaucaccgaggaguucuaccaguccacgugcagcgccgucuccaagggguaccucagcgcccugcggaccggcugguacaccuccgugaucaccaucgagcugagcaacaucaaggagaacaagugcaacgggaccgacgccaaggugaagcucaucaagcaggagcuggacaaguacaagaacgcggucacggagcugcagaugcugaugugcuccaccccggcaaccggcuccggcuccgccaucgcgagcggcgucgccgugugcaaggugcugcaccucgagggggaggucaacaagaucaagagcgcccugcuguccaccaacaaggccguggugagccucuccaacggcgucagcgugcugaccuucaaggugcuggaccucaagaacuacaucgacaagcagcugcugcccauccugaacaagcagagcugcuccaucagcaacaucgagacggugauggaguuccagcagaagaacaaccggcuccuggagaucacccgcgaguucagcgugaacgccggggucaccacccccguguccacguacaugcugaccaacagcgagcuccugucccugaucaacgacaugccgaucaccaacgaccagaagaagcucaugagcaacaacgugcagaucguccggcagcaguccuacagcaucaugugcaucaucaaggaggaggugcuggcguacgugguccagcugccccucuacggcgugaucgacacccccugcuggaagcugcacacgagcccccugugcaccaccaacaccaaggagggguccaacaucugccucacgcgcaccgaccggggcugguacugcgacaacgccggcagcgucuccuucuucccgcaggccgagaccugcaaggugugcagcaaccgcguguucugcgacaccaugaacucccugacgcugcccagcgagguaaaccucugcaacgucgacaucuucaaccccaaguacgacugcaagaucaugaccuccaagaccgacgugagcuccagcgugaucaccucccugggggccaucgucagcugcuacggcaagacgaagugcaccgccagcaacaagaacaaggggaucaucaagaccuucuccaacggcugcgacuacgugagcaacaagggcguggacaccguguccgucgggaacacccuguacuacgugaacaagcaggagggcaagagccucuacgugaagggggagcccaucaucaacuucuacgacccgcuggucuuccccuccgacgaguucgacgcgagcaucucccaggugaacgagaagaucaaccagagccuggccuucauccgcaaguccgacgagcugcuccacaacgugaacgccggcaagagcacgaccaacaucaugaucaccaccaucaucaucgucaucaucgugauccugcugucccucaucgccguggggcugcugcucuacugcaaggcccggagcacgcccgucacccuguccaaggaccagcugagcggcaucaacaacaucgcguucuccaacugaggacuaguguccaccugucccuccugggcugcuggauugucucguuuuccugccaaauaaacaggaucagcgcuuuacagaucuaaaaaaaaaaaaaaaaaaaaaaaaaaaaaaaaaaaaaaaaaaaaaaaaaaaaaaaaaaaaaaaaugcaucccccccccccccccccccccccccccccccaaaggcucuuuucagagccaccagaauu

SEQ ID NO: 6972 - RNA, 1937 nt, Artificial Sequence
  mRNA product Design e-1 comprising derived and/or modified sequence from HRSV(A2)__F_DSCav1_mut7 (opt1)
gggagaauauaagcguuggcggagcgucgguuguagcacucugcgcgcccgcucuucugcugcuguuugucuacuuccuccugcuuccccgccgccgccgccgccaucaagcuuaccauggagcugcucauccugaaggccaacgccaucaccaccauccugacggcggugaccuucugcuucgccagcggccagaacaucaccgaggaguucuaccaguccacgugcagcgccgucuccaagggguaccucagcgcccugcgcaccggcugguacaccuccgugaucaccaucgagcugagcaacaucaaggagaacaagugcaacgggaccgacgccaaggugaagcucaucaagcaggagcuggacaaguacaagaacgcggucacggagcugcagaugcucaugugcuccacccccgccaccggcagcggguccgccaucgccagcggcguggcggugugcaagguccugcaccuggagggcgaggugaacaagaucaaguccgcccuccugagcaccaacaaggccguggucucccugagcaacgggguguccgugcucacguucaagguccuggaccugaagaacuacaucgacaagcagcuccugccgauccugaacaagcagagcugcuccaucagcaacaucgagaccgugauggaguuccagcagaagaacaaccggcuccuggagaucacccgcgaguucuccgugaacgccggcgucaccacgcccgugagcaccuacaugcugaccaacagcgagcuccugucccugaucaacgacaugcccaucaccaacgaccagaagaagcucaugagcaacaacgugcagaucguccggcagcaguccuacagcaucaugugcaucaucaaggaggaggugcuggccuacgugguccagcugccccucuacggggugaucgacacgccgugcuggaagcugcacaccagcccccugugcaccaccaacacgaaggagggcagcaacaucugccucacccgcaccgaccgggggugguacugcgacaacgcgggcuccgugagcuucuucccccaggccgagaccugcaaggucugcuccaaccgcguguucugcgacacgaugaacagccugacccugcccuccgaggucaaccucugcaacguggacaucuucaacccgaaguacgacugcaagaucaugaccagcaagaccgacguguccagcuccgucaucacgagccugggcgccaucguguccugcuacgggaagaccaagugcaccgccagcaacaagaacaagggcaucaucaagaccuucuccaacgggugcgacuacgugagcaacaagggcgucgacacggugagcgugggcaacacccuguacuacgucaacaagcaggaggggaagucccucuacgugaagggcgagcccaucaucaacuucuacgacccccugguguuccccagcgacgaguucgacgccuccaucagccaggucaacgagaagaucaaccagucccuggcguucauccggaaguccgacgagcuccugcacaacgugaacgccgggaaguccaccaccaacaucaugaucaccacgaucaucaucgugaucaucgucauccugcucagccugaucgccgugggccugcuccuguacugcaaggcccgcuccaccccggugacccugagcaaggaccagcuguccgggaucaacaacaucgccuucagcaacugaggacuaguguccaccugucccuccugggcugcuggauugucucguuuuccugccaaauaaacaggaucagcgcuuuacagaucuaaaaaaaaaaaaaaaaaaaaaaaaaaaaaaaaaaaaaaaaaaaaaaaaaaaaaaaaaaaaaaaaugcaucccccccccccccccccccccccccccccccaaaggcucuuuucagagccaccagaauu

SEQ ID NO: 6973 - RNA, 1937 nt, Artificial Sequence
  mRNA product Design e-1 comprising derived and/or modified sequence from HRSV(A2)__F_DSCav1_mut7 (opt2)
gggagaauauaagcguuggcggagcgucgguuguagcacucugcgcgcccgcucuucugcugcuguuugucuacuuccuccugcuuccccgccgccgccgccgccaucaagcuuaccauggagcuccucauccucaaggccaacgccaucaccaccauccucaccgccgucaccuucugcuucgccuccggccagaacaucaccgaggaguucuaccaguccaccugcuccgccgucuccaagggcuaccucuccgcccuccgcaccggcugguacaccuccgucaucaccaucgagcucuccaacaucaaggagaacaagugcaacggcaccgacgccaaggucaagcucaucaagcaggagcucgacaaguacaagaacgccgucaccgagcuccagaugcucaugugcuccacccccgccaccggcuccggcuccgccaucgccuccggcgucgccgucugcaagguccuccaccucgagggcgaggucaacaagaucaaguccgcccuccucuccaccaacaaggccgucgucucccucuccaacggcgucuccguccucaccuucaagguccucgaccucaagaacuacaucgacaagcagcuccuccccauccucaacaagcaguccugcuccaucuccaacaucgagaccgucauggaguuccagcagaagaacaaccgccuccucgagaucacccgcgaguucuccgucaacgccggcgucaccacccccgucuccaccuacaugcucaccaacuccgagcuccucucccucaucaacgacaugcccaucaccaacgaccagaagaagcucauguccaacaacguccagaucguccgccagcaguccuacuccaucaugugcaucaucaaggaggagguccucgccuacgucguccagcucccccucuacggcgucaucgacacccccugcuggaagcuccacaccuccccccucugcaccaccaacaccaaggagggcuccaacaucugccucacccgcaccgaccgcggcugguacugcgacaacgccggcuccgucuccuucuucccccaggccgagaccugcaaggucugcuccaaccgcgucuucugcgacaccaugaacucccucacccuccccuccgaggucaaccucugcaacgucgacaucuucaaccccaaguacgacugcaagaucaugaccuccaagaccgacgucuccuccuccgucaucaccucccucggcgccaucgucuccugcuacggcaagaccaagugcaccgccuccaacaagaacaagggcaucaucaagaccuucuccaacggcugcgacuacgucuccaacaagggcgucgacaccgucuccgucggcaacacccucuacuacgucaacaagcaggagggcaagucccucuacgucaagggcgagcccaucaucaacuucuacgacccccucgucuuccccuccgacgaguucgacgccuccaucucccaggucaacgagaagaucaaccagucccucgccuucauccgcaaguccgacgagcuccuccacaacgucaacgccggcaaguccaccaccaacaucaugaucaccaccaucaucaucgucaucaucgucauccuccucucccucaucgccgucggccuccuccucuacugcaaggcccgcuccacccccgucacccucuccaaggaccagcucuccggcaucaacaacaucgccuucuccaacugaggacuaguguccaccugucccuccugggcugcuggauugucucguuuuccugccaaauaaacaggaucagcgcuuuacagaucuaaaaaaaaaaaaaaaaaaaaaaaaaaaaaaaaaaaaaaaaaaaaaaaaaaaaaaaaaaaaaaaaugcaucccccccccccccccccccccccccccccccaaaggcucuuuucagagccaccagaauu

SEQ ID NO: 6974 - RNA, 1937 nt, Artificial Sequence
  mRNA product Design e-1 comprising derived and/or modified sequence from HRSV(A2)__F_DSCav1_mut7 (opt3)
gggagaauauaagcguuggcggagcgucgguuguagcacucugcgcgcccgcucuucugcugcuguuugucuacuuccuccugcuuccccgccgccgccgccgccaucaagcuuaccauggagcugcucauccuuaaggccaacgcuauuaccacaauacugacugcagugacguucugcuuugccagcggccagaauaucaccgaagaguucuaccaauccacauguucugcggucucaaaaggguauuugagugcuuuaagaacuggaugguacaccagcguuauuacaaucgaacuguccaacauuaaggagaauaaaugcaacgguaccgacgccaaggugaaacuaaucaagcaggaacucgauaaguauaaaaaugcaguaacugagcugcagaugcuuauguguucuacacccgccaccggcucggggucagcuauagcaagcggaguggccgucugcaaggugcugcacuuggagggcgaaguuaacaaaaucaagagugcucuccuguccacgaauaaagccguggucucucugagcaacgguguguccguacucacuuuuaagguuuuagaccugaagaauuacauugauaaacagcuuuugccuauccugaacaagcaaucauguaguauuagcaauaucgagaccgugauggaguuccagcagaaaaacaauaggcuacucgaaauaacacgggaguuuucugucaacgcgggggugacuaccccaguguccacauauaugcugaccaauucagaacuucugagcuugauuaacgacaugccgaucacgaacgaucagaagaaacucaugaguaauaacguccaaauuguucgccagcagucuuacuccaucaugugcaucauuaaggaggaagugcuggcauauguagugcaguuaccccuguacggagucauagacacuccuuguuggaaacuccauacaagcccacuuugcaccacuaauacaaaggagggcucgaacaucugucugacccgaacggaucguggcugguacugcgacaaugccgggucuguguccuucuuuccccaagcugaaaccuguaagguuugcucaaacagaguguucugcgauacaaugaauaguuugacucuaccuagcgaggucaaccuguguaauguggacauuuuuaacccaaaauaugauugcaagaucaugaccuccaaaacagacguaucuagcucaguuauaacuagccucggagccauuguguccuguuacgguaagaccaaaugcacagcaagcaauaagaacaagggcaucaucaaaaccuucucuaaugggugugauuaugucucaaacaagggaguggacacugucagugugggcaauacgcuguacuauguuaacaaacaggaggguaagagccuuuacgugaaaggggaacccauuaucaacuuuuaugacccucugguauucccauccgaugaguuugacgcuucuauuucgcaggucaaugaaaagauaaaccaaaguuuggccuucaucaggaaguccgaugagcuccugcacaaugugaacgcgggaaaaucaacaaccaauauuaugaucacuaccaucauuauaguuaucauugugaucuuacugagucuaauugccgucggccuccugcuuuacugcaaggcacggucuacaccggugaccuugagcaaagaccagcuguccggcaucaacaauauagcuuucucaaacugaggacuaguguccaccugucccuccugggcugcuggauugucucguuuuccugccaaauaaacaggaucagcgcuuuacagaucuaaaaaaaaaaaaaaaaaaaaaaaaaaaaaaaaaaaaaaaaaaaaaaaaaaaaaaaaaaaaaaaaugcaucccccccccccccccccccccccccccccccaaaggcucuuuucagagccaccagaauu

SEQ ID NO: 6975 - RNA, 1937 nt, Artificial Sequence
  mRNA product Design e-1 comprising derived and/or modified sequence from HRSV(A2)__F_DSCav1_mut7 (opt4)
gggagaauauaagcguuggcggagcgucgguuguagcacucugcgcgcccgcucuucugcugcuguuugucuacuuccuccugcuuccccgccgccgccgccgccaucaagcuuaccauggagcugcugauccugaaggccaacgccaucaccaccauccugaccgccgugaccuucugcuucgccagcggccagaacaucaccgaggaguucuaccagagcaccugcagcgccgugagcaagggcuaccugagcgcccugagaaccggcugguacaccagcgugaucaccaucgagcugagcaacaucaaggagaacaagugcaacggcaccgacgccaaggugaagcugaucaagcaggagcuggacaaguacaagaacgccgugaccgagcugcagaugcugaugugcagcacccccgccaccggcagcggcagcgccaucgccagcggcguggccgugugcaaggugcugcaccuggagggcgaggugaacaagaucaagagcgcccugcugagcaccaacaaggccguggugagccugagcaacggcgugagcgugcugaccuucaaggugcuggaccugaagaacuacaucgacaagcagcugcugcccauccugaacaagcagagcugcagcaucagcaacaucgagaccgugauggaguuccagcagaagaacaacagacugcuggagaucaccagagaguucagcgugaacgccggcgugaccacccccgugagcaccuacaugcugaccaacagcgagcugcugagccugaucaacgacaugcccaucaccaacgaccagaagaagcugaugagcaacaacgugcagaucgugagacagcagagcuacagcaucaugugcaucaucaaggaggaggugcuggccuacguggugcagcugccccuguacggcgugaucgacacccccugcuggaagcugcacaccagcccccugugcaccaccaacaccaaggagggcagcaacaucugccugaccagaaccgacagaggcugguacugcgacaacgccggcagcgugagcuucuucccccaggccgagaccugcaaggugugcagcaacagaguguucugcgacaccaugaacagccugacccugcccagcgaggugaaccugugcaacguggacaucuucaaccccaaguacgacugcaagaucaugaccagcaagaccgacgugagcagcagcgugaucaccagccugggcgccaucgugagcugcuacggcaagaccaagugcaccgccagcaacaagaacaagggcaucaucaagaccuucagcaacggcugcgacuacgugagcaacaagggcguggacaccgugagcgugggcaacacccuguacuacgugaacaagcaggagggcaagagccuguacgugaagggcgagcccaucaucaacuucuacgacccccugguguuccccagcgacgaguucgacgccagcaucagccaggugaacgagaagaucaaccagagccuggccuucaucagaaagagcgacgagcugcugcacaacgugaacgccggcaagagcaccaccaacaucaugaucaccaccaucaucaucgugaucaucgugauccugcugagccugaucgccgugggccugcugcuguacugcaaggccagaagcacccccgugacccugagcaaggaccagcugagcggcaucaacaacaucgccuucagcaacugaggacuaguguccaccugucccuccugggcugcuggauugucucguuuuccugccaaauaaacaggaucagcgcuuuacagaucuaaaaaaaaaaaaaaaaaaaaaaaaaaaaaaaaaaaaaaaaaaaaaaaaaaaaaaaaaaaaaaaaugcaucccccccccccccccccccccccccccccccaaaggcucuuuucagagccaccagaauu

SEQ ID NO: 6976 - RNA, 1937 nt, Artificial Sequence
  mRNA product Design e-1 comprising derived and/or modified sequence from HRSV(A2)__F_DSCav1_mut7 (opt5)
gggagaauauaagcguuggcggagcgucgguuguagcacucugcgcgcccgcucuucugcugcuguuugucuacuuccuccugcuuccccgccgccgccgccgccaucaagcuuaccauggagcugcucauccugaaggccaacgcuauuaccacaauccuuacggccgugaccuucugcuuugcgagcggccagaauauuacagaagaguucuaccaauccaccuguucugcugucagcaaaggguaucuguccgcccucagaacaggaugguacaccucuguuaucacaauugaacugagcaacaucaaggagaauaaaugcaacggcaccgacgccaaggugaaacuuaucaagcaggaacuggauaaguauaaaaaugcugugacggagcuccagaugcugauguguuccacccccgccacagggucuggaagcgcuauugccuccggcgucgcggugugcaagguucugcaccucgagggggaagugaacaaaaucaagagcgcccugcuuucuaccaauaaagcugucgugucccugagcaacggaguuucugugcucacauuuaagguccuggaccuuaagaauuacauugauaaacagcugcucccuauccugaacaagcaauccuguagcauuucuaauaucgagaccgugauggaguuccagcagaaaaacaaucggcugcucgaaauuacgcgcgaguuuuccgugaacgccggcgucacaaccccgguuagcacauauaugcugaccaauuccgaacuucugucucucaucaacgacaugcccaucaccaacgaucagaagaaacugaugagcaauaacgugcaaauugugagacagcaguccuacagcaucaugugcauuaucaaggaggaaguccuugcuuaugugguucagcugccucucuacggcgugauugacacacccuguuggaaacugcauacgucuccucugugcaccacaaauaccaaggagggguccaacaucugucucacacggaccgaucgcggaugguacugcgacaaugccggcagcgucucuuucuuuccccaagcggaaacguguaaggugugcagcaacagaguuuucugcgauacaaugaacucccugacccuuccuucugaggugaaucuguguaaugucgacaucuuuaacccgaaauaugauugcaagauuaugaccagcaaaacagacguguccagcucugucaucaccucccucggggccauugugagcuguuacggaaagacaaaaugcacggcuucuaauaagaacaagggcaucauuaaaaccuucuccaaugggugugauuauguuagcaacaagggaguggacacagucuccgugggcaauacccuguacuauguuaacaaacaggagggcaagucucuuuacgugaaaggggaacccaucaucaacuuuuaugacccucuggucuuccccagcgaugaguuugacgccuccauuucucaggugaaugaaaagaucaaccaaagccucgcuuucauucggaaguccgaugagcugcugcacaaugugaacgccggaaaaagcacaaccaauaucaugauuacgaccaucauuaucguuaucauugucauccuccugucucuuauugccgugggccugcuccuguacugcaaggcucgcuccacaccugugacccugagcaaagaccagcuuucugggaucaacaauauugcguucuccaacugaggacuaguguccaccugucccuccugggcugcuggauugucucguuuuccugccaaauaaacaggaucagcgcuuuacagaucuaaaaaaaaaaaaaaaaaaaaaaaaaaaaaaaaaaaaaaaaaaaaaaaaaaaaaaaaaaaaaaaaugcaucccccccccccccccccccccccccccccccaaaggcucuuuucagagccaccagaauu

SEQ ID NO: 6977 - RNA, 1937 nt, Artificial Sequence
  mRNA product Design e-1 comprising derived and/or modified sequence from HRSV(A2)__F_DSCav1_mut7 (opt6)
gggagaauauaagcguuggcggagcgucgguuguagcacucugcgcgcccgcucuucugcugcuguuugucuacuuccuccugcuuccccgccgccgccgccgccaucaagcuuaccauggaauuacucauacucaaagcaaaugcaauuaccacuauacucacagcuguaacuuuuuguuucgccucaggacaaaacaucacagaagaauuuuaucaauccacaugcucugccguaucaaaaggcuaccuaucugcccuaagaacagguugguacacaucuguaauaacaaucgaauuauccaacaucaaagaaaacaaaugcaacggcacagacgcaaaagucaaacucaucaaacaagaauuagauaaauauaaaaacgcaguaacagaacuacaaaugcuaaugugcucuacacccgccacaggaucaggauccgcaaucgcuucuggaguagccguuugcaaaguauuacaccuagaaggagaaguaaauaaaauaaaauccgcacuacuaucaacuaauaaagcaguaguaucacuuucuaaugguguaucaguauuaacauucaaaguccucgaccuaaaaaauuacaucgacaaacaacuauuacccauccuuaauaaacaaucaugcuccauaucaaacauagaaacugucauggaauuucaacaaaaaaacaauagacuucuagaaaucacaagagaauuuucuguaaaugcaggaguaacuacaccaguaucaacauauauguuaaccaacuccgaacuacuaucacucauaaacgacaugccaauaacaaacgaccaaaaaaaacuaaugucaaauaacguucaaauaguaagacaacaaucauacucaaucaugugcauaauaaaagaagaaguuuuagcauacgucguacaacuuccccuauacggaguaauagacaccccuugcuggaaacuccacaccucaccacuaugcacuacaaacacaaaagaagguuccaacaucugcuuaacaagaaccgaucgaggaugguacugcgacaacgcugguuccguaucuuucuucccacaagcagaaacaugcaaaguaugcuccaauagaguauucugcgacaccaugaacucacuaacucuaccauccgaaguaaaccuaugcaacgucgacauauuuaauccaaaauaugacugcaaaauaaugacuucaaaaacagacguauccucaucaguaauaacauccuuaggagcaauaguaucauguuacggcaagacaaaauguacagccucaaacaaaaacaaagguaucauuaaaaccuucuccaacggcugcgacuacguaucaaauaaaggugucgauacaguaucaguaggaaacacacucuauuacguuaauaaacaagaaggaaagucauuauacguaaaaggagaaccaauaaucaauuucuacgauccccuagucuuucccucagaugaauuugacgcaagcaucucucaagucaacgaaaaaauaaaccaaucccuagccuucauaagaaaaucagaugaacuacuucauaacgucaacgccggaaaaucaacaaccaacauaaugaucacuacaaucauaauuguaauuauaguaauacuacuaucgcuaauugccguuggacuacuacuauauuguaaagcaagaucaacacccguuacucuauccaaagaucaauuaucaggaaucaacaacauagccuucucaaauuaaggacuaguguccaccugucccuccugggcugcuggauugucucguuuuccugccaaauaaacaggaucagcgcuuuacagaucuaaaaaaaaaaaaaaaaaaaaaaaaaaaaaaaaaaaaaaaaaaaaaaaaaaaaaaaaaaaaaaaaugcaucccccccccccccccccccccccccccccccaaaggcucuuuucagagccaccagaauu

SEQ ID NO: 6978 - RNA, 1937 nt, Artificial Sequence
  mRNA product Design e-1 comprising derived and/or modified sequence from HRSV(A2)__F_DSCav1_mut7 (opt11)
gggagaauauaagcguuggcggagcgucgguuguagcacucugcgcgcccgcucuucugcugcuguuugucuacuuccuccugcuuccccgccgccgccgccgccaucaagcuuaccauggaacuacucauacuuaaagccaacgcaauaaccacaauccucaccgccgucacauucugcuucgccucgggacaaaacauaaccgaagaauuuuaccagucuaccugcuccgccgucuccaaggguuaccucuccgcgcuccgcaccgggugguacaccagcguuaucaccaucgaacuaucuaacauaaaagaaaacaagugcaacggaaccgacgcaaaagucaaacucaucaaacaagaacuagacaaauacaagaaugccgucaccgaacuacaaaugcucaugugcuccacccccgccaccggauccggcuccgccauugccuccggcgucgccguaugcaaaguccuucacuuggaaggagaaguuaacaaaauaaaaagcgcccuccugucgaccaacaaagcgguggucagccucuccaacggcgucucuguccucaccuucaaaguccucgaccucaagaacuacauagauaaacaacuacuccccauccuaaacaaacagucaugcagcauauccaacaucgaaaccgucauggaguuccaacagaaaaacaaccgccuccuugaaaucacccgcgaguucucugucaacgccggcgucaccacccccgucuccaccuacaugcucacaaacuccgaacuccucagccucaucaacgacaugccaaucaccaacgaccaaaagaaacucauguccaacaacguacaaaucguucgucaacaaucauacucaaucaugugcaucauuaaagaagaaguccucgcauacgucguccaacucccccucuauggggucaucgacaccccaugcuggaaacuccacaccucuccccuaugcaccaccaacaccaaagaaggcuccaacaucugccuaacccgaaccgaccgcggaugguacugcgacaacgccggcuccgucuccuucuucccccaggccgaaacauguaaagucugcuccaaccguguguucugcgacaccaugaacucacuaacccuccccuccgaagucaaccucugcaacgucgacaucuucaacccgaaauacgacugcaaaauaaugaccagcaaaacagacguauccucuagcgucauuaccagccuaggugcaaucguguccugcuacggcaaaacaaaaugcaccgccuccaacaaaaauaaaggaaucauaaaaaccuucuccaacggcugcgacuacgucagcaacaaaggagucgacaccgucuccguaggaaauacucuauacuaugucaacaaacaagaggguaaaucccucuacgucaaaggcgaacccaucaucaacuucuacgacccccucgucuuccccucugacgaguucgacgccagcauaucacaaguaaacgaaaagaucaaccaaucccucgcauucauucgcaaauccgacgaacuccuacacaacgucaacgccggaaaauccaccaccaacaucaugaucacuacuaucauuaucgucaucaucgucauccuccucucccucaucgcagucggccuucuacucuacugcaaggcacgcucuacacccguaacccugucuaaagaccaacucuccggcaucaacaacaucgcuuucuccaacuaaggacuaguguccaccugucccuccugggcugcuggauugucucguuuuccugccaaauaaacaggaucagcgcuuuacagaucuaaaaaaaaaaaaaaaaaaaaaaaaaaaaaaaaaaaaaaaaaaaaaaaaaaaaaaaaaaaaaaaaugcaucccccccccccccccccccccccccccccccaaaggcucuuuucagagccaccagaauu

SEQ ID NO: 6979 - RNA, 1919 nt, Artificial Sequence
  mRNA product Design e-2 comprising derived and/or modified sequence from HRSV(A2)__F_DSCav1_mut7 (opt1)
gggagacccgugacccggaaguuguacggcuacgcgacuuucccucccacaaacccucgcgcccuuccuuuccuacuugggcccggcagaaagcuuaccauggagcugcucauccugaaggccaacgccaucaccaccauccugacggcggugaccuucugcuucgccagcggccagaacaucaccgaggaguucuaccaguccacgugcagcgccgucuccaagggguaccucagcgcccugcggaccggcugguacaccuccgugaucaccaucgagcugagcaacaucaaggagaacaagugcaacgggaccgacgccaaggugaagcucaucaagcaggagcuggacaaguacaagaacgcggucacggagcugcagaugcugaugugcuccaccccggcaaccggcuccggcuccgccaucgcgagcggcgucgccgugugcaaggugcugcaccucgagggggaggucaacaagaucaagagcgcccugcuguccaccaacaaggccguggugagccucuccaacggcgucagcgugcugaccuucaaggugcuggaccucaagaacuacaucgacaagcagcugcugcccauccugaacaagcagagcugcuccaucagcaacaucgagacggugauggaguuccagcagaagaacaaccggcuccuggagaucacccgcgaguucagcgugaacgccggggucaccacccccguguccacguacaugcugaccaacagcgagcuccugucccugaucaacgacaugccgaucaccaacgaccagaagaagcucaugagcaacaacgugcagaucguccggcagcaguccuacagcaucaugugcaucaucaaggaggaggugcuggcguacgugguccagcugccccucuacggcgugaucgacacccccugcuggaagcugcacacgagcccccugugcaccaccaacaccaaggagggguccaacaucugccucacgcgcaccgaccggggcugguacugcgacaacgccggcagcgucuccuucuucccgcaggccgagaccugcaaggugugcagcaaccgcguguucugcgacaccaugaacucccugacgcugcccagcgagguaaaccucugcaacgucgacaucuucaaccccaaguacgacugcaagaucaugaccuccaagaccgacgugagcuccagcgugaucaccucccugggggccaucgucagcugcuacggcaagacgaagugcaccgccagcaacaagaacaaggggaucaucaagaccuucuccaacggcugcgacuacgugagcaacaagggcguggacaccguguccgucgggaacacccuguacuacgugaacaagcaggagggcaagagccucuacgugaagggggagcccaucaucaacuucuacgacccgcuggucuuccccuccgacgaguucgacgcgagcaucucccaggugaacgagaagaucaaccagagccuggccuucauccgcaaguccgacgagcugcuccacaacgugaacgccggcaagagcacgaccaacaucaugaucaccaccaucaucaucgucaucaucgugauccugcugucccucaucgccguggggcugcugcucuacugcaaggcccggagcacgcccgucacccuguccaaggaccagcugagcggcaucaacaacaucgcguucuccaacugaggacuaguguccaccugucccuccugggcugcuggauugucucguuuuccugccaaauaaacaggaucagcgcuuuacagaucuaaaaaaaaaaaaaaaaaaaaaaaaaaaaaaaaaaaaaaaaaaaaaaaaaaaaaaaaaaaaaaaaugcaucccccccccccccccccccccccccccccccaaaggcucuuuucagagccaccagaauu

SEQ ID NO: 6980 - RNA, 1919 nt, Artificial Sequence
  mRNA product Design e-2 comprising derived and/or modified sequence from HRSV(A2)__F_DSCav1_mut7 (opt1)
gggagacccgugacccggaaguuguacggcuacgcgacuuucccucccacaaacccucgcgcccuuccuuuccuacuugggcccggcagaaagcuuaccauggagcugcucauccugaaggccaacgccaucaccaccauccugacggcggugaccuucugcuucgccagcggccagaacaucaccgaggaguucuaccaguccacgugcagcgccgucuccaagggguaccucagcgcccugcgcaccggcugguacaccuccgugaucaccaucgagcugagcaacaucaaggagaacaagugcaacgggaccgacgccaaggugaagcucaucaagcaggagcuggacaaguacaagaacgcggucacggagcugcagaugcucaugugcuccacccccgccaccggcagcggguccgccaucgccagcggcguggcggugugcaagguccugcaccuggagggcgaggugaacaagaucaaguccgcccuccugagcaccaacaaggccguggucucccugagcaacgggguguccgugcucacguucaagguccuggaccugaagaacuacaucgacaagcagcuccugccgauccugaacaagcagagcugcuccaucagcaacaucgagaccgugauggaguuccagcagaagaacaaccggcuccuggagaucacccgcgaguucuccgugaacgccggcgucaccacgcccgugagcaccuacaugcugaccaacagcgagcuccugucccugaucaacgacaugcccaucaccaacgaccagaagaagcucaugagcaacaacgugcagaucguccggcagcaguccuacagcaucaugugcaucaucaaggaggaggugcuggccuacgugguccagcugccccucuacggggugaucgacacgccgugcuggaagcugcacaccagcccccugugcaccaccaacacgaaggagggcagcaacaucugccucacccgcaccgaccgggggugguacugcgacaacgcgggcuccgugagcuucuucccccaggccgagaccugcaaggucugcuccaaccgcguguucugcgacacgaugaacagccugacccugcccuccgaggucaaccucugcaacguggacaucuucaacccgaaguacgacugcaagaucaugaccagcaagaccgacguguccagcuccgucaucacgagccugggcgccaucguguccugcuacgggaagaccaagugcaccgccagcaacaagaacaagggcaucaucaagaccuucuccaacgggugcgacuacgugagcaacaagggcgucgacacggugagcgugggcaacacccuguacuacgucaacaagcaggaggggaagucccucuacgugaagggcgagcccaucaucaacuucuacgacccccugguguuccccagcgacgaguucgacgccuccaucagccaggucaacgagaagaucaaccagucccuggcguucauccggaaguccgacgagcuccugcacaacgugaacgccgggaaguccaccaccaacaucaugaucaccacgaucaucaucgugaucaucgucauccugcucagccugaucgccgugggccugcuccuguacugcaaggcccgcuccaccccggugacccugagcaaggaccagcuguccgggaucaacaacaucgccuucagcaacugaggacuaguguccaccugucccuccugggcugcuggauugucucguuuuccugccaaauaaacaggaucagcgcuuuacagaucuaaaaaaaaaaaaaaaaaaaaaaaaaaaaaaaaaaaaaaaaaaaaaaaaaaaaaaaaaaaaaaaaugcaucccccccccccccccccccccccccccccccaaaggcucuuuucagagccaccagaauu

SEQ ID NO: 6981 - RNA, 1919 nt, Artificial Sequence
  mRNA product Design e-2 comprising derived and/or modified sequence from HRSV(A2)__F_DSCav1_mut7 (opt2)
gggagacccgugacccggaaguuguacggcuacgcgacuuucccucccacaaacccucgcgcccuuccuuuccuacuugggcccggcagaaagcuuaccauggagcuccucauccucaaggccaacgccaucaccaccauccucaccgccgucaccuucugcuucgccuccggccagaacaucaccgaggaguucuaccaguccaccugcuccgccgucuccaagggcuaccucuccgcccuccgcaccggcugguacaccuccgucaucaccaucgagcucuccaacaucaaggagaacaagugcaacggcaccgacgccaaggucaagcucaucaagcaggagcucgacaaguacaagaacgccgucaccgagcuccagaugcucaugugcuccacccccgccaccggcuccggcuccgccaucgccuccggcgucgccgucugcaagguccuccaccucgagggcgaggucaacaagaucaaguccgcccuccucuccaccaacaaggccgucgucucccucuccaacggcgucuccguccucaccuucaagguccucgaccucaagaacuacaucgacaagcagcuccuccccauccucaacaagcaguccugcuccaucuccaacaucgagaccgucauggaguuccagcagaagaacaaccgccuccucgagaucacccgcgaguucuccgucaacgccggcgucaccacccccgucuccaccuacaugcucaccaacuccgagcuccucucccucaucaacgacaugcccaucaccaacgaccagaagaagcucauguccaacaacguccagaucguccgccagcaguccuacuccaucaugugcaucaucaaggaggagguccucgccuacgucguccagcucccccucuacggcgucaucgacacccccugcuggaagcuccacaccuccccccucugcaccaccaacaccaaggagggcuccaacaucugccucacccgcaccgaccgcggcugguacugcgacaacgccggcuccgucuccuucuucccccaggccgagaccugcaaggucugcuccaaccgcgucuucugcgacaccaugaacucccucacccuccccuccgaggucaaccucugcaacgucgacaucuucaaccccaaguacgacugcaagaucaugaccuccaagaccgacgucuccuccuccgucaucaccucccucggcgccaucgucuccugcuacggcaagaccaagugcaccgccuccaacaagaacaagggcaucaucaagaccuucuccaacggcugcgacuacgucuccaacaagggcgucgacaccgucuccgucggcaacacccucuacuacgucaacaagcaggagggcaagucccucuacgucaagggcgagcccaucaucaacuucuacgacccccucgucuuccccuccgacgaguucgacgccuccaucucccaggucaacgagaagaucaaccagucccucgccuucauccgcaaguccgacgagcuccuccacaacgucaacgccggcaaguccaccaccaacaucaugaucaccaccaucaucaucgucaucaucgucauccuccucucccucaucgccgucggccuccuccucuacugcaaggcccgcuccacccccgucacccucuccaaggaccagcucuccggcaucaacaacaucgccuucuccaacugaggacuaguguccaccugucccuccugggcugcuggauugucucguuuuccugccaaauaaacaggaucagcgcuuuacagaucuaaaaaaaaaaaaaaaaaaaaaaaaaaaaaaaaaaaaaaaaaaaaaaaaaaaaaaaaaaaaaaaaugcaucccccccccccccccccccccccccccccccaaaggcucuuuucagagccaccagaauu

SEQ ID NO: 6982 - RNA, 1919 nt, Artificial Sequence
  mRNA product Design e-2 comprising derived and/or modified sequence from HRSV(A2)__F_DSCav1_mut7 (opt3)
gggagacccgugacccggaaguuguacggcuacgcgacuuucccucccacaaacccucgcgcccuuccuuuccuacuugggcccggcagaaagcuuaccauggagcugcucauccuuaaggccaacgcuauuaccacaauacugacugcagugacguucugcuuugccagcggccagaauaucaccgaagaguucuaccaauccacauguucugcggucucaaaaggguauuugagugcuuuaagaacuggaugguacaccagcguuauuacaaucgaacuguccaacauuaaggagaauaaaugcaacgguaccgacgccaaggugaaacuaaucaagcaggaacucgauaaguauaaaaaugcaguaacugagcugcagaugcuuauguguucuacacccgccaccggcucggggucagcuauagcaagcggaguggccgucugcaaggugcugcacuuggagggcgaaguuaacaaaaucaagagugcucuccuguccacgaauaaagccguggucucucugagcaacgguguguccguacucacuuuuaagguuuuagaccugaagaauuacauugauaaacagcuuuugccuauccugaacaagcaaucauguaguauuagcaauaucgagaccgugauggaguuccagcagaaaaacaauaggcuacucgaaauaacacgggaguuuucugucaacgcgggggugacuaccccaguguccacauauaugcugaccaauucagaacuucugagcuugauuaacgacaugccgaucacgaacgaucagaagaaacucaugaguaauaacguccaaauuguucgccagcagucuuacuccaucaugugcaucauuaaggaggaagugcuggcauauguagugcaguuaccccuguacggagucauagacacuccuuguuggaaacuccauacaagcccacuuugcaccacuaauacaaaggagggcucgaacaucugucugacccgaacggaucguggcugguacugcgacaaugccgggucuguguccuucuuuccccaagcugaaaccuguaagguuugcucaaacagaguguucugcgauacaaugaauaguuugacucuaccuagcgaggucaaccuguguaauguggacauuuuuaacccaaaauaugauugcaagaucaugaccuccaaaacagacguaucuagcucaguuauaacuagccucggagccauuguguccuguuacgguaagaccaaaugcacagcaagcaauaagaacaagggcaucaucaaaaccuucucuaaugggugugauuaugucucaaacaagggaguggacacugucagugugggcaauacgcuguacuauguuaacaaacaggaggguaagagccuuuacgugaaaggggaacccauuaucaacuuuuaugacccucugguauucccauccgaugaguuugacgcuucuauuucgcaggucaaugaaaagauaaaccaaaguuuggccuucaucaggaaguccgaugagcuccugcacaaugugaacgcgggaaaaucaacaaccaauauuaugaucacuaccaucauuauaguuaucauugugaucuuacugagucuaauugccgucggccuccugcuuuacugcaaggcacggucuacaccggugaccuugagcaaagaccagcuguccggcaucaacaauauagcuuucucaaacugaggacuaguguccaccugucccuccugggcugcuggauugucucguuuuccugccaaauaaacaggaucagcgcuuuacagaucuaaaaaaaaaaaaaaaaaaaaaaaaaaaaaaaaaaaaaaaaaaaaaaaaaaaaaaaaaaaaaaaaugcaucccccccccccccccccccccccccccccccaaaggcucuuuucagagccaccagaauu

SEQ ID NO: 6983 - RNA, 1919 nt, Artificial Sequence
  mRNA product Design e-2 comprising derived and/or modified sequence from HRSV(A2)__F_DSCav1_mut7 (opt4)
gggagacccgugacccggaaguuguacggcuacgcgacuuucccucccacaaacccucgcgcccuuccuuuccuacuugggcccggcagaaagcuuaccauggagcugcugauccugaaggccaacgccaucaccaccauccugaccgccgugaccuucugcuucgccagcggccagaacaucaccgaggaguucuaccagagcaccugcagcgccgugagcaagggcuaccugagcgcccugagaaccggcugguacaccagcgugaucaccaucgagcugagcaacaucaaggagaacaagugcaacggcaccgacgccaaggugaagcugaucaagcaggagcuggacaaguacaagaacgccgugaccgagcugcagaugcugaugugcagcacccccgccaccggcagcggcagcgccaucgccagcggcguggccgugugcaaggugcugcaccuggagggcgaggugaacaagaucaagagcgcccugcugagcaccaacaaggccguggugagccugagcaacggcgugagcgugcugaccuucaaggugcuggaccugaagaacuacaucgacaagcagcugcugcccauccugaacaagcagagcugcagcaucagcaacaucgagaccgugauggaguuccagcagaagaacaacagacugcuggagaucaccagagaguucagcgugaacgccggcgugaccacccccgugagcaccuacaugcugaccaacagcgagcugcugagccugaucaacgacaugcccaucaccaacgaccagaagaagcugaugagcaacaacgugcagaucgugagacagcagagcuacagcaucaugugcaucaucaaggaggaggugcuggccuacguggugcagcugccccuguacggcgugaucgacacccccugcuggaagcugcacaccagcccccugugcaccaccaacaccaaggagggcagcaacaucugccugaccagaaccgacagaggcugguacugcgacaacgccggcagcgugagcuucuucccccaggccgagaccugcaaggugugcagcaacagaguguucugcgacaccaugaacagccugacccugcccagcgaggugaaccugugcaacguggacaucuucaaccccaaguacgacugcaagaucaugaccagcaagaccgacgugagcagcagcgugaucaccagccugggcgccaucgugagcugcuacggcaagaccaagugcaccgccagcaacaagaacaagggcaucaucaagaccuucagcaacggcugcgacuacgugagcaacaagggcguggacaccgugagcgugggcaacacccuguacuacgugaacaagcaggagggcaagagccuguacgugaagggcgagcccaucaucaacuucuacgacccccugguguuccccagcgacgaguucgacgccagcaucagccaggugaacgagaagaucaaccagagccuggccuucaucagaaagagcgacgagcugcugcacaacgugaacgccggcaagagcaccaccaacaucaugaucaccaccaucaucaucgugaucaucgugauccugcugagccugaucgccgugggccugcugcuguacugcaaggccagaagcacccccgugacccugagcaaggaccagcugagcggcaucaacaacaucgccuucagcaacugaggacuaguguccaccugucccuccugggcugcuggauugucucguuuuccugccaaauaaacaggaucagcgcuuuacagaucuaaaaaaaaaaaaaaaaaaaaaaaaaaaaaaaaaaaaaaaaaaaaaaaaaaaaaaaaaaaaaaaaugcaucccccccccccccccccccccccccccccccaaaggcucuuuucagagccaccagaauu

SEQ ID NO: 6984 - RNA, 1919 nt, Artificial Sequence
  mRNA product Design e-2 comprising derived and/or modified sequence from HRSV(A2)__F_DSCav1_mut7 (opt5)
gggagacccgugacccggaaguuguacggcuacgcgacuuucccucccacaaacccucgcgcccuuccuuuccuacuugggcccggcagaaagcuuaccauggagcugcucauccugaaggccaacgcuauuaccacaauccuuacggccgugaccuucugcuuugcgagcggccagaauauuacagaagaguucuaccaauccaccuguucugcugucagcaaaggguaucuguccgcccucagaacaggaugguacaccucuguuaucacaauugaacugagcaacaucaaggagaauaaaugcaacggcaccgacgccaaggugaaacuuaucaagcaggaacuggauaaguauaaaaaugcugugacggagcuccagaugcugauguguuccacccccgccacagggucuggaagcgcuauugccuccggcgucgcggugugcaagguucugcaccucgagggggaagugaacaaaaucaagagcgcccugcuuucuaccaauaaagcugucgugucccugagcaacggaguuucugugcucacauuuaagguccuggaccuuaagaauuacauugauaaacagcugcucccuauccugaacaagcaauccuguagcauuucuaauaucgagaccgugauggaguuccagcagaaaaacaaucggcugcucgaaauuacgcgcgaguuuuccgugaacgccggcgucacaaccccgguuagcacauauaugcugaccaauuccgaacuucugucucucaucaacgacaugcccaucaccaacgaucagaagaaacugaugagcaauaacgugcaaauugugagacagcaguccuacagcaucaugugcauuaucaaggaggaaguccuugcuuaugugguucagcugccucucuacggcgugauugacacacccuguuggaaacugcauacgucuccucugugcaccacaaauaccaaggagggguccaacaucugucucacacggaccgaucgcggaugguacugcgacaaugccggcagcgucucuuucuuuccccaagcggaaacguguaaggugugcagcaacagaguuuucugcgauacaaugaacucccugacccuuccuucugaggugaaucuguguaaugucgacaucuuuaacccgaaauaugauugcaagauuaugaccagcaaaacagacguguccagcucugucaucaccucccucggggccauugugagcuguuacggaaagacaaaaugcacggcuucuaauaagaacaagggcaucauuaaaaccuucuccaaugggugugauuauguuagcaacaagggaguggacacagucuccgugggcaauacccuguacuauguuaacaaacaggagggcaagucucuuuacgugaaaggggaacccaucaucaacuuuuaugacccucuggucuuccccagcgaugaguuugacgccuccauuucucaggugaaugaaaagaucaaccaaagccucgcuuucauucggaaguccgaugagcugcugcacaaugugaacgccggaaaaagcacaaccaauaucaugauuacgaccaucauuaucguuaucauugucauccuccugucucuuauugccgugggccugcuccuguacugcaaggcucgcuccacaccugugacccugagcaaagaccagcuuucugggaucaacaauauugcguucuccaacugaggacuaguguccaccugucccuccugggcugcuggauugucucguuuuccugccaaauaaacaggaucagcgcuuuacagaucuaaaaaaaaaaaaaaaaaaaaaaaaaaaaaaaaaaaaaaaaaaaaaaaaaaaaaaaaaaaaaaaaugcaucccccccccccccccccccccccccccccccaaaggcucuuuucagagccaccagaauu

SEQ ID NO: 6985 - RNA, 1919 nt, Artificial Sequence
  mRNA product Design e-2 comprising derived and/or modified sequence from HRSV(A2)__F_DSCav1_mut7 (opt6)
gggagacccgugacccggaaguuguacggcuacgcgacuuucccucccacaaacccucgcgcccuuccuuuccuacuugggcccggcagaaagcuuaccauggaauuacucauacucaaagcaaaugcaauuaccacuauacucacagcuguaacuuuuuguuucgccucaggacaaaacaucacagaagaauuuuaucaauccacaugcucugccguaucaaaaggcuaccuaucugcccuaagaacagguugguacacaucuguaauaacaaucgaauuauccaacaucaaagaaaacaaaugcaacggcacagacgcaaaagucaaacucaucaaacaagaauuagauaaauauaaaaacgcaguaacagaacuacaaaugcuaaugugcucuacacccgccacaggaucaggauccgcaaucgcuucuggaguagccguuugcaaaguauuacaccuagaaggagaaguaaauaaaauaaaauccgcacuacuaucaacuaauaaagcaguaguaucacuuucuaaugguguaucaguauuaacauucaaaguccucgaccuaaaaaauuacaucgacaaacaacuauuacccauccuuaauaaacaaucaugcuccauaucaaacauagaaacugucauggaauuucaacaaaaaaacaauagacuucuagaaaucacaagagaauuuucuguaaaugcaggaguaacuacaccaguaucaacauauauguuaaccaacuccgaacuacuaucacucauaaacgacaugccaauaacaaacgaccaaaaaaaacuaaugucaaauaacguucaaauaguaagacaacaaucauacucaaucaugugcauaauaaaagaagaaguuuuagcauacgucguacaacuuccccuauacggaguaauagacaccccuugcuggaaacuccacaccucaccacuaugcacuacaaacacaaaagaagguuccaacaucugcuuaacaagaaccgaucgaggaugguacugcgacaacgcugguuccguaucuuucuucccacaagcagaaacaugcaaaguaugcuccaauagaguauucugcgacaccaugaacucacuaacucuaccauccgaaguaaaccuaugcaacgucgacauauuuaauccaaaauaugacugcaaaauaaugacuucaaaaacagacguauccucaucaguaauaacauccuuaggagcaauaguaucauguuacggcaagacaaaauguacagccucaaacaaaaacaaagguaucauuaaaaccuucuccaacggcugcgacuacguaucaaauaaaggugucgauacaguaucaguaggaaacacacucuauuacguuaauaaacaagaaggaaagucauuauacguaaaaggagaaccaauaaucaauuucuacgauccccuagucuuucccucagaugaauuugacgcaagcaucucucaagucaacgaaaaaauaaaccaaucccuagccuucauaagaaaaucagaugaacuacuucauaacgucaacgccggaaaaucaacaaccaacauaaugaucacuacaaucauaauuguaauuauaguaauacuacuaucgcuaauugccguuggacuacuacuauauuguaaagcaagaucaacacccguuacucuauccaaagaucaauuaucaggaaucaacaacauagccuucucaaauuaaggacuaguguccaccugucccuccugggcugcuggauugucucguuuuccugccaaauaaacaggaucagcgcuuuacagaucuaaaaaaaaaaaaaaaaaaaaaaaaaaaaaaaaaaaaaaaaaaaaaaaaaaaaaaaaaaaaaaaaugcaucccccccccccccccccccccccccccccccaaaggcucuuuucagagccaccagaauu

SEQ ID NO: 6986 - RNA, 1919 nt, Artificial Sequence
  mRNA product Design e-2 comprising derived and/or modified sequence from HRSV(A2)__F_DSCav1_mut7 (opt11)
gggagacccgugacccggaaguuguacggcuacgcgacuuucccucccacaaacccucgcgcccuuccuuuccuacuugggcccggcagaaagcuuaccauggaacuacucauacuuaaagccaacgcaauaaccacaauccucaccgccgucacauucugcuucgccucgggacaaaacauaaccgaagaauuuuaccagucuaccugcuccgccgucuccaaggguuaccucuccgcgcuccgcaccgggugguacaccagcguuaucaccaucgaacuaucuaacauaaaagaaaacaagugcaacggaaccgacgcaaaagucaaacucaucaaacaagaacuagacaaauacaagaaugccgucaccgaacuacaaaugcucaugugcuccacccccgccaccggauccggcuccgccauugccuccggcgucgccguaugcaaaguccuucacuuggaaggagaaguuaacaaaauaaaaagcgcccuccugucgaccaacaaagcgguggucagccucuccaacggcgucucuguccucaccuucaaaguccucgaccucaagaacuacauagauaaacaacuacuccccauccuaaacaaacagucaugcagcauauccaacaucgaaaccgucauggaguuccaacagaaaaacaaccgccuccuugaaaucacccgcgaguucucugucaacgccggcgucaccacccccgucuccaccuacaugcucacaaacuccgaacuccucagccucaucaacgacaugccaaucaccaacgaccaaaagaaacucauguccaacaacguacaaaucguucgucaacaaucauacucaaucaugugcaucauuaaagaagaaguccucgcauacgucguccaacucccccucuauggggucaucgacaccccaugcuggaaacuccacaccucuccccuaugcaccaccaacaccaaagaaggcuccaacaucugccuaacccgaaccgaccgcggaugguacugcgacaacgccggcuccgucuccuucuucccccaggccgaaacauguaaagucugcuccaaccguguguucugcgacaccaugaacucacuaacccuccccuccgaagucaaccucugcaacgucgacaucuucaacccgaaauacgacugcaaaauaaugaccagcaaaacagacguauccucuagcgucauuaccagccuaggugcaaucguguccugcuacggcaaaacaaaaugcaccgccuccaacaaaaauaaaggaaucauaaaaaccuucuccaacggcugcgacuacgucagcaacaaaggagucgacaccgucuccguaggaaauacucuauacuaugucaacaaacaagaggguaaaucccucuacgucaaaggcgaacccaucaucaacuucuacgacccccucgucuuccccucugacgaguucgacgccagcauaucacaaguaaacgaaaagaucaaccaaucccucgcauucauucgcaaauccgacgaacuccuacacaacgucaacgccggaaaauccaccaccaacaucaugaucacuacuaucauuaucgucaucaucgucauccuccucucccucaucgcagucggccuucuacucuacugcaaggcacgcucuacacccguaacccugucuaaagaccaacucuccggcaucaacaacaucgcuuucuccaacuaaggacuaguguccaccugucccuccugggcugcuggauugucucguuuuccugccaaauaaacaggaucagcgcuuuacagaucuaaaaaaaaaaaaaaaaaaaaaaaaaaaaaaaaaaaaaaaaaaaaaaaaaaaaaaaaaaaaaaaaugcaucccccccccccccccccccccccccccccccaaaggcucuuuucagagccaccagaauu

SEQ ID NO: 6987 - RNA, 1889 nt, Artificial Sequence
  mRNA product Design e-3 comprising derived and/or modified sequence from HRSV(A2)__F_DSCav1_mut7 (opt1)
gggagacuuucccauucuguagcagaauuugguguugccuguggucuuggucccgcggagaagcuuaccauggagcugcucauccugaaggccaacgccaucaccaccauccugacggcggugaccuucugcuucgccagcggccagaacaucaccgaggaguucuaccaguccacgugcagcgccgucuccaagggguaccucagcgcccugcggaccggcugguacaccuccgugaucaccaucgagcugagcaacaucaaggagaacaagugcaacgggaccgacgccaaggugaagcucaucaagcaggagcuggacaaguacaagaacgcggucacggagcugcagaugcugaugugcuccaccccggcaaccggcuccggcuccgccaucgcgagcggcgucgccgugugcaaggugcugcaccucgagggggaggucaacaagaucaagagcgcccugcuguccaccaacaaggccguggugagccucuccaacggcgucagcgugcugaccuucaaggugcuggaccucaagaacuacaucgacaagcagcugcugcccauccugaacaagcagagcugcuccaucagcaacaucgagacggugauggaguuccagcagaagaacaaccggcuccuggagaucacccgcgaguucagcgugaacgccggggucaccacccccguguccacguacaugcugaccaacagcgagcuccugucccugaucaacgacaugccgaucaccaacgaccagaagaagcucaugagcaacaacgugcagaucguccggcagcaguccuacagcaucaugugcaucaucaaggaggaggugcuggcguacgugguccagcugccccucuacggcgugaucgacacccccugcuggaagcugcacacgagcccccugugcaccaccaacaccaaggagggguccaacaucugccucacgcgcaccgaccggggcugguacugcgacaacgccggcagcgucuccuucuucccgcaggccgagaccugcaaggugugcagcaaccgcguguucugcgacaccaugaacucccugacgcugcccagcgagguaaaccucugcaacgucgacaucuucaaccccaaguacgacugcaagaucaugaccuccaagaccgacgugagcuccagcgugaucaccucccugggggccaucgucagcugcuacggcaagacgaagugcaccgccagcaacaagaacaaggggaucaucaagaccuucuccaacggcugcgacuacgugagcaacaagggcguggacaccguguccgucgggaacacccuguacuacgugaacaagcaggagggcaagagccucuacgugaagggggagcccaucaucaacuucuacgacccgcuggucuuccccuccgacgaguucgacgcgagcaucucccaggugaacgagaagaucaaccagagccuggccuucauccgcaaguccgacgagcugcuccacaacgugaacgccggcaagagcacgaccaacaucaugaucaccaccaucaucaucgucaucaucgugauccugcugucccucaucgccguggggcugcugcucuacugcaaggcccggagcacgcccgucacccuguccaaggaccagcugagcggcaucaacaacaucgcguucuccaacugaggacuaguguccaccugucccuccugggcugcuggauugucucguuuuccugccaaauaaacaggaucagcgcuuuacagaucuaaaaaaaaaaaaaaaaaaaaaaaaaaaaaaaaaaaaaaaaaaaaaaaaaaaaaaaaaaaaaaaaugcaucccccccccccccccccccccccccccccccaaaggcucuuuucagagccaccagaauu

SEQ ID NO: 6988 - RNA, 1889 nt, Artificial Sequence
  mRNA product Design e-3 comprising derived and/or modified sequence from HRSV(A2)__F_DSCav1_mut7 (opt1)
gggagacuuucccauucuguagcagaauuugguguugccuguggucuuggucccgcggagaagcuuaccauggagcugcucauccugaaggccaacgccaucaccaccauccugacggcggugaccuucugcuucgccagcggccagaacaucaccgaggaguucuaccaguccacgugcagcgccgucuccaagggguaccucagcgcccugcgcaccggcugguacaccuccgugaucaccaucgagcugagcaacaucaaggagaacaagugcaacgggaccgacgccaaggugaagcucaucaagcaggagcuggacaaguacaagaacgcggucacggagcugcagaugcucaugugcuccacccccgccaccggcagcggguccgccaucgccagcggcguggcggugugcaagguccugcaccuggagggcgaggugaacaagaucaaguccgcccuccugagcaccaacaaggccguggucucccugagcaacgggguguccgugcucacguucaagguccuggaccugaagaacuacaucgacaagcagcuccugccgauccugaacaagcagagcugcuccaucagcaacaucgagaccgugauggaguuccagcagaagaacaaccggcuccuggagaucacccgcgaguucuccgugaacgccggcgucaccacgcccgugagcaccuacaugcugaccaacagcgagcuccugucccugaucaacgacaugcccaucaccaacgaccagaagaagcucaugagcaacaacgugcagaucguccggcagcaguccuacagcaucaugugcaucaucaaggaggaggugcuggccuacgugguccagcugccccucuacggggugaucgacacgccgugcuggaagcugcacaccagcccccugugcaccaccaacacgaaggagggcagcaacaucugccucacccgcaccgaccgggggugguacugcgacaacgcgggcuccgugagcuucuucccccaggccgagaccugcaaggucugcuccaaccgcguguucugcgacacgaugaacagccugacccugcccuccgaggucaaccucugcaacguggacaucuucaacccgaaguacgacugcaagaucaugaccagcaagaccgacguguccagcuccgucaucacgagccugggcgccaucguguccugcuacgggaagaccaagugcaccgccagcaacaagaacaagggcaucaucaagaccuucuccaacgggugcgacuacgugagcaacaagggcgucgacacggugagcgugggcaacacccuguacuacgucaacaagcaggaggggaagucccucuacgugaagggcgagcccaucaucaacuucuacgacccccugguguuccccagcgacgaguucgacgccuccaucagccaggucaacgagaagaucaaccagucccuggcguucauccggaaguccgacgagcuccugcacaacgugaacgccgggaaguccaccaccaacaucaugaucaccacgaucaucaucgugaucaucgucauccugcucagccugaucgccgugggccugcuccuguacugcaaggcccgcuccaccccggugacccugagcaaggaccagcuguccgggaucaacaacaucgccuucagcaacugaggacuaguguccaccugucccuccugggcugcuggauugucucguuuuccugccaaauaaacaggaucagcgcuuuacagaucuaaaaaaaaaaaaaaaaaaaaaaaaaaaaaaaaaaaaaaaaaaaaaaaaaaaaaaaaaaaaaaaaugcaucccccccccccccccccccccccccccccccaaaggcucuuuucagagccaccagaauu

SEQ ID NO: 6989 - RNA, 1889 nt, Artificial Sequence
  mRNA product Design e-3 comprising derived and/or modified sequence from HRSV(A2)__F_DSCav1_mut7 (opt2)
gggagacuuucccauucuguagcagaauuugguguugccuguggucuuggucccgcggagaagcuuaccauggagcuccucauccucaaggccaacgccaucaccaccauccucaccgccgucaccuucugcuucgccuccggccagaacaucaccgaggaguucuaccaguccaccugcuccgccgucuccaagggcuaccucuccgcccuccgcaccggcugguacaccuccgucaucaccaucgagcucuccaacaucaaggagaacaagugcaacggcaccgacgccaaggucaagcucaucaagcaggagcucgacaaguacaagaacgccgucaccgagcuccagaugcucaugugcuccacccccgccaccggcuccggcuccgccaucgccuccggcgucgccgucugcaagguccuccaccucgagggcgaggucaacaagaucaaguccgcccuccucuccaccaacaaggccgucgucucccucuccaacggcgucuccguccucaccuucaagguccucgaccucaagaacuacaucgacaagcagcuccuccccauccucaacaagcaguccugcuccaucuccaacaucgagaccgucauggaguuccagcagaagaacaaccgccuccucgagaucacccgcgaguucuccgucaacgccggcgucaccacccccgucuccaccuacaugcucaccaacuccgagcuccucucccucaucaacgacaugcccaucaccaacgaccagaagaagcucauguccaacaacguccagaucguccgccagcaguccuacuccaucaugugcaucaucaaggaggagguccucgccuacgucguccagcucccccucuacggcgucaucgacacccccugcuggaagcuccacaccuccccccucugcaccaccaacaccaaggagggcuccaacaucugccucacccgcaccgaccgcggcugguacugcgacaacgccggcuccgucuccuucuucccccaggccgagaccugcaaggucugcuccaaccgcgucuucugcgacaccaugaacucccucacccuccccuccgaggucaaccucugcaacgucgacaucuucaaccccaaguacgacugcaagaucaugaccuccaagaccgacgucuccuccuccgucaucaccucccucggcgccaucgucuccugcuacggcaagaccaagugcaccgccuccaacaagaacaagggcaucaucaagaccuucuccaacggcugcgacuacgucuccaacaagggcgucgacaccgucuccgucggcaacacccucuacuacgucaacaagcaggagggcaagucccucuacgucaagggcgagcccaucaucaacuucuacgacccccucgucuuccccuccgacgaguucgacgccuccaucucccaggucaacgagaagaucaaccagucccucgccuucauccgcaaguccgacgagcuccuccacaacgucaacgccggcaaguccaccaccaacaucaugaucaccaccaucaucaucgucaucaucgucauccuccucucccucaucgccgucggccuccuccucuacugcaaggcccgcuccacccccgucacccucuccaaggaccagcucuccggcaucaacaacaucgccuucuccaacugaggacuaguguccaccugucccuccugggcugcuggauugucucguuuuccugccaaauaaacaggaucagcgcuuuacagaucuaaaaaaaaaaaaaaaaaaaaaaaaaaaaaaaaaaaaaaaaaaaaaaaaaaaaaaaaaaaaaaaaugcaucccccccccccccccccccccccccccccccaaaggcucuuuucagagccaccagaauu

SEQ ID NO: 6990 - RNA, 1889 nt, Artificial Sequence
  mRNA product Design e-3 comprising derived and/or modified sequence from HRSV(A2)__F_DSCav1_mut7 (opt3)
gggagacuuucccauucuguagcagaauuugguguugccuguggucuuggucccgcggagaagcuuaccauggagcugcucauccuuaaggccaacgcuauuaccacaauacugacugcagugacguucugcuuugccagcggccagaauaucaccgaagaguucuaccaauccacauguucugcggucucaaaaggguauuugagugcuuuaagaacuggaugguacaccagcguuauuacaaucgaacuguccaacauuaaggagaauaaaugcaacgguaccgacgccaaggugaaacuaaucaagcaggaacucgauaaguauaaaaaugcaguaacugagcugcagaugcuuauguguucuacacccgccaccggcucggggucagcuauagcaagcggaguggccgucugcaaggugcugcacuuggagggcgaaguuaacaaaaucaagagugcucuccuguccacgaauaaagccguggucucucugagcaacgguguguccguacucacuuuuaagguuuuagaccugaagaauuacauugauaaacagcuuuugccuauccugaacaagcaaucauguaguauuagcaauaucgagaccgugauggaguuccagcagaaaaacaauaggcuacucgaaauaacacgggaguuuucugucaacgcgggggugacuaccccaguguccacauauaugcugaccaauucagaacuucugagcuugauuaacgacaugccgaucacgaacgaucagaagaaacucaugaguaauaacguccaaauuguucgccagcagucuuacuccaucaugugcaucauuaaggaggaagugcuggcauauguagugcaguuaccccuguacggagucauagacacuccuuguuggaaacuccauacaagcccacuuugcaccacuaauacaaaggagggcucgaacaucugucugacccgaacggaucguggcugguacugcgacaaugccgggucuguguccuucuuuccccaagcugaaaccuguaagguuugcucaaacagaguguucugcgauacaaugaauaguuugacucuaccuagcgaggucaaccuguguaauguggacauuuuuaacccaaaauaugauugcaagaucaugaccuccaaaacagacguaucuagcucaguuauaacuagccucggagccauuguguccuguuacgguaagaccaaaugcacagcaagcaauaagaacaagggcaucaucaaaaccuucucuaaugggugugauuaugucucaaacaagggaguggacacugucagugugggcaauacgcuguacuauguuaacaaacaggaggguaagagccuuuacgugaaaggggaacccauuaucaacuuuuaugacccucugguauucccauccgaugaguuugacgcuucuauuucgcaggucaaugaaaagauaaaccaaaguuuggccuucaucaggaaguccgaugagcuccugcacaaugugaacgcgggaaaaucaacaaccaauauuaugaucacuaccaucauuauaguuaucauugugaucuuacugagucuaauugccgucggccuccugcuuuacugcaaggcacggucuacaccggugaccuugagcaaagaccagcuguccggcaucaacaauauagcuuucucaaacugaggacuaguguccaccugucccuccugggcugcuggauugucucguuuuccugccaaauaaacaggaucagcgcuuuacagaucuaaaaaaaaaaaaaaaaaaaaaaaaaaaaaaaaaaaaaaaaaaaaaaaaaaaaaaaaaaaaaaaaugcaucccccccccccccccccccccccccccccccaaaggcucuuuucagagccaccagaauu

SEQ ID NO: 6991 - RNA, 1889 nt, Artificial Sequence
  mRNA product Design e-3 comprising derived and/or modified sequence from HRSV(A2)__F_DSCav1_mut7 (opt4)
gggagacuuucccauucuguagcagaauuugguguugccuguggucuuggucccgcggagaagcuuaccauggagcugcugauccugaaggccaacgccaucaccaccauccugaccgccgugaccuucugcuucgccagcggccagaacaucaccgaggaguucuaccagagcaccugcagcgccgugagcaagggcuaccugagcgcccugagaaccggcugguacaccagcgugaucaccaucgagcugagcaacaucaaggagaacaagugcaacggcaccgacgccaaggugaagcugaucaagcaggagcuggacaaguacaagaacgccgugaccgagcugcagaugcugaugugcagcacccccgccaccggcagcggcagcgccaucgccagcggcguggccgugugcaaggugcugcaccuggagggcgaggugaacaagaucaagagcgcccugcugagcaccaacaaggccguggugagccugagcaacggcgugagcgugcugaccuucaaggugcuggaccugaagaacuacaucgacaagcagcugcugcccauccugaacaagcagagcugcagcaucagcaacaucgagaccgugauggaguuccagcagaagaacaacagacugcuggagaucaccagagaguucagcgugaacgccggcgugaccacccccgugagcaccuacaugcugaccaacagcgagcugcugagccugaucaacgacaugcccaucaccaacgaccagaagaagcugaugagcaacaacgugcagaucgugagacagcagagcuacagcaucaugugcaucaucaaggaggaggugcuggccuacguggugcagcugccccuguacggcgugaucgacacccccugcuggaagcugcacaccagcccccugugcaccaccaacaccaaggagggcagcaacaucugccugaccagaaccgacagaggcugguacugcgacaacgccggcagcgugagcuucuucccccaggccgagaccugcaaggugugcagcaacagaguguucugcgacaccaugaacagccugacccugcccagcgaggugaaccugugcaacguggacaucuucaaccccaaguacgacugcaagaucaugaccagcaagaccgacgugagcagcagcgugaucaccagccugggcgccaucgugagcugcuacggcaagaccaagugcaccgccagcaacaagaacaagggcaucaucaagaccuucagcaacggcugcgacuacgugagcaacaagggcguggacaccgugagcgugggcaacacccuguacuacgugaacaagcaggagggcaagagccuguacgugaagggcgagcccaucaucaacuucuacgacccccugguguuccccagcgacgaguucgacgccagcaucagccaggugaacgagaagaucaaccagagccuggccuucaucagaaagagcgacgagcugcugcacaacgugaacgccggcaagagcaccaccaacaucaugaucaccaccaucaucaucgugaucaucgugauccugcugagccugaucgccgugggccugcugcuguacugcaaggccagaagcacccccgugacccugagcaaggaccagcugagcggcaucaacaacaucgccuucagcaacugaggacuaguguccaccugucccuccugggcugcuggauugucucguuuuccugccaaauaaacaggaucagcgcuuuacagaucuaaaaaaaaaaaaaaaaaaaaaaaaaaaaaaaaaaaaaaaaaaaaaaaaaaaaaaaaaaaaaaaaugcaucccccccccccccccccccccccccccccccaaaggcucuuuucagagccaccagaauu

SEQ ID NO: 6992 - RNA, 1889 nt, Artificial Sequence
  mRNA product Design e-3 comprising derived and/or modified sequence from HRSV(A2)__F_DSCav1_mut7 (opt5)
gggagacuuucccauucuguagcagaauuugguguugccuguggucuuggucccgcggagaagcuuaccauggagcugcucauccugaaggccaacgcuauuaccacaauccuuacggccgugaccuucugcuuugcgagcggccagaauauuacagaagaguucuaccaauccaccuguucugcugucagcaaaggguaucuguccgcccucagaacaggaugguacaccucuguuaucacaauugaacugagcaacaucaaggagaauaaaugcaacggcaccgacgccaaggugaaacuuaucaagcaggaacuggauaaguauaaaaaugcugugacggagcuccagaugcugauguguuccacccccgccacagggucuggaagcgcuauugccuccggcgucgcggugugcaagguucugcaccucgagggggaagugaacaaaaucaagagcgcccugcuuucuaccaauaaagcugucgugucccugagcaacggaguuucugugcucacauuuaagguccuggaccuuaagaauuacauugauaaacagcugcucccuauccugaacaagcaauccuguagcauuucuaauaucgagaccgugauggaguuccagcagaaaaacaaucggcugcucgaaauuacgcgcgaguuuuccgugaacgccggcgucacaaccccgguuagcacauauaugcugaccaauuccgaacuucugucucucaucaacgacaugcccaucaccaacgaucagaagaaacugaugagcaauaacgugcaaauugugagacagcaguccuacagcaucaugugcauuaucaaggaggaaguccuugcuuaugugguucagcugccucucuacggcgugauugacacacccuguuggaaacugcauacgucuccucugugcaccacaaauaccaaggagggguccaacaucugucucacacggaccgaucgcggaugguacugcgacaaugccggcagcgucucuuucuuuccccaagcggaaacguguaaggugugcagcaacagaguuuucugcgauacaaugaacucccugacccuuccuucugaggugaaucuguguaaugucgacaucuuuaacccgaaauaugauugcaagauuaugaccagcaaaacagacguguccagcucugucaucaccucccucggggccauugugagcuguuacggaaagacaaaaugcacggcuucuaauaagaacaagggcaucauuaaaaccuucuccaaugggugugauuauguuagcaacaagggaguggacacagucuccgugggcaauacccuguacuauguuaacaaacaggagggcaagucucuuuacgugaaaggggaacccaucaucaacuuuuaugacccucuggucuuccccagcgaugaguuugacgccuccauuucucaggugaaugaaaagaucaaccaaagccucgcuuucauucggaaguccgaugagcugcugcacaaugugaacgccggaaaaagcacaaccaauaucaugauuacgaccaucauuaucguuaucauugucauccuccugucucuuauugccgugggccugcuccuguacugcaaggcucgcuccacaccugugacccugagcaaagaccagcuuucugggaucaacaauauugcguucuccaacugaggacuaguguccaccugucccuccugggcugcuggauugucucguuuuccugccaaauaaacaggaucagcgcuuuacagaucuaaaaaaaaaaaaaaaaaaaaaaaaaaaaaaaaaaaaaaaaaaaaaaaaaaaaaaaaaaaaaaaaugcaucccccccccccccccccccccccccccccccaaaggcucuuuucagagccaccagaauu

SEQ ID NO: 6993 - RNA, 1889 nt, Artificial Sequence
  mRNA product Design e-3 comprising derived and/or modified sequence from HRSV(A2)__F_DSCav1_mut7 (opt6)
gggagacuuucccauucuguagcagaauuugguguugccuguggucuuggucccgcggagaagcuuaccauggaauuacucauacucaaagcaaaugcaauuaccacuauacucacagcuguaacuuuuuguuucgccucaggacaaaacaucacagaagaauuuuaucaauccacaugcucugccguaucaaaaggcuaccuaucugcccuaagaacagguugguacacaucuguaauaacaaucgaauuauccaacaucaaagaaaacaaaugcaacggcacagacgcaaaagucaaacucaucaaacaagaauuagauaaauauaaaaacgcaguaacagaacuacaaaugcuaaugugcucuacacccgccacaggaucaggauccgcaaucgcuucuggaguagccguuugcaaaguauuacaccuagaaggagaaguaaauaaaauaaaauccgcacuacuaucaacuaauaaagcaguaguaucacuuucuaaugguguaucaguauuaacauucaaaguccucgaccuaaaaaauuacaucgacaaacaacuauuacccauccuuaauaaacaaucaugcuccauaucaaacauagaaacugucauggaauuucaacaaaaaaacaauagacuucuagaaaucacaagagaauuuucuguaaaugcaggaguaacuacaccaguaucaacauauauguuaaccaacuccgaacuacuaucacucauaaacgacaugccaauaacaaacgaccaaaaaaaacuaaugucaaauaacguucaaauaguaagacaacaaucauacucaaucaugugcauaauaaaagaagaaguuuuagcauacgucguacaacuuccccuauacggaguaauagacaccccuugcuggaaacuccacaccucaccacuaugcacuacaaacacaaaagaagguuccaacaucugcuuaacaagaaccgaucgaggaugguacugcgacaacgcugguuccguaucuuucuucccacaagcagaaacaugcaaaguaugcuccaauagaguauucugcgacaccaugaacucacuaacucuaccauccgaaguaaaccuaugcaacgucgacauauuuaauccaaaauaugacugcaaaauaaugacuucaaaaacagacguauccucaucaguaauaacauccuuaggagcaauaguaucauguuacggcaagacaaaauguacagccucaaacaaaaacaaagguaucauuaaaaccuucuccaacggcugcgacuacguaucaaauaaaggugucgauacaguaucaguaggaaacacacucuauuacguuaauaaacaagaaggaaagucauuauacguaaaaggagaaccaauaaucaauuucuacgauccccuagucuuucccucagaugaauuugacgcaagcaucucucaagucaacgaaaaaauaaaccaaucccuagccuucauaagaaaaucagaugaacuacuucauaacgucaacgccggaaaaucaacaaccaacauaaugaucacuacaaucauaauuguaauuauaguaauacuacuaucgcuaauugccguuggacuacuacuauauuguaaagcaagaucaacacccguuacucuauccaaagaucaauuaucaggaaucaacaacauagccuucucaaauuaaggacuaguguccaccugucccuccugggcugcuggauugucucguuuuccugccaaauaaacaggaucagcgcuuuacagaucuaaaaaaaaaaaaaaaaaaaaaaaaaaaaaaaaaaaaaaaaaaaaaaaaaaaaaaaaaaaaaaaaugcaucccccccccccccccccccccccccccccccaaaggcucuuuucagagccaccagaauu

SEQ ID NO: 6994 - RNA, 1889 nt, Artificial Sequence
  mRNA product Design e-3 comprising derived and/or modified sequence from HRSV(A2)__F_DSCav1_mut7 (opt11)
gggagacuuucccauucuguagcagaauuugguguugccuguggucuuggucccgcggagaagcuuaccauggaacuacucauacuuaaagccaacgcaauaaccacaauccucaccgccgucacauucugcuucgccucgggacaaaacauaaccgaagaauuuuaccagucuaccugcuccgccgucuccaaggguuaccucuccgcgcuccgcaccgggugguacaccagcguuaucaccaucgaacuaucuaacauaaaagaaaacaagugcaacggaaccgacgcaaaagucaaacucaucaaacaagaacuagacaaauacaagaaugccgucaccgaacuacaaaugcucaugugcuccacccccgccaccggauccggcuccgccauugccuccggcgucgccguaugcaaaguccuucacuuggaaggagaaguuaacaaaauaaaaagcgcccuccugucgaccaacaaagcgguggucagccucuccaacggcgucucuguccucaccuucaaaguccucgaccucaagaacuacauagauaaacaacuacuccccauccuaaacaaacagucaugcagcauauccaacaucgaaaccgucauggaguuccaacagaaaaacaaccgccuccuugaaaucacccgcgaguucucugucaacgccggcgucaccacccccgucuccaccuacaugcucacaaacuccgaacuccucagccucaucaacgacaugccaaucaccaacgaccaaaagaaacucauguccaacaacguacaaaucguucgucaacaaucauacucaaucaugugcaucauuaaagaagaaguccucgcauacgucguccaacucccccucuauggggucaucgacaccccaugcuggaaacuccacaccucuccccuaugcaccaccaacaccaaagaaggcuccaacaucugccuaacccgaaccgaccgcggaugguacugcgacaacgccggcuccgucuccuucuucccccaggccgaaacauguaaagucugcuccaaccguguguucugcgacaccaugaacucacuaacccuccccuccgaagucaaccucugcaacgucgacaucuucaacccgaaauacgacugcaaaauaaugaccagcaaaacagacguauccucuagcgucauuaccagccuaggugcaaucguguccugcuacggcaaaacaaaaugcaccgccuccaacaaaaauaaaggaaucauaaaaaccuucuccaacggcugcgacuacgucagcaacaaaggagucgacaccgucuccguaggaaauacucuauacuaugucaacaaacaagaggguaaaucccucuacgucaaaggcgaacccaucaucaacuucuacgacccccucgucuuccccucugacgaguucgacgccagcauaucacaaguaaacgaaaagaucaaccaaucccucgcauucauucgcaaauccgacgaacuccuacacaacgucaacgccggaaaauccaccaccaacaucaugaucacuacuaucauuaucgucaucaucgucauccuccucucccucaucgcagucggccuucuacucuacugcaaggcacgcucuacacccguaacccugucuaaagaccaacucuccggcaucaacaacaucgcuuucuccaacuaaggacuaguguccaccugucccuccugggcugcuggauugucucguuuuccugccaaauaaacaggaucagcgcuuuacagaucuaaaaaaaaaaaaaaaaaaaaaaaaaaaaaaaaaaaaaaaaaaaaaaaaaaaaaaaaaaaaaaaaugcaucccccccccccccccccccccccccccccccaaaggcucuuuucagagccaccagaauu

SEQ ID NO: 6995 - RNA, 1943 nt, Artificial Sequence
  mRNA product Design e-4 comprising derived and/or modified sequence from HRSV(A2)__F_DSCav1_mut7 (opt1)
gggagacuccugucgggcggaaguaggaggaguagaguuuaaaaacaguacucuuuuuccgguucgggacguaguugaagcaacgacaagccggauaaccgcucuugagacaggaagcuuaccauggagcugcucauccugaaggccaacgccaucaccaccauccugacggcggugaccuucugcuucgccagcggccagaacaucaccgaggaguucuaccaguccacgugcagcgccgucuccaagggguaccucagcgcccugcggaccggcugguacaccuccgugaucaccaucgagcugagcaacaucaaggagaacaagugcaacgggaccgacgccaaggugaagcucaucaagcaggagcuggacaaguacaagaacgcggucacggagcugcagaugcugaugugcuccaccccggcaaccggcuccggcuccgccaucgcgagcggcgucgccgugugcaaggugcugcaccucgagggggaggucaacaagaucaagagcgcccugcuguccaccaacaaggccguggugagccucuccaacggcgucagcgugcugaccuucaaggugcuggaccucaagaacuacaucgacaagcagcugcugcccauccugaacaagcagagcugcuccaucagcaacaucgagacggugauggaguuccagcagaagaacaaccggcuccuggagaucacccgcgaguucagcgugaacgccggggucaccacccccguguccacguacaugcugaccaacagcgagcuccugucccugaucaacgacaugccgaucaccaacgaccagaagaagcucaugagcaacaacgugcagaucguccggcagcaguccuacagcaucaugugcaucaucaaggaggaggugcuggcguacgugguccagcugccccucuacggcgugaucgacacccccugcuggaagcugcacacgagcccccugugcaccaccaacaccaaggagggguccaacaucugccucacgcgcaccgaccggggcugguacugcgacaacgccggcagcgucuccuucuucccgcaggccgagaccugcaaggugugcagcaaccgcguguucugcgacaccaugaacucccugacgcugcccagcgagguaaaccucugcaacgucgacaucuucaaccccaaguacgacugcaagaucaugaccuccaagaccgacgugagcuccagcgugaucaccucccugggggccaucgucagcugcuacggcaagacgaagugcaccgccagcaacaagaacaaggggaucaucaagaccuucuccaacggcugcgacuacgugagcaacaagggcguggacaccguguccgucgggaacacccuguacuacgugaacaagcaggagggcaagagccucuacgugaagggggagcccaucaucaacuucuacgacccgcuggucuuccccuccgacgaguucgacgcgagcaucucccaggugaacgagaagaucaaccagagccuggccuucauccgcaaguccgacgagcugcuccacaacgugaacgccggcaagagcacgaccaacaucaugaucaccaccaucaucaucgucaucaucgugauccugcugucccucaucgccguggggcugcugcucuacugcaaggcccggagcacgcccgucacccuguccaaggaccagcugagcggcaucaacaacaucgcguucuccaacugaggacuaguguccaccugucccuccugggcugcuggauugucucguuuuccugccaaauaaacaggaucagcgcuuuacagaucuaaaaaaaaaaaaaaaaaaaaaaaaaaaaaaaaaaaaaaaaaaaaaaaaaaaaaaaaaaaaaaaaugcaucccccccccccccccccccccccccccccccaaaggcucuuuucagagccaccagaauu

SEQ ID NO: 6996 - RNA, 1943 nt, Artificial Sequence
  mRNA product Design e-4 comprising derived and/or modified sequence from HRSV(A2)__F_DSCav1_mut7 (opt1)
gggagacuccugucgggcggaaguaggaggaguagaguuuaaaaacaguacucuuuuuccgguucgggacguaguugaagcaacgacaagccggauaaccgcucuugagacaggaagcuuaccauggagcugcucauccugaaggccaacgccaucaccaccauccugacggcggugaccuucugcuucgccagcggccagaacaucaccgaggaguucuaccaguccacgugcagcgccgucuccaagggguaccucagcgcccugcgcaccggcugguacaccuccgugaucaccaucgagcugagcaacaucaaggagaacaagugcaacgggaccgacgccaaggugaagcucaucaagcaggagcuggacaaguacaagaacgcggucacggagcugcagaugcucaugugcuccacccccgccaccggcagcggguccgccaucgccagcggcguggcggugugcaagguccugcaccuggagggcgaggugaacaagaucaaguccgcccuccugagcaccaacaaggccguggucucccugagcaacgggguguccgugcucacguucaagguccuggaccugaagaacuacaucgacaagcagcuccugccgauccugaacaagcagagcugcuccaucagcaacaucgagaccgugauggaguuccagcagaagaacaaccggcuccuggagaucacccgcgaguucuccgugaacgccggcgucaccacgcccgugagcaccuacaugcugaccaacagcgagcuccugucccugaucaacgacaugcccaucaccaacgaccagaagaagcucaugagcaacaacgugcagaucguccggcagcaguccuacagcaucaugugcaucaucaaggaggaggugcuggccuacgugguccagcugccccucuacggggugaucgacacgccgugcuggaagcugcacaccagcccccugugcaccaccaacacgaaggagggcagcaacaucugccucacccgcaccgaccgggggugguacugcgacaacgcgggcuccgugagcuucuucccccaggccgagaccugcaaggucugcuccaaccgcguguucugcgacacgaugaacagccugacccugcccuccgaggucaaccucugcaacguggacaucuucaacccgaaguacgacugcaagaucaugaccagcaagaccgacguguccagcuccgucaucacgagccugggcgccaucguguccugcuacgggaagaccaagugcaccgccagcaacaagaacaagggcaucaucaagaccuucuccaacgggugcgacuacgugagcaacaagggcgucgacacggugagcgugggcaacacccuguacuacgucaacaagcaggaggggaagucccucuacgugaagggcgagcccaucaucaacuucuacgacccccugguguuccccagcgacgaguucgacgccuccaucagccaggucaacgagaagaucaaccagucccuggcguucauccggaaguccgacgagcuccugcacaacgugaacgccgggaaguccaccaccaacaucaugaucaccacgaucaucaucgugaucaucgucauccugcucagccugaucgccgugggccugcuccuguacugcaaggcccgcuccaccccggugacccugagcaaggaccagcuguccgggaucaacaacaucgccuucagcaacugaggacuaguguccaccugucccuccugggcugcuggauugucucguuuuccugccaaauaaacaggaucagcgcuuuacagaucuaaaaaaaaaaaaaaaaaaaaaaaaaaaaaaaaaaaaaaaaaaaaaaaaaaaaaaaaaaaaaaaaugcaucccccccccccccccccccccccccccccccaaaggcucuuuucagagccaccagaauu

SEQ ID NO: 6997 - RNA, 1943 nt, Artificial Sequence
  mRNA product Design e-4 comprising derived and/or modified sequence from HRSV(A2)__F_DSCav1_mut7 (opt2)
gggagacuccugucgggcggaaguaggaggaguagaguuuaaaaacaguacucuuuuuccgguucgggacguaguugaagcaacgacaagccggauaaccgcucuugagacaggaagcuuaccauggagcuccucauccucaaggccaacgccaucaccaccauccucaccgccgucaccuucugcuucgccuccggccagaacaucaccgaggaguucuaccaguccaccugcuccgccgucuccaagggcuaccucuccgcccuccgcaccggcugguacaccuccgucaucaccaucgagcucuccaacaucaaggagaacaagugcaacggcaccgacgccaaggucaagcucaucaagcaggagcucgacaaguacaagaacgccgucaccgagcuccagaugcucaugugcuccacccccgccaccggcuccggcuccgccaucgccuccggcgucgccgucugcaagguccuccaccucgagggcgaggucaacaagaucaaguccgcccuccucuccaccaacaaggccgucgucucccucuccaacggcgucuccguccucaccuucaagguccucgaccucaagaacuacaucgacaagcagcuccuccccauccucaacaagcaguccugcuccaucuccaacaucgagaccgucauggaguuccagcagaagaacaaccgccuccucgagaucacccgcgaguucuccgucaacgccggcgucaccacccccgucuccaccuacaugcucaccaacuccgagcuccucucccucaucaacgacaugcccaucaccaacgaccagaagaagcucauguccaacaacguccagaucguccgccagcaguccuacuccaucaugugcaucaucaaggaggagguccucgccuacgucguccagcucccccucuacggcgucaucgacacccccugcuggaagcuccacaccuccccccucugcaccaccaacaccaaggagggcuccaacaucugccucacccgcaccgaccgcggcugguacugcgacaacgccggcuccgucuccuucuucccccaggccgagaccugcaaggucugcuccaaccgcgucuucugcgacaccaugaacucccucacccuccccuccgaggucaaccucugcaacgucgacaucuucaaccccaaguacgacugcaagaucaugaccuccaagaccgacgucuccuccuccgucaucaccucccucggcgccaucgucuccugcuacggcaagaccaagugcaccgccuccaacaagaacaagggcaucaucaagaccuucuccaacggcugcgacuacgucuccaacaagggcgucgacaccgucuccgucggcaacacccucuacuacgucaacaagcaggagggcaagucccucuacgucaagggcgagcccaucaucaacuucuacgacccccucgucuuccccuccgacgaguucgacgccuccaucucccaggucaacgagaagaucaaccagucccucgccuucauccgcaaguccgacgagcuccuccacaacgucaacgccggcaaguccaccaccaacaucaugaucaccaccaucaucaucgucaucaucgucauccuccucucccucaucgccgucggccuccuccucuacugcaaggcccgcuccacccccgucacccucuccaaggaccagcucuccggcaucaacaacaucgccuucuccaacugaggacuaguguccaccugucccuccugggcugcuggauugucucguuuuccugccaaauaaacaggaucagcgcuuuacagaucuaaaaaaaaaaaaaaaaaaaaaaaaaaaaaaaaaaaaaaaaaaaaaaaaaaaaaaaaaaaaaaaaugcaucccccccccccccccccccccccccccccccaaaggcucuuuucagagccaccagaauu

SEQ ID NO: 6998 - RNA, 1943 nt, Artificial Sequence
  mRNA product Design e-4 comprising derived and/or modified sequence from HRSV(A2)__F_DSCav1_mut7 (opt3)
gggagacuccugucgggcggaaguaggaggaguagaguuuaaaaacaguacucuuuuuccgguucgggacguaguugaagcaacgacaagccggauaaccgcucuugagacaggaagcuuaccauggagcugcucauccuuaaggccaacgcuauuaccacaauacugacugcagugacguucugcuuugccagcggccagaauaucaccgaagaguucuaccaauccacauguucugcggucucaaaaggguauuugagugcuuuaagaacuggaugguacaccagcguuauuacaaucgaacuguccaacauuaaggagaauaaaugcaacgguaccgacgccaaggugaaacuaaucaagcaggaacucgauaaguauaaaaaugcaguaacugagcugcagaugcuuauguguucuacacccgccaccggcucggggucagcuauagcaagcggaguggccgucugcaaggugcugcacuuggagggcgaaguuaacaaaaucaagagugcucuccuguccacgaauaaagccguggucucucugagcaacgguguguccguacucacuuuuaagguuuuagaccugaagaauuacauugauaaacagcuuuugccuauccugaacaagcaaucauguaguauuagcaauaucgagaccgugauggaguuccagcagaaaaacaauaggcuacucgaaauaacacgggaguuuucugucaacgcgggggugacuaccccaguguccacauauaugcugaccaauucagaacuucugagcuugauuaacgacaugccgaucacgaacgaucagaagaaacucaugaguaauaacguccaaauuguucgccagcagucuuacuccaucaugugcaucauuaaggaggaagugcuggcauauguagugcaguuaccccuguacggagucauagacacuccuuguuggaaacuccauacaagcccacuuugcaccacuaauacaaaggagggcucgaacaucugucugacccgaacggaucguggcugguacugcgacaaugccgggucuguguccuucuuuccccaagcugaaaccuguaagguuugcucaaacagaguguucugcgauacaaugaauaguuugacucuaccuagcgaggucaaccuguguaauguggacauuuuuaacccaaaauaugauugcaagaucaugaccuccaaaacagacguaucuagcucaguuauaacuagccucggagccauuguguccuguuacgguaagaccaaaugcacagcaagcaauaagaacaagggcaucaucaaaaccuucucuaaugggugugauuaugucucaaacaagggaguggacacugucagugugggcaauacgcuguacuauguuaacaaacaggaggguaagagccuuuacgugaaaggggaacccauuaucaacuuuuaugacccucugguauucccauccgaugaguuugacgcuucuauuucgcaggucaaugaaaagauaaaccaaaguuuggccuucaucaggaaguccgaugagcuccugcacaaugugaacgcgggaaaaucaacaaccaauauuaugaucacuaccaucauuauaguuaucauugugaucuuacugagucuaauugccgucggccuccugcuuuacugcaaggcacggucuacaccggugaccuugagcaaagaccagcuguccggcaucaacaauauagcuuucucaaacugaggacuaguguccaccugucccuccugggcugcuggauugucucguuuuccugccaaauaaacaggaucagcgcuuuacagaucuaaaaaaaaaaaaaaaaaaaaaaaaaaaaaaaaaaaaaaaaaaaaaaaaaaaaaaaaaaaaaaaaugcaucccccccccccccccccccccccccccccccaaaggcucuuuucagagccaccagaauu

SEQ ID NO: 6999 - RNA, 1943 nt, Artificial Sequence
  mRNA product Design e-4 comprising derived and/or modified sequence from HRSV(A2)__F_DSCav1_mut7 (opt4)
gggagacuccugucgggcggaaguaggaggaguagaguuuaaaaacaguacucuuuuuccgguucgggacguaguugaagcaacgacaagccggauaaccgcucuugagacaggaagcuuaccauggagcugcugauccugaaggccaacgccaucaccaccauccugaccgccgugaccuucugcuucgccagcggccagaacaucaccgaggaguucuaccagagcaccugcagcgccgugagcaagggcuaccugagcgcccugagaaccggcugguacaccagcgugaucaccaucgagcugagcaacaucaaggagaacaagugcaacggcaccgacgccaaggugaagcugaucaagcaggagcuggacaaguacaagaacgccgugaccgagcugcagaugcugaugugcagcacccccgccaccggcagcggcagcgccaucgccagcggcguggccgugugcaaggugcugcaccuggagggcgaggugaacaagaucaagagcgcccugcugagcaccaacaaggccguggugagccugagcaacggcgugagcgugcugaccuucaaggugcuggaccugaagaacuacaucgacaagcagcugcugcccauccugaacaagcagagcugcagcaucagcaacaucgagaccgugauggaguuccagcagaagaacaacagacugcuggagaucaccagagaguucagcgugaacgccggcgugaccacccccgugagcaccuacaugcugaccaacagcgagcugcugagccugaucaacgacaugcccaucaccaacgaccagaagaagcugaugagcaacaacgugcagaucgugagacagcagagcuacagcaucaugugcaucaucaaggaggaggugcuggccuacguggugcagcugccccuguacggcgugaucgacacccccugcuggaagcugcacaccagcccccugugcaccaccaacaccaaggagggcagcaacaucugccugaccagaaccgacagaggcugguacugcgacaacgccggcagcgugagcuucuucccccaggccgagaccugcaaggugugcagcaacagaguguucugcgacaccaugaacagccugacccugcccagcgaggugaaccugugcaacguggacaucuucaaccccaaguacgacugcaagaucaugaccagcaagaccgacgugagcagcagcgugaucaccagccugggcgccaucgugagcugcuacggcaagaccaagugcaccgccagcaacaagaacaagggcaucaucaagaccuucagcaacggcugcgacuacgugagcaacaagggcguggacaccgugagcgugggcaacacccuguacuacgugaacaagcaggagggcaagagccuguacgugaagggcgagcccaucaucaacuucuacgacccccugguguuccccagcgacgaguucgacgccagcaucagccaggugaacgagaagaucaaccagagccuggccuucaucagaaagagcgacgagcugcugcacaacgugaacgccggcaagagcaccaccaacaucaugaucaccaccaucaucaucgugaucaucgugauccugcugagccugaucgccgugggccugcugcuguacugcaaggccagaagcacccccgugacccugagcaaggaccagcugagcggcaucaacaacaucgccuucagcaacugaggacuaguguccaccugucccuccugggcugcuggauugucucguuuuccugccaaauaaacaggaucagcgcuuuacagaucuaaaaaaaaaaaaaaaaaaaaaaaaaaaaaaaaaaaaaaaaaaaaaaaaaaaaaaaaaaaaaaaaugcaucccccccccccccccccccccccccccccccaaaggcucuuuucagagccaccagaauu

SEQ ID NO: 7000 - RNA, 1943 nt, Artificial Sequence
  mRNA product Design e-4 comprising derived and/or modified sequence from HRSV(A2)__F_DSCav1_mut7 (opt5)
gggagacuccugucgggcggaaguaggaggaguagaguuuaaaaacaguacucuuuuuccgguucgggacguaguugaagcaacgacaagccggauaaccgcucuugagacaggaagcuuaccauggagcugcucauccugaaggccaacgcuauuaccacaauccuuacggccgugaccuucugcuuugcgagcggccagaauauuacagaagaguucuaccaauccaccuguucugcugucagcaaaggguaucuguccgcccucagaacaggaugguacaccucuguuaucacaauugaacugagcaacaucaaggagaauaaaugcaacggcaccgacgccaaggugaaacuuaucaagcaggaacuggauaaguauaaaaaugcugugacggagcuccagaugcugauguguuccacccccgccacagggucuggaagcgcuauugccuccggcgucgcggugugcaagguucugcaccucgagggggaagugaacaaaaucaagagcgcccugcuuucuaccaauaaagcugucgugucccugagcaacggaguuucugugcucacauuuaagguccuggaccuuaagaauuacauugauaaacagcugcucccuauccugaacaagcaauccuguagcauuucuaauaucgagaccgugauggaguuccagcagaaaaacaaucggcugcucgaaauuacgcgcgaguuuuccgugaacgccggcgucacaaccccgguuagcacauauaugcugaccaauuccgaacuucugucucucaucaacgacaugcccaucaccaacgaucagaagaaacugaugagcaauaacgugcaaauugugagacagcaguccuacagcaucaugugcauuaucaaggaggaaguccuugcuuaugugguucagcugccucucuacggcgugauugacacacccuguuggaaacugcauacgucuccucugugcaccacaaauaccaaggagggguccaacaucugucucacacggaccgaucgcggaugguacugcgacaaugccggcagcgucucuuucuuuccccaagcggaaacguguaaggugugcagcaacagaguuuucugcgauacaaugaacucccugacccuuccuucugaggugaaucuguguaaugucgacaucuuuaacccgaaauaugauugcaagauuaugaccagcaaaacagacguguccagcucugucaucaccucccucggggccauugugagcuguuacggaaagacaaaaugcacggcuucuaauaagaacaagggcaucauuaaaaccuucuccaaugggugugauuauguuagcaacaagggaguggacacagucuccgugggcaauacccuguacuauguuaacaaacaggagggcaagucucuuuacgugaaaggggaacccaucaucaacuuuuaugacccucuggucuuccccagcgaugaguuugacgccuccauuucucaggugaaugaaaagaucaaccaaagccucgcuuucauucggaaguccgaugagcugcugcacaaugugaacgccggaaaaagcacaaccaauaucaugauuacgaccaucauuaucguuaucauugucauccuccugucucuuauugccgugggccugcuccuguacugcaaggcucgcuccacaccugugacccugagcaaagaccagcuuucugggaucaacaauauugcguucuccaacugaggacuaguguccaccugucccuccugggcugcuggauugucucguuuuccugccaaauaaacaggaucagcgcuuuacagaucuaaaaaaaaaaaaaaaaaaaaaaaaaaaaaaaaaaaaaaaaaaaaaaaaaaaaaaaaaaaaaaaaugcaucccccccccccccccccccccccccccccccaaaggcucuuuucagagccaccagaauu

SEQ ID NO: 7001 - RNA, 1943 nt, Artificial Sequence
  mRNA product Design e-4 comprising derived and/or modified sequence from HRSV(A2)__F_DSCav1_mut7 (opt6)
gggagacuccugucgggcggaaguaggaggaguagaguuuaaaaacaguacucuuuuuccgguucgggacguaguugaagcaacgacaagccggauaaccgcucuugagacaggaagcuuaccauggaauuacucauacucaaagcaaaugcaauuaccacuauacucacagcuguaacuuuuuguuucgccucaggacaaaacaucacagaagaauuuuaucaauccacaugcucugccguaucaaaaggcuaccuaucugcccuaagaacagguugguacacaucuguaauaacaaucgaauuauccaacaucaaagaaaacaaaugcaacggcacagacgcaaaagucaaacucaucaaacaagaauuagauaaauauaaaaacgcaguaacagaacuacaaaugcuaaugugcucuacacccgccacaggaucaggauccgcaaucgcuucuggaguagccguuugcaaaguauuacaccuagaaggagaaguaaauaaaauaaaauccgcacuacuaucaacuaauaaagcaguaguaucacuuucuaaugguguaucaguauuaacauucaaaguccucgaccuaaaaaauuacaucgacaaacaacuauuacccauccuuaauaaacaaucaugcuccauaucaaacauagaaacugucauggaauuucaacaaaaaaacaauagacuucuagaaaucacaagagaauuuucuguaaaugcaggaguaacuacaccaguaucaacauauauguuaaccaacuccgaacuacuaucacucauaaacgacaugccaauaacaaacgaccaaaaaaaacuaaugucaaauaacguucaaauaguaagacaacaaucauacucaaucaugugcauaauaaaagaagaaguuuuagcauacgucguacaacuuccccuauacggaguaauagacaccccuugcuggaaacuccacaccucaccacuaugcacuacaaacacaaaagaagguuccaacaucugcuuaacaagaaccgaucgaggaugguacugcgacaacgcugguuccguaucuuucuucccacaagcagaaacaugcaaaguaugcuccaauagaguauucugcgacaccaugaacucacuaacucuaccauccgaaguaaaccuaugcaacgucgacauauuuaauccaaaauaugacugcaaaauaaugacuucaaaaacagacguauccucaucaguaauaacauccuuaggagcaauaguaucauguuacggcaagacaaaauguacagccucaaacaaaaacaaagguaucauuaaaaccuucuccaacggcugcgacuacguaucaaauaaaggugucgauacaguaucaguaggaaacacacucuauuacguuaauaaacaagaaggaaagucauuauacguaaaaggagaaccaauaaucaauuucuacgauccccuagucuuucccucagaugaauuugacgcaagcaucucucaagucaacgaaaaaauaaaccaaucccuagccuucauaagaaaaucagaugaacuacuucauaacgucaacgccggaaaaucaacaaccaacauaaugaucacuacaaucauaauuguaauuauaguaauacuacuaucgcuaauugccguuggacuacuacuauauuguaaagcaagaucaacacccguuacucuauccaaagaucaauuaucaggaaucaacaacauagccuucucaaauuaaggacuaguguccaccugucccuccugggcugcuggauugucucguuuuccugccaaauaaacaggaucagcgcuuuacagaucuaaaaaaaaaaaaaaaaaaaaaaaaaaaaaaaaaaaaaaaaaaaaaaaaaaaaaaaaaaaaaaaaugcaucccccccccccccccccccccccccccccccaaaggcucuuuucagagccaccagaauu

SEQ ID NO: 7002 - RNA, 1943 nt, Artificial Sequence
  mRNA product Design e-4 comprising derived and/or modified sequence from HRSV(A2)__F_DSCav1_mut7 (opt11)
gggagacuccugucgggcggaaguaggaggaguagaguuuaaaaacaguacucuuuuuccgguucgggacguaguugaagcaacgacaagccggauaaccgcucuugagacaggaagcuuaccauggaacuacucauacuuaaagccaacgcaauaaccacaauccucaccgccgucacauucugcuucgccucgggacaaaacauaaccgaagaauuuuaccagucuaccugcuccgccgucuccaaggguuaccucuccgcgcuccgcaccgggugguacaccagcguuaucaccaucgaacuaucuaacauaaaagaaaacaagugcaacggaaccgacgcaaaagucaaacucaucaaacaagaacuagacaaauacaagaaugccgucaccgaacuacaaaugcucaugugcuccacccccgccaccggauccggcuccgccauugccuccggcgucgccguaugcaaaguccuucacuuggaaggagaaguuaacaaaauaaaaagcgcccuccugucgaccaacaaagcgguggucagccucuccaacggcgucucuguccucaccuucaaaguccucgaccucaagaacuacauagauaaacaacuacuccccauccuaaacaaacagucaugcagcauauccaacaucgaaaccgucauggaguuccaacagaaaaacaaccgccuccuugaaaucacccgcgaguucucugucaacgccggcgucaccacccccgucuccaccuacaugcucacaaacuccgaacuccucagccucaucaacgacaugccaaucaccaacgaccaaaagaaacucauguccaacaacguacaaaucguucgucaacaaucauacucaaucaugugcaucauuaaagaagaaguccucgcauacgucguccaacucccccucuauggggucaucgacaccccaugcuggaaacuccacaccucuccccuaugcaccaccaacaccaaagaaggcuccaacaucugccuaacccgaaccgaccgcggaugguacugcgacaacgccggcuccgucuccuucuucccccaggccgaaacauguaaagucugcuccaaccguguguucugcgacaccaugaacucacuaacccuccccuccgaagucaaccucugcaacgucgacaucuucaacccgaaauacgacugcaaaauaaugaccagcaaaacagacguauccucuagcgucauuaccagccuaggugcaaucguguccugcuacggcaaaacaaaaugcaccgccuccaacaaaaauaaaggaaucauaaaaaccuucuccaacggcugcgacuacgucagcaacaaaggagucgacaccgucuccguaggaaauacucuauacuaugucaacaaacaagaggguaaaucccucuacgucaaaggcgaacccaucaucaacuucuacgacccccucgucuuccccucugacgaguucgacgccagcauaucacaaguaaacgaaaagaucaaccaaucccucgcauucauucgcaaauccgacgaacuccuacacaacgucaacgccggaaaauccaccaccaacaucaugaucacuacuaucauuaucgucaucaucgucauccuccucucccucaucgcagucggccuucuacucuacugcaaggcacgcucuacacccguaacccugucuaaagaccaacucuccggcaucaacaacaucgcuuucuccaacuaaggacuaguguccaccugucccuccugggcugcuggauugucucguuuuccugccaaauaaacaggaucagcgcuuuacagaucuaaaaaaaaaaaaaaaaaaaaaaaaaaaaaaaaaaaaaaaaaaaaaaaaaaaaaaaaaaaaaaaaugcaucccccccccccccccccccccccccccccccaaaggcucuuuucagagccaccagaauu

SEQ ID NO: 7003 - RNA, 1910 nt, Artificial Sequence
  mRNA product Design e-5 comprising derived and/or modified sequence from HRSV(A2)__F_DSCav1_mut7 (opt1)
gggagagcggcucggccauuuugucccagucaguccggaggcugcggcugcagaaguaccgccugcggaguaacugcaaagaagcuuaccauggagcugcucauccugaaggccaacgccaucaccaccauccugacggcggugaccuucugcuucgccagcggccagaacaucaccgaggaguucuaccaguccacgugcagcgccgucuccaagggguaccucagcgcccugcggaccggcugguacaccuccgugaucaccaucgagcugagcaacaucaaggagaacaagugcaacgggaccgacgccaaggugaagcucaucaagcaggagcuggacaaguacaagaacgcggucacggagcugcagaugcugaugugcuccaccccggcaaccggcuccggcuccgccaucgcgagcggcgucgccgugugcaaggugcugcaccucgagggggaggucaacaagaucaagagcgcccugcuguccaccaacaaggccguggugagccucuccaacggcgucagcgugcugaccuucaaggugcuggaccucaagaacuacaucgacaagcagcugcugcccauccugaacaagcagagcugcuccaucagcaacaucgagacggugauggaguuccagcagaagaacaaccggcuccuggagaucacccgcgaguucagcgugaacgccggggucaccacccccguguccacguacaugcugaccaacagcgagcuccugucccugaucaacgacaugccgaucaccaacgaccagaagaagcucaugagcaacaacgugcagaucguccggcagcaguccuacagcaucaugugcaucaucaaggaggaggugcuggcguacgugguccagcugccccucuacggcgugaucgacacccccugcuggaagcugcacacgagcccccugugcaccaccaacaccaaggagggguccaacaucugccucacgcgcaccgaccggggcugguacugcgacaacgccggcagcgucuccuucuucccgcaggccgagaccugcaaggugugcagcaaccgcguguucugcgacaccaugaacucccugacgcugcccagcgagguaaaccucugcaacgucgacaucuucaaccccaaguacgacugcaagaucaugaccuccaagaccgacgugagcuccagcgugaucaccucccugggggccaucgucagcugcuacggcaagacgaagugcaccgccagcaacaagaacaaggggaucaucaagaccuucuccaacggcugcgacuacgugagcaacaagggcguggacaccguguccgucgggaacacccuguacuacgugaacaagcaggagggcaagagccucuacgugaagggggagcccaucaucaacuucuacgacccgcuggucuuccccuccgacgaguucgacgcgagcaucucccaggugaacgagaagaucaaccagagccuggccuucauccgcaaguccgacgagcugcuccacaacgugaacgccggcaagagcacgaccaacaucaugaucaccaccaucaucaucgucaucaucgugauccugcugucccucaucgccguggggcugcugcucuacugcaaggcccggagcacgcccgucacccuguccaaggaccagcugagcggcaucaacaacaucgcguucuccaacugaggacuaguguccaccugucccuccugggcugcuggauugucucguuuuccugccaaauaaacaggaucagcgcuuuacagaucuaaaaaaaaaaaaaaaaaaaaaaaaaaaaaaaaaaaaaaaaaaaaaaaaaaaaaaaaaaaaaaaaugcaucccccccccccccccccccccccccccccccaaaggcucuuuucagagccaccagaauu

SEQ ID NO: 7004 - RNA, 1910 nt, Artificial Sequence
  mRNA product Design e-5 comprising derived and/or modified sequence from HRSV(A2)__F_DSCav1_mut7 (opt1)
gggagagcggcucggccauuuugucccagucaguccggaggcugcggcugcagaaguaccgccugcggaguaacugcaaagaagcuuaccauggagcugcucauccugaaggccaacgccaucaccaccauccugacggcggugaccuucugcuucgccagcggccagaacaucaccgaggaguucuaccaguccacgugcagcgccgucuccaagggguaccucagcgcccugcgcaccggcugguacaccuccgugaucaccaucgagcugagcaacaucaaggagaacaagugcaacgggaccgacgccaaggugaagcucaucaagcaggagcuggacaaguacaagaacgcggucacggagcugcagaugcucaugugcuccacccccgccaccggcagcggguccgccaucgccagcggcguggcggugugcaagguccugcaccuggagggcgaggugaacaagaucaaguccgcccuccugagcaccaacaaggccguggucucccugagcaacgggguguccgugcucacguucaagguccuggaccugaagaacuacaucgacaagcagcuccugccgauccugaacaagcagagcugcuccaucagcaacaucgagaccgugauggaguuccagcagaagaacaaccggcuccuggagaucacccgcgaguucuccgugaacgccggcgucaccacgcccgugagcaccuacaugcugaccaacagcgagcuccugucccugaucaacgacaugcccaucaccaacgaccagaagaagcucaugagcaacaacgugcagaucguccggcagcaguccuacagcaucaugugcaucaucaaggaggaggugcuggccuacgugguccagcugccccucuacggggugaucgacacgccgugcuggaagcugcacaccagcccccugugcaccaccaacacgaaggagggcagcaacaucugccucacccgcaccgaccgggggugguacugcgacaacgcgggcuccgugagcuucuucccccaggccgagaccugcaaggucugcuccaaccgcguguucugcgacacgaugaacagccugacccugcccuccgaggucaaccucugcaacguggacaucuucaacccgaaguacgacugcaagaucaugaccagcaagaccgacguguccagcuccgucaucacgagccugggcgccaucguguccugcuacgggaagaccaagugcaccgccagcaacaagaacaagggcaucaucaagaccuucuccaacgggugcgacuacgugagcaacaagggcgucgacacggugagcgugggcaacacccuguacuacgucaacaagcaggaggggaagucccucuacgugaagggcgagcccaucaucaacuucuacgacccccugguguuccccagcgacgaguucgacgccuccaucagccaggucaacgagaagaucaaccagucccuggcguucauccggaaguccgacgagcuccugcacaacgugaacgccgggaaguccaccaccaacaucaugaucaccacgaucaucaucgugaucaucgucauccugcucagccugaucgccgugggccugcuccuguacugcaaggcccgcuccaccccggugacccugagcaaggaccagcuguccgggaucaacaacaucgccuucagcaacugaggacuaguguccaccugucccuccugggcugcuggauugucucguuuuccugccaaauaaacaggaucagcgcuuuacagaucuaaaaaaaaaaaaaaaaaaaaaaaaaaaaaaaaaaaaaaaaaaaaaaaaaaaaaaaaaaaaaaaaugcaucccccccccccccccccccccccccccccccaaaggcucuuuucagagccaccagaauu

SEQ ID NO: 7005 - RNA, 1910 nt, Artificial Sequence
  mRNA product Design e-5 comprising derived and/or modified sequence from HRSV(A2)__F_DSCav1_mut7 (opt2)
gggagagcggcucggccauuuugucccagucaguccggaggcugcggcugcagaaguaccgccugcggaguaacugcaaagaagcuuaccauggagcuccucauccucaaggccaacgccaucaccaccauccucaccgccgucaccuucugcuucgccuccggccagaacaucaccgaggaguucuaccaguccaccugcuccgccgucuccaagggcuaccucuccgcccuccgcaccggcugguacaccuccgucaucaccaucgagcucuccaacaucaaggagaacaagugcaacggcaccgacgccaaggucaagcucaucaagcaggagcucgacaaguacaagaacgccgucaccgagcuccagaugcucaugugcuccacccccgccaccggcuccggcuccgccaucgccuccggcgucgccgucugcaagguccuccaccucgagggcgaggucaacaagaucaaguccgcccuccucuccaccaacaaggccgucgucucccucuccaacggcgucuccguccucaccuucaagguccucgaccucaagaacuacaucgacaagcagcuccuccccauccucaacaagcaguccugcuccaucuccaacaucgagaccgucauggaguuccagcagaagaacaaccgccuccucgagaucacccgcgaguucuccgucaacgccggcgucaccacccccgucuccaccuacaugcucaccaacuccgagcuccucucccucaucaacgacaugcccaucaccaacgaccagaagaagcucauguccaacaacguccagaucguccgccagcaguccuacuccaucaugugcaucaucaaggaggagguccucgccuacgucguccagcucccccucuacggcgucaucgacacccccugcuggaagcuccacaccuccccccucugcaccaccaacaccaaggagggcuccaacaucugccucacccgcaccgaccgcggcugguacugcgacaacgccggcuccgucuccuucuucccccaggccgagaccugcaaggucugcuccaaccgcgucuucugcgacaccaugaacucccucacccuccccuccgaggucaaccucugcaacgucgacaucuucaaccccaaguacgacugcaagaucaugaccuccaagaccgacgucuccuccuccgucaucaccucccucggcgccaucgucuccugcuacggcaagaccaagugcaccgccuccaacaagaacaagggcaucaucaagaccuucuccaacggcugcgacuacgucuccaacaagggcgucgacaccgucuccgucggcaacacccucuacuacgucaacaagcaggagggcaagucccucuacgucaagggcgagcccaucaucaacuucuacgacccccucgucuuccccuccgacgaguucgacgccuccaucucccaggucaacgagaagaucaaccagucccucgccuucauccgcaaguccgacgagcuccuccacaacgucaacgccggcaaguccaccaccaacaucaugaucaccaccaucaucaucgucaucaucgucauccuccucucccucaucgccgucggccuccuccucuacugcaaggcccgcuccacccccgucacccucuccaaggaccagcucuccggcaucaacaacaucgccuucuccaacugaggacuaguguccaccugucccuccugggcugcuggauugucucguuuuccugccaaauaaacaggaucagcgcuuuacagaucuaaaaaaaaaaaaaaaaaaaaaaaaaaaaaaaaaaaaaaaaaaaaaaaaaaaaaaaaaaaaaaaaugcaucccccccccccccccccccccccccccccccaaaggcucuuuucagagccaccagaauu

SEQ ID NO: 7006 - RNA, 1910 nt, Artificial Sequence
  mRNA product Design e-5 comprising derived and/or modified sequence from HRSV(A2)__F_DSCav1_mut7 (opt3)
gggagagcggcucggccauuuugucccagucaguccggaggcugcggcugcagaaguaccgccugcggaguaacugcaaagaagcuuaccauggagcugcucauccuuaaggccaacgcuauuaccacaauacugacugcagugacguucugcuuugccagcggccagaauaucaccgaagaguucuaccaauccacauguucugcggucucaaaaggguauuugagugcuuuaagaacuggaugguacaccagcguuauuacaaucgaacuguccaacauuaaggagaauaaaugcaacgguaccgacgccaaggugaaacuaaucaagcaggaacucgauaaguauaaaaaugcaguaacugagcugcagaugcuuauguguucuacacccgccaccggcucggggucagcuauagcaagcggaguggccgucugcaaggugcugcacuuggagggcgaaguuaacaaaaucaagagugcucuccuguccacgaauaaagccguggucucucugagcaacgguguguccguacucacuuuuaagguuuuagaccugaagaauuacauugauaaacagcuuuugccuauccugaacaagcaaucauguaguauuagcaauaucgagaccgugauggaguuccagcagaaaaacaauaggcuacucgaaauaacacgggaguuuucugucaacgcgggggugacuaccccaguguccacauauaugcugaccaauucagaacuucugagcuugauuaacgacaugccgaucacgaacgaucagaagaaacucaugaguaauaacguccaaauuguucgccagcagucuuacuccaucaugugcaucauuaaggaggaagugcuggcauauguagugcaguuaccccuguacggagucauagacacuccuuguuggaaacuccauacaagcccacuuugcaccacuaauacaaaggagggcucgaacaucugucugacccgaacggaucguggcugguacugcgacaaugccgggucuguguccuucuuuccccaagcugaaaccuguaagguuugcucaaacagaguguucugcgauacaaugaauaguuugacucuaccuagcgaggucaaccuguguaauguggacauuuuuaacccaaaauaugauugcaagaucaugaccuccaaaacagacguaucuagcucaguuauaacuagccucggagccauuguguccuguuacgguaagaccaaaugcacagcaagcaauaagaacaagggcaucaucaaaaccuucucuaaugggugugauuaugucucaaacaagggaguggacacugucagugugggcaauacgcuguacuauguuaacaaacaggaggguaagagccuuuacgugaaaggggaacccauuaucaacuuuuaugacccucugguauucccauccgaugaguuugacgcuucuauuucgcaggucaaugaaaagauaaaccaaaguuuggccuucaucaggaaguccgaugagcuccugcacaaugugaacgcgggaaaaucaacaaccaauauuaugaucacuaccaucauuauaguuaucauugugaucuuacugagucuaauugccgucggccuccugcuuuacugcaaggcacggucuacaccggugaccuugagcaaagaccagcuguccggcaucaacaauauagcuuucucaaacugaggacuaguguccaccugucccuccugggcugcuggauugucucguuuuccugccaaauaaacaggaucagcgcuuuacagaucuaaaaaaaaaaaaaaaaaaaaaaaaaaaaaaaaaaaaaaaaaaaaaaaaaaaaaaaaaaaaaaaaugcaucccccccccccccccccccccccccccccccaaaggcucuuuucagagccaccagaauu

SEQ ID NO: 7007 - RNA, 1910 nt, Artificial Sequence
  mRNA product Design e-5 comprising derived and/or modified sequence from HRSV(A2)__F_DSCav1_mut7 (opt4)
gggagagcggcucggccauuuugucccagucaguccggaggcugcggcugcagaaguaccgccugcggaguaacugcaaagaagcuuaccauggagcugcugauccugaaggccaacgccaucaccaccauccugaccgccgugaccuucugcuucgccagcggccagaacaucaccgaggaguucuaccagagcaccugcagcgccgugagcaagggcuaccugagcgcccugagaaccggcugguacaccagcgugaucaccaucgagcugagcaacaucaaggagaacaagugcaacggcaccgacgccaaggugaagcugaucaagcaggagcuggacaaguacaagaacgccgugaccgagcugcagaugcugaugugcagcacccccgccaccggcagcggcagcgccaucgccagcggcguggccgugugcaaggugcugcaccuggagggcgaggugaacaagaucaagagcgcccugcugagcaccaacaaggccguggugagccugagcaacggcgugagcgugcugaccuucaaggugcuggaccugaagaacuacaucgacaagcagcugcugcccauccugaacaagcagagcugcagcaucagcaacaucgagaccgugauggaguuccagcagaagaacaacagacugcuggagaucaccagagaguucagcgugaacgccggcgugaccacccccgugagcaccuacaugcugaccaacagcgagcugcugagccugaucaacgacaugcccaucaccaacgaccagaagaagcugaugagcaacaacgugcagaucgugagacagcagagcuacagcaucaugugcaucaucaaggaggaggugcuggccuacguggugcagcugccccuguacggcgugaucgacacccccugcuggaagcugcacaccagcccccugugcaccaccaacaccaaggagggcagcaacaucugccugaccagaaccgacagaggcugguacugcgacaacgccggcagcgugagcuucuucccccaggccgagaccugcaaggugugcagcaacagaguguucugcgacaccaugaacagccugacccugcccagcgaggugaaccugugcaacguggacaucuucaaccccaaguacgacugcaagaucaugaccagcaagaccgacgugagcagcagcgugaucaccagccugggcgccaucgugagcugcuacggcaagaccaagugcaccgccagcaacaagaacaagggcaucaucaagaccuucagcaacggcugcgacuacgugagcaacaagggcguggacaccgugagcgugggcaacacccuguacuacgugaacaagcaggagggcaagagccuguacgugaagggcgagcccaucaucaacuucuacgacccccugguguuccccagcgacgaguucgacgccagcaucagccaggugaacgagaagaucaaccagagccuggccuucaucagaaagagcgacgagcugcugcacaacgugaacgccggcaagagcaccaccaacaucaugaucaccaccaucaucaucgugaucaucgugauccugcugagccugaucgccgugggccugcugcuguacugcaaggccagaagcacccccgugacccugagcaaggaccagcugagcggcaucaacaacaucgccuucagcaacugaggacuaguguccaccugucccuccugggcugcuggauugucucguuuuccugccaaauaaacaggaucagcgcuuuacagaucuaaaaaaaaaaaaaaaaaaaaaaaaaaaaaaaaaaaaaaaaaaaaaaaaaaaaaaaaaaaaaaaaugcaucccccccccccccccccccccccccccccccaaaggcucuuuucagagccaccagaauu

SEQ ID NO: 7008 - RNA, 1910 nt, Artificial Sequence
  mRNA product Design e-5 comprising derived and/or modified sequence from HRSV(A2)__F_DSCav1_mut7 (opt5)
gggagagcggcucggccauuuugucccagucaguccggaggcugcggcugcagaaguaccgccugcggaguaacugcaaagaagcuuaccauggagcugcucauccugaaggccaacgcuauuaccacaauccuuacggccgugaccuucugcuuugcgagcggccagaauauuacagaagaguucuaccaauccaccuguucugcugucagcaaaggguaucuguccgcccucagaacaggaugguacaccucuguuaucacaauugaacugagcaacaucaaggagaauaaaugcaacggcaccgacgccaaggugaaacuuaucaagcaggaacuggauaaguauaaaaaugcugugacggagcuccagaugcugauguguuccacccccgccacagggucuggaagcgcuauugccuccggcgucgcggugugcaagguucugcaccucgagggggaagugaacaaaaucaagagcgcccugcuuucuaccaauaaagcugucgugucccugagcaacggaguuucugugcucacauuuaagguccuggaccuuaagaauuacauugauaaacagcugcucccuauccugaacaagcaauccuguagcauuucuaauaucgagaccgugauggaguuccagcagaaaaacaaucggcugcucgaaauuacgcgcgaguuuuccgugaacgccggcgucacaaccccgguuagcacauauaugcugaccaauuccgaacuucugucucucaucaacgacaugcccaucaccaacgaucagaagaaacugaugagcaauaacgugcaaauugugagacagcaguccuacagcaucaugugcauuaucaaggaggaaguccuugcuuaugugguucagcugccucucuacggcgugauugacacacccuguuggaaacugcauacgucuccucugugcaccacaaauaccaaggagggguccaacaucugucucacacggaccgaucgcggaugguacugcgacaaugccggcagcgucucuuucuuuccccaagcggaaacguguaaggugugcagcaacagaguuuucugcgauacaaugaacucccugacccuuccuucugaggugaaucuguguaaugucgacaucuuuaacccgaaauaugauugcaagauuaugaccagcaaaacagacguguccagcucugucaucaccucccucggggccauugugagcuguuacggaaagacaaaaugcacggcuucuaauaagaacaagggcaucauuaaaaccuucuccaaugggugugauuauguuagcaacaagggaguggacacagucuccgugggcaauacccuguacuauguuaacaaacaggagggcaagucucuuuacgugaaaggggaacccaucaucaacuuuuaugacccucuggucuuccccagcgaugaguuugacgccuccauuucucaggugaaugaaaagaucaaccaaagccucgcuuucauucggaaguccgaugagcugcugcacaaugugaacgccggaaaaagcacaaccaauaucaugauuacgaccaucauuaucguuaucauugucauccuccugucucuuauugccgugggccugcuccuguacugcaaggcucgcuccacaccugugacccugagcaaagaccagcuuucugggaucaacaauauugcguucuccaacugaggacuaguguccaccugucccuccugggcugcuggauugucucguuuuccugccaaauaaacaggaucagcgcuuuacagaucuaaaaaaaaaaaaaaaaaaaaaaaaaaaaaaaaaaaaaaaaaaaaaaaaaaaaaaaaaaaaaaaaugcaucccccccccccccccccccccccccccccccaaaggcucuuuucagagccaccagaauu

SEQ ID NO: 7009 - RNA, 1910 nt, Artificial Sequence
  mRNA product Design e-5 comprising derived and/or modified sequence from HRSV(A2)__F_DSCav1_mut7 (opt6)
gggagagcggcucggccauuuugucccagucaguccggaggcugcggcugcagaaguaccgccugcggaguaacugcaaagaagcuuaccauggaauuacucauacucaaagcaaaugcaauuaccacuauacucacagcuguaacuuuuuguuucgccucaggacaaaacaucacagaagaauuuuaucaauccacaugcucugccguaucaaaaggcuaccuaucugcccuaagaacagguugguacacaucuguaauaacaaucgaauuauccaacaucaaagaaaacaaaugcaacggcacagacgcaaaagucaaacucaucaaacaagaauuagauaaauauaaaaacgcaguaacagaacuacaaaugcuaaugugcucuacacccgccacaggaucaggauccgcaaucgcuucuggaguagccguuugcaaaguauuacaccuagaaggagaaguaaauaaaauaaaauccgcacuacuaucaacuaauaaagcaguaguaucacuuucuaaugguguaucaguauuaacauucaaaguccucgaccuaaaaaauuacaucgacaaacaacuauuacccauccuuaauaaacaaucaugcuccauaucaaacauagaaacugucauggaauuucaacaaaaaaacaauagacuucuagaaaucacaagagaauuuucuguaaaugcaggaguaacuacaccaguaucaacauauauguuaaccaacuccgaacuacuaucacucauaaacgacaugccaauaacaaacgaccaaaaaaaacuaaugucaaauaacguucaaauaguaagacaacaaucauacucaaucaugugcauaauaaaagaagaaguuuuagcauacgucguacaacuuccccuauacggaguaauagacaccccuugcuggaaacuccacaccucaccacuaugcacuacaaacacaaaagaagguuccaacaucugcuuaacaagaaccgaucgaggaugguacugcgacaacgcugguuccguaucuuucuucccacaagcagaaacaugcaaaguaugcuccaauagaguauucugcgacaccaugaacucacuaacucuaccauccgaaguaaaccuaugcaacgucgacauauuuaauccaaaauaugacugcaaaauaaugacuucaaaaacagacguauccucaucaguaauaacauccuuaggagcaauaguaucauguuacggcaagacaaaauguacagccucaaacaaaaacaaagguaucauuaaaaccuucuccaacggcugcgacuacguaucaaauaaaggugucgauacaguaucaguaggaaacacacucuauuacguuaauaaacaagaaggaaagucauuauacguaaaaggagaaccaauaaucaauuucuacgauccccuagucuuucccucagaugaauuugacgcaagcaucucucaagucaacgaaaaaauaaaccaaucccuagccuucauaagaaaaucagaugaacuacuucauaacgucaacgccggaaaaucaacaaccaacauaaugaucacuacaaucauaauuguaauuauaguaauacuacuaucgcuaauugccguuggacuacuacuauauuguaaagcaagaucaacacccguuacucuauccaaagaucaauuaucaggaaucaacaacauagccuucucaaauuaaggacuaguguccaccugucccuccugggcugcuggauugucucguuuuccugccaaauaaacaggaucagcgcuuuacagaucuaaaaaaaaaaaaaaaaaaaaaaaaaaaaaaaaaaaaaaaaaaaaaaaaaaaaaaaaaaaaaaaaugcaucccccccccccccccccccccccccccccccaaaggcucuuuucagagccaccagaauu

SEQ ID NO: 7010 - RNA, 1910 nt, Artificial Sequence
  mRNA product Design e-5 comprising derived and/or modified sequence from HRSV(A2)__F_DSCav1_mut7 (opt11)
gggagagcggcucggccauuuugucccagucaguccggaggcugcggcugcagaaguaccgccugcggaguaacugcaaagaagcuuaccauggaacuacucauacuuaaagccaacgcaauaaccacaauccucaccgccgucacauucugcuucgccucgggacaaaacauaaccgaagaauuuuaccagucuaccugcuccgccgucuccaaggguuaccucuccgcgcuccgcaccgggugguacaccagcguuaucaccaucgaacuaucuaacauaaaagaaaacaagugcaacggaaccgacgcaaaagucaaacucaucaaacaagaacuagacaaauacaagaaugccgucaccgaacuacaaaugcucaugugcuccacccccgccaccggauccggcuccgccauugccuccggcgucgccguaugcaaaguccuucacuuggaaggagaaguuaacaaaauaaaaagcgcccuccugucgaccaacaaagcgguggucagccucuccaacggcgucucuguccucaccuucaaaguccucgaccucaagaacuacauagauaaacaacuacuccccauccuaaacaaacagucaugcagcauauccaacaucgaaaccgucauggaguuccaacagaaaaacaaccgccuccuugaaaucacccgcgaguucucugucaacgccggcgucaccacccccgucuccaccuacaugcucacaaacuccgaacuccucagccucaucaacgacaugccaaucaccaacgaccaaaagaaacucauguccaacaacguacaaaucguucgucaacaaucauacucaaucaugugcaucauuaaagaagaaguccucgcauacgucguccaacucccccucuauggggucaucgacaccccaugcuggaaacuccacaccucuccccuaugcaccaccaacaccaaagaaggcuccaacaucugccuaacccgaaccgaccgcggaugguacugcgacaacgccggcuccgucuccuucuucccccaggccgaaacauguaaagucugcuccaaccguguguucugcgacaccaugaacucacuaacccuccccuccgaagucaaccucugcaacgucgacaucuucaacccgaaauacgacugcaaaauaaugaccagcaaaacagacguauccucuagcgucauuaccagccuaggugcaaucguguccugcuacggcaaaacaaaaugcaccgccuccaacaaaaauaaaggaaucauaaaaaccuucuccaacggcugcgacuacgucagcaacaaaggagucgacaccgucuccguaggaaauacucuauacuaugucaacaaacaagaggguaaaucccucuacgucaaaggcgaacccaucaucaacuucuacgacccccucgucuuccccucugacgaguucgacgccagcauaucacaaguaaacgaaaagaucaaccaaucccucgcauucauucgcaaauccgacgaacuccuacacaacgucaacgccggaaaauccaccaccaacaucaugaucacuacuaucauuaucgucaucaucgucauccuccucucccucaucgcagucggccuucuacucuacugcaaggcacgcucuacacccguaacccugucuaaagaccaacucuccggcaucaacaacaucgcuuucuccaacuaaggacuaguguccaccugucccuccugggcugcuggauugucucguuuuccugccaaauaaacaggaucagcgcuuuacagaucuaaaaaaaaaaaaaaaaaaaaaaaaaaaaaaaaaaaaaaaaaaaaaaaaaaaaaaaaaaaaaaaaugcaucccccccccccccccccccccccccccccccaaaggcucuuuucagagccaccagaauu

SEQ ID NO: 7011 - RNA, 1977 nt, Artificial Sequence
  mRNA product Design e-6 comprising derived and/or modified sequence from HRSV(A2)__F_DSCav1_mut7 (opt1)
gggagagcggcucggccauuuugucccagucaguccggaggcugcggcugcagaaguaccgccugcggaguaacugcaaagaagcuuaccauggagcugcucauccugaaggccaacgccaucaccaccauccugacggcggugaccuucugcuucgccagcggccagaacaucaccgaggaguucuaccaguccacgugcagcgccgucuccaagggguaccucagcgcccugcggaccggcugguacaccuccgugaucaccaucgagcugagcaacaucaaggagaacaagugcaacgggaccgacgccaaggugaagcucaucaagcaggagcuggacaaguacaagaacgcggucacggagcugcagaugcugaugugcuccaccccggcaaccggcuccggcuccgccaucgcgagcggcgucgccgugugcaaggugcugcaccucgagggggaggucaacaagaucaagagcgcccugcuguccaccaacaaggccguggugagccucuccaacggcgucagcgugcugaccuucaaggugcuggaccucaagaacuacaucgacaagcagcugcugcccauccugaacaagcagagcugcuccaucagcaacaucgagacggugauggaguuccagcagaagaacaaccggcuccuggagaucacccgcgaguucagcgugaacgccggggucaccacccccguguccacguacaugcugaccaacagcgagcuccugucccugaucaacgacaugccgaucaccaacgaccagaagaagcucaugagcaacaacgugcagaucguccggcagcaguccuacagcaucaugugcaucaucaaggaggaggugcuggcguacgugguccagcugccccucuacggcgugaucgacacccccugcuggaagcugcacacgagcccccugugcaccaccaacaccaaggagggguccaacaucugccucacgcgcaccgaccggggcugguacugcgacaacgccggcagcgucuccuucuucccgcaggccgagaccugcaaggugugcagcaaccgcguguucugcgacaccaugaacucccugacgcugcccagcgagguaaaccucugcaacgucgacaucuucaaccccaaguacgacugcaagaucaugaccuccaagaccgacgugagcuccagcgugaucaccucccugggggccaucgucagcugcuacggcaagacgaagugcaccgccagcaacaagaacaaggggaucaucaagaccuucuccaacggcugcgacuacgugagcaacaagggcguggacaccguguccgucgggaacacccuguacuacgugaacaagcaggagggcaagagccucuacgugaagggggagcccaucaucaacuucuacgacccgcuggucuuccccuccgacgaguucgacgcgagcaucucccaggugaacgagaagaucaaccagagccuggccuucauccgcaaguccgacgagcugcuccacaacgugaacgccggcaagagcacgaccaacaucaugaucaccaccaucaucaucgucaucaucgugauccugcugucccucaucgccguggggcugcugcucuacugcaaggcccggagcacgcccgucacccuguccaaggaccagcugagcggcaucaacaacaucgcguucuccaacugaggacuaguacuggcugcaucucccuuuccucuguccuccauccuucucccaggauggugaagggggaccugguacccagugauccccaccccaggauccuaaaucaugacuuaccugcuaauaaaaacucauuggaaaagugagaagaucuaaaaaaaaaaaaaaaaaaaaaaaaaaaaaaaaaaaaaaaaaaaaaaaaaaaaaaaaaaaaaaaaugcaucccccccccccccccccccccccccccccccaaaggcucuuuucagagccaccagaauu

SEQ ID NO: 7012 - RNA, 1977 nt, Artificial Sequence
  mRNA product Design e-6 comprising derived and/or modified sequence from HRSV(A2)__F_DSCav1_mut7 (opt1)
gggagagcggcucggccauuuugucccagucaguccggaggcugcggcugcagaaguaccgccugcggaguaacugcaaagaagcuuaccauggagcugcucauccugaaggccaacgccaucaccaccauccugacggcggugaccuucugcuucgccagcggccagaacaucaccgaggaguucuaccaguccacgugcagcgccgucuccaagggguaccucagcgcccugcgcaccggcugguacaccuccgugaucaccaucgagcugagcaacaucaaggagaacaagugcaacgggaccgacgccaaggugaagcucaucaagcaggagcuggacaaguacaagaacgcggucacggagcugcagaugcucaugugcuccacccccgccaccggcagcggguccgccaucgccagcggcguggcggugugcaagguccugcaccuggagggcgaggugaacaagaucaaguccgcccuccugagcaccaacaaggccguggucucccugagcaacgggguguccgugcucacguucaagguccuggaccugaagaacuacaucgacaagcagcuccugccgauccugaacaagcagagcugcuccaucagcaacaucgagaccgugauggaguuccagcagaagaacaaccggcuccuggagaucacccgcgaguucuccgugaacgccggcgucaccacgcccgugagcaccuacaugcugaccaacagcgagcuccugucccugaucaacgacaugcccaucaccaacgaccagaagaagcucaugagcaacaacgugcagaucguccggcagcaguccuacagcaucaugugcaucaucaaggaggaggugcuggccuacgugguccagcugccccucuacggggugaucgacacgccgugcuggaagcugcacaccagcccccugugcaccaccaacacgaaggagggcagcaacaucugccucacccgcaccgaccgggggugguacugcgacaacgcgggcuccgugagcuucuucccccaggccgagaccugcaaggucugcuccaaccgcguguucugcgacacgaugaacagccugacccugcccuccgaggucaaccucugcaacguggacaucuucaacccgaaguacgacugcaagaucaugaccagcaagaccgacguguccagcuccgucaucacgagccugggcgccaucguguccugcuacgggaagaccaagugcaccgccagcaacaagaacaagggcaucaucaagaccuucuccaacgggugcgacuacgugagcaacaagggcgucgacacggugagcgugggcaacacccuguacuacgucaacaagcaggaggggaagucccucuacgugaagggcgagcccaucaucaacuucuacgacccccugguguuccccagcgacgaguucgacgccuccaucagccaggucaacgagaagaucaaccagucccuggcguucauccggaaguccgacgagcuccugcacaacgugaacgccgggaaguccaccaccaacaucaugaucaccacgaucaucaucgugaucaucgucauccugcucagccugaucgccgugggccugcuccuguacugcaaggcccgcuccaccccggugacccugagcaaggaccagcuguccgggaucaacaacaucgccuucagcaacugaggacuaguacuggcugcaucucccuuuccucuguccuccauccuucucccaggauggugaagggggaccugguacccagugauccccaccccaggauccuaaaucaugacuuaccugcuaauaaaaacucauuggaaaagugagaagaucuaaaaaaaaaaaaaaaaaaaaaaaaaaaaaaaaaaaaaaaaaaaaaaaaaaaaaaaaaaaaaaaaugcaucccccccccccccccccccccccccccccccaaaggcucuuuucagagccaccagaauu

SEQ ID NO: 7013 - RNA, 1977 nt, Artificial Sequence
  mRNA product Design e-6 comprising derived and/or modified sequence from HRSV(A2)__F_DSCav1_mut7 (opt2)
gggagagcggcucggccauuuugucccagucaguccggaggcugcggcugcagaaguaccgccugcggaguaacugcaaagaagcuuaccauggagcuccucauccucaaggccaacgccaucaccaccauccucaccgccgucaccuucugcuucgccuccggccagaacaucaccgaggaguucuaccaguccaccugcuccgccgucuccaagggcuaccucuccgcccuccgcaccggcugguacaccuccgucaucaccaucgagcucuccaacaucaaggagaacaagugcaacggcaccgacgccaaggucaagcucaucaagcaggagcucgacaaguacaagaacgccgucaccgagcuccagaugcucaugugcuccacccccgccaccggcuccggcuccgccaucgccuccggcgucgccgucugcaagguccuccaccucgagggcgaggucaacaagaucaaguccgcccuccucuccaccaacaaggccgucgucucccucuccaacggcgucuccguccucaccuucaagguccucgaccucaagaacuacaucgacaagcagcuccuccccauccucaacaagcaguccugcuccaucuccaacaucgagaccgucauggaguuccagcagaagaacaaccgccuccucgagaucacccgcgaguucuccgucaacgccggcgucaccacccccgucuccaccuacaugcucaccaacuccgagcuccucucccucaucaacgacaugcccaucaccaacgaccagaagaagcucauguccaacaacguccagaucguccgccagcaguccuacuccaucaugugcaucaucaaggaggagguccucgccuacgucguccagcucccccucuacggcgucaucgacacccccugcuggaagcuccacaccuccccccucugcaccaccaacaccaaggagggcuccaacaucugccucacccgcaccgaccgcggcugguacugcgacaacgccggcuccgucuccuucuucccccaggccgagaccugcaaggucugcuccaaccgcgucuucugcgacaccaugaacucccucacccuccccuccgaggucaaccucugcaacgucgacaucuucaaccccaaguacgacugcaagaucaugaccuccaagaccgacgucuccuccuccgucaucaccucccucggcgccaucgucuccugcuacggcaagaccaagugcaccgccuccaacaagaacaagggcaucaucaagaccuucuccaacggcugcgacuacgucuccaacaagggcgucgacaccgucuccgucggcaacacccucuacuacgucaacaagcaggagggcaagucccucuacgucaagggcgagcccaucaucaacuucuacgacccccucgucuuccccuccgacgaguucgacgccuccaucucccaggucaacgagaagaucaaccagucccucgccuucauccgcaaguccgacgagcuccuccacaacgucaacgccggcaaguccaccaccaacaucaugaucaccaccaucaucaucgucaucaucgucauccuccucucccucaucgccgucggccuccuccucuacugcaaggcccgcuccacccccgucacccucuccaaggaccagcucuccggcaucaacaacaucgccuucuccaacugaggacuaguacuggcugcaucucccuuuccucuguccuccauccuucucccaggauggugaagggggaccugguacccagugauccccaccccaggauccuaaaucaugacuuaccugcuaauaaaaacucauuggaaaagugagaagaucuaaaaaaaaaaaaaaaaaaaaaaaaaaaaaaaaaaaaaaaaaaaaaaaaaaaaaaaaaaaaaaaaugcaucccccccccccccccccccccccccccccccaaaggcucuuuucagagccaccagaauu

SEQ ID NO: 7014 - RNA, 1977 nt, Artificial Sequence
  mRNA product Design e-6 comprising derived and/or modified sequence from HRSV(A2)__F_DSCav1_mut7 (opt3)
gggagagcggcucggccauuuugucccagucaguccggaggcugcggcugcagaaguaccgccugcggaguaacugcaaagaagcuuaccauggagcugcucauccuuaaggccaacgcuauuaccacaauacugacugcagugacguucugcuuugccagcggccagaauaucaccgaagaguucuaccaauccacauguucugcggucucaaaaggguauuugagugcuuuaagaacuggaugguacaccagcguuauuacaaucgaacuguccaacauuaaggagaauaaaugcaacgguaccgacgccaaggugaaacuaaucaagcaggaacucgauaaguauaaaaaugcaguaacugagcugcagaugcuuauguguucuacacccgccaccggcucggggucagcuauagcaagcggaguggccgucugcaaggugcugcacuuggagggcgaaguuaacaaaaucaagagugcucuccuguccacgaauaaagccguggucucucugagcaacgguguguccguacucacuuuuaagguuuuagaccugaagaauuacauugauaaacagcuuuugccuauccugaacaagcaaucauguaguauuagcaauaucgagaccgugauggaguuccagcagaaaaacaauaggcuacucgaaauaacacgggaguuuucugucaacgcgggggugacuaccccaguguccacauauaugcugaccaauucagaacuucugagcuugauuaacgacaugccgaucacgaacgaucagaagaaacucaugaguaauaacguccaaauuguucgccagcagucuuacuccaucaugugcaucauuaaggaggaagugcuggcauauguagugcaguuaccccuguacggagucauagacacuccuuguuggaaacuccauacaagcccacuuugcaccacuaauacaaaggagggcucgaacaucugucugacccgaacggaucguggcugguacugcgacaaugccgggucuguguccuucuuuccccaagcugaaaccuguaagguuugcucaaacagaguguucugcgauacaaugaauaguuugacucuaccuagcgaggucaaccuguguaauguggacauuuuuaacccaaaauaugauugcaagaucaugaccuccaaaacagacguaucuagcucaguuauaacuagccucggagccauuguguccuguuacgguaagaccaaaugcacagcaagcaauaagaacaagggcaucaucaaaaccuucucuaaugggugugauuaugucucaaacaagggaguggacacugucagugugggcaauacgcuguacuauguuaacaaacaggaggguaagagccuuuacgugaaaggggaacccauuaucaacuuuuaugacccucugguauucccauccgaugaguuugacgcuucuauuucgcaggucaaugaaaagauaaaccaaaguuuggccuucaucaggaaguccgaugagcuccugcacaaugugaacgcgggaaaaucaacaaccaauauuaugaucacuaccaucauuauaguuaucauugugaucuuacugagucuaauugccgucggccuccugcuuuacugcaaggcacggucuacaccggugaccuugagcaaagaccagcuguccggcaucaacaauauagcuuucucaaacugaggacuaguacuggcugcaucucccuuuccucuguccuccauccuucucccaggauggugaagggggaccugguacccagugauccccaccccaggauccuaaaucaugacuuaccugcuaauaaaaacucauuggaaaagugagaagaucuaaaaaaaaaaaaaaaaaaaaaaaaaaaaaaaaaaaaaaaaaaaaaaaaaaaaaaaaaaaaaaaaugcaucccccccccccccccccccccccccccccccaaaggcucuuuucagagccaccagaauu

SEQ ID NO: 7015 - RNA, 1977 nt, Artificial Sequence
  mRNA product Design e-6 comprising derived and/or modified sequence from HRSV(A2)__F_DSCav1_mut7 (opt4)
gggagagcggcucggccauuuugucccagucaguccggaggcugcggcugcagaaguaccgccugcggaguaacugcaaagaagcuuaccauggagcugcugauccugaaggccaacgccaucaccaccauccugaccgccgugaccuucugcuucgccagcggccagaacaucaccgaggaguucuaccagagcaccugcagcgccgugagcaagggcuaccugagcgcccugagaaccggcugguacaccagcgugaucaccaucgagcugagcaacaucaaggagaacaagugcaacggcaccgacgccaaggugaagcugaucaagcaggagcuggacaaguacaagaacgccgugaccgagcugcagaugcugaugugcagcacccccgccaccggcagcggcagcgccaucgccagcggcguggccgugugcaaggugcugcaccuggagggcgaggugaacaagaucaagagcgcccugcugagcaccaacaaggccguggugagccugagcaacggcgugagcgugcugaccuucaaggugcuggaccugaagaacuacaucgacaagcagcugcugcccauccugaacaagcagagcugcagcaucagcaacaucgagaccgugauggaguuccagcagaagaacaacagacugcuggagaucaccagagaguucagcgugaacgccggcgugaccacccccgugagcaccuacaugcugaccaacagcgagcugcugagccugaucaacgacaugcccaucaccaacgaccagaagaagcugaugagcaacaacgugcagaucgugagacagcagagcuacagcaucaugugcaucaucaaggaggaggugcuggccuacguggugcagcugccccuguacggcgugaucgacacccccugcuggaagcugcacaccagcccccugugcaccaccaacaccaaggagggcagcaacaucugccugaccagaaccgacagaggcugguacugcgacaacgccggcagcgugagcuucuucccccaggccgagaccugcaaggugugcagcaacagaguguucugcgacaccaugaacagccugacccugcccagcgaggugaaccugugcaacguggacaucuucaaccccaaguacgacugcaagaucaugaccagcaagaccgacgugagcagcagcgugaucaccagccugggcgccaucgugagcugcuacggcaagaccaagugcaccgccagcaacaagaacaagggcaucaucaagaccuucagcaacggcugcgacuacgugagcaacaagggcguggacaccgugagcgugggcaacacccuguacuacgugaacaagcaggagggcaagagccuguacgugaagggcgagcccaucaucaacuucuacgacccccugguguuccccagcgacgaguucgacgccagcaucagccaggugaacgagaagaucaaccagagccuggccuucaucagaaagagcgacgagcugcugcacaacgugaacgccggcaagagcaccaccaacaucaugaucaccaccaucaucaucgugaucaucgugauccugcugagccugaucgccgugggccugcugcuguacugcaaggccagaagcacccccgugacccugagcaaggaccagcugagcggcaucaacaacaucgccuucagcaacugaggacuaguacuggcugcaucucccuuuccucuguccuccauccuucucccaggauggugaagggggaccugguacccagugauccccaccccaggauccuaaaucaugacuuaccugcuaauaaaaacucauuggaaaagugagaagaucuaaaaaaaaaaaaaaaaaaaaaaaaaaaaaaaaaaaaaaaaaaaaaaaaaaaaaaaaaaaaaaaaugcaucccccccccccccccccccccccccccccccaaaggcucuuuucagagccaccagaauu

SEQ ID NO: 7016 - RNA, 1977 nt, Artificial Sequence
  mRNA product Design e-6 comprising derived and/or modified sequence from HRSV(A2)__F_DSCav1_mut7 (opt5)
gggagagcggcucggccauuuugucccagucaguccggaggcugcggcugcagaaguaccgccugcggaguaacugcaaagaagcuuaccauggagcugcucauccugaaggccaacgcuauuaccacaauccuuacggccgugaccuucugcuuugcgagcggccagaauauuacagaagaguucuaccaauccaccuguucugcugucagcaaaggguaucuguccgcccucagaacaggaugguacaccucuguuaucacaauugaacugagcaacaucaaggagaauaaaugcaacggcaccgacgccaaggugaaacuuaucaagcaggaacuggauaaguauaaaaaugcugugacggagcuccagaugcugauguguuccacccccgccacagggucuggaagcgcuauugccuccggcgucgcggugugcaagguucugcaccucgagggggaagugaacaaaaucaagagcgcccugcuuucuaccaauaaagcugucgugucccugagcaacggaguuucugugcucacauuuaagguccuggaccuuaagaauuacauugauaaacagcugcucccuauccugaacaagcaauccuguagcauuucuaauaucgagaccgugauggaguuccagcagaaaaacaaucggcugcucgaaauuacgcgcgaguuuuccgugaacgccggcgucacaaccccgguuagcacauauaugcugaccaauuccgaacuucugucucucaucaacgacaugcccaucaccaacgaucagaagaaacugaugagcaauaacgugcaaauugugagacagcaguccuacagcaucaugugcauuaucaaggaggaaguccuugcuuaugugguucagcugccucucuacggcgugauugacacacccuguuggaaacugcauacgucuccucugugcaccacaaauaccaaggagggguccaacaucugucucacacggaccgaucgcggaugguacugcgacaaugccggcagcgucucuuucuuuccccaagcggaaacguguaaggugugcagcaacagaguuuucugcgauacaaugaacucccugacccuuccuucugaggugaaucuguguaaugucgacaucuuuaacccgaaauaugauugcaagauuaugaccagcaaaacagacguguccagcucugucaucaccucccucggggccauugugagcuguuacggaaagacaaaaugcacggcuucuaauaagaacaagggcaucauuaaaaccuucuccaaugggugugauuauguuagcaacaagggaguggacacagucuccgugggcaauacccuguacuauguuaacaaacaggagggcaagucucuuuacgugaaaggggaacccaucaucaacuuuuaugacccucuggucuuccccagcgaugaguuugacgccuccauuucucaggugaaugaaaagaucaaccaaagccucgcuuucauucggaaguccgaugagcugcugcacaaugugaacgccggaaaaagcacaaccaauaucaugauuacgaccaucauuaucguuaucauugucauccuccugucucuuauugccgugggccugcuccuguacugcaaggcucgcuccacaccugugacccugagcaaagaccagcuuucugggaucaacaauauugcguucuccaacugaggacuaguacuggcugcaucucccuuuccucuguccuccauccuucucccaggauggugaagggggaccugguacccagugauccccaccccaggauccuaaaucaugacuuaccugcuaauaaaaacucauuggaaaagugagaagaucuaaaaaaaaaaaaaaaaaaaaaaaaaaaaaaaaaaaaaaaaaaaaaaaaaaaaaaaaaaaaaaaaugcaucccccccccccccccccccccccccccccccaaaggcucuuuucagagccaccagaauu

SEQ ID NO: 7017 - RNA, 1977 nt, Artificial Sequence
  mRNA product Design e-6 comprising derived and/or modified sequence from HRSV(A2)__F_DSCav1_mut7 (opt6)
gggagagcggcucggccauuuugucccagucaguccggaggcugcggcugcagaaguaccgccugcggaguaacugcaaagaagcuuaccauggaauuacucauacucaaagcaaaugcaauuaccacuauacucacagcuguaacuuuuuguuucgccucaggacaaaacaucacagaagaauuuuaucaauccacaugcucugccguaucaaaaggcuaccuaucugcccuaagaacagguugguacacaucuguaauaacaaucgaauuauccaacaucaaagaaaacaaaugcaacggcacagacgcaaaagucaaacucaucaaacaagaauuagauaaauauaaaaacgcaguaacagaacuacaaaugcuaaugugcucuacacccgccacaggaucaggauccgcaaucgcuucuggaguagccguuugcaaaguauuacaccuagaaggagaaguaaauaaaauaaaauccgcacuacuaucaacuaauaaagcaguaguaucacuuucuaaugguguaucaguauuaacauucaaaguccucgaccuaaaaaauuacaucgacaaacaacuauuacccauccuuaauaaacaaucaugcuccauaucaaacauagaaacugucauggaauuucaacaaaaaaacaauagacuucuagaaaucacaagagaauuuucuguaaaugcaggaguaacuacaccaguaucaacauauauguuaaccaacuccgaacuacuaucacucauaaacgacaugccaauaacaaacgaccaaaaaaaacuaaugucaaauaacguucaaauaguaagacaacaaucauacucaaucaugugcauaauaaaagaagaaguuuuagcauacgucguacaacuuccccuauacggaguaauagacaccccuugcuggaaacuccacaccucaccacuaugcacuacaaacacaaaagaagguuccaacaucugcuuaacaagaaccgaucgaggaugguacugcgacaacgcugguuccguaucuuucuucccacaagcagaaacaugcaaaguaugcuccaauagaguauucugcgacaccaugaacucacuaacucuaccauccgaaguaaaccuaugcaacgucgacauauuuaauccaaaauaugacugcaaaauaaugacuucaaaaacagacguauccucaucaguaauaacauccuuaggagcaauaguaucauguuacggcaagacaaaauguacagccucaaacaaaaacaaagguaucauuaaaaccuucuccaacggcugcgacuacguaucaaauaaaggugucgauacaguaucaguaggaaacacacucuauuacguuaauaaacaagaaggaaagucauuauacguaaaaggagaaccaauaaucaauuucuacgauccccuagucuuucccucagaugaauuugacgcaagcaucucucaagucaacgaaaaaauaaaccaaucccuagccuucauaagaaaaucagaugaacuacuucauaacgucaacgccggaaaaucaacaaccaacauaaugaucacuacaaucauaauuguaauuauaguaauacuacuaucgcuaauugccguuggacuacuacuauauuguaaagcaagaucaacacccguuacucuauccaaagaucaauuaucaggaaucaacaacauagccuucucaaauuaaggacuaguacuggcugcaucucccuuuccucuguccuccauccuucucccaggauggugaagggggaccugguacccagugauccccaccccaggauccuaaaucaugacuuaccugcuaauaaaaacucauuggaaaagugagaagaucuaaaaaaaaaaaaaaaaaaaaaaaaaaaaaaaaaaaaaaaaaaaaaaaaaaaaaaaaaaaaaaaaugcaucccccccccccccccccccccccccccccccaaaggcucuuuucagagccaccagaauu

SEQ ID NO: 7018 - RNA, 1977 nt, Artificial Sequence
  mRNA product Design e-6 comprising derived and/or modified sequence from HRSV(A2)__F_DSCav1_mut7 (opt11)
gggagagcggcucggccauuuugucccagucaguccggaggcugcggcugcagaaguaccgccugcggaguaacugcaaagaagcuuaccauggaacuacucauacuuaaagccaacgcaauaaccacaauccucaccgccgucacauucugcuucgccucgggacaaaacauaaccgaagaauuuuaccagucuaccugcuccgccgucuccaaggguuaccucuccgcgcuccgcaccgggugguacaccagcguuaucaccaucgaacuaucuaacauaaaagaaaacaagugcaacggaaccgacgcaaaagucaaacucaucaaacaagaacuagacaaauacaagaaugccgucaccgaacuacaaaugcucaugugcuccacccccgccaccggauccggcuccgccauugccuccggcgucgccguaugcaaaguccuucacuuggaaggagaaguuaacaaaauaaaaagcgcccuccugucgaccaacaaagcgguggucagccucuccaacggcgucucuguccucaccuucaaaguccucgaccucaagaacuacauagauaaacaacuacuccccauccuaaacaaacagucaugcagcauauccaacaucgaaaccgucauggaguuccaacagaaaaacaaccgccuccuugaaaucacccgcgaguucucugucaacgccggcgucaccacccccgucuccaccuacaugcucacaaacuccgaacuccucagccucaucaacgacaugccaaucaccaacgaccaaaagaaacucauguccaacaacguacaaaucguucgucaacaaucauacucaaucaugugcaucauuaaagaagaaguccucgcauacgucguccaacucccccucuauggggucaucgacaccccaugcuggaaacuccacaccucuccccuaugcaccaccaacaccaaagaaggcuccaacaucugccuaacccgaaccgaccgcggaugguacugcgacaacgccggcuccgucuccuucuucccccaggccgaaacauguaaagucugcuccaaccguguguucugcgacaccaugaacucacuaacccuccccuccgaagucaaccucugcaacgucgacaucuucaacccgaaauacgacugcaaaauaaugaccagcaaaacagacguauccucuagcgucauuaccagccuaggugcaaucguguccugcuacggcaaaacaaaaugcaccgccuccaacaaaaauaaaggaaucauaaaaaccuucuccaacggcugcgacuacgucagcaacaaaggagucgacaccgucuccguaggaaauacucuauacuaugucaacaaacaagaggguaaaucccucuacgucaaaggcgaacccaucaucaacuucuacgacccccucgucuuccccucugacgaguucgacgccagcauaucacaaguaaacgaaaagaucaaccaaucccucgcauucauucgcaaauccgacgaacuccuacacaacgucaacgccggaaaauccaccaccaacaucaugaucacuacuaucauuaucgucaucaucgucauccuccucucccucaucgcagucggccuucuacucuacugcaaggcacgcucuacacccguaacccugucuaaagaccaacucuccggcaucaacaacaucgcuuucuccaacuaaggacuaguacuggcugcaucucccuuuccucuguccuccauccuucucccaggauggugaagggggaccugguacccagugauccccaccccaggauccuaaaucaugacuuaccugcuaauaaaaacucauuggaaaagugagaagaucuaaaaaaaaaaaaaaaaaaaaaaaaaaaaaaaaaaaaaaaaaaaaaaaaaaaaaaaaaaaaaaaaugcaucccccccccccccccccccccccccccccccaaaggcucuuuucagagccaccagaauu

SEQ ID NO: 7019 - RNA, 2193 nt, Artificial Sequence
  mRNA product Design f-1 comprising derived and/or modified sequence from HRSV(A2)__F_DSCav1_mut7 (opt1)
gggagagcggcucggccauuuugucccagucaguccggaggcugcggcugcagaaguaccgccugcggaguaacugcaaagaagcuuaccauggagcugcucauccugaaggccaacgccaucaccaccauccugacggcggugaccuucugcuucgccagcggccagaacaucaccgaggaguucuaccaguccacgugcagcgccgucuccaagggguaccucagcgcccugcggaccggcugguacaccuccgugaucaccaucgagcugagcaacaucaaggagaacaagugcaacgggaccgacgccaaggugaagcucaucaagcaggagcuggacaaguacaagaacgcggucacggagcugcagaugcugaugugcuccaccccggcaaccggcuccggcuccgccaucgcgagcggcgucgccgugugcaaggugcugcaccucgagggggaggucaacaagaucaagagcgcccugcuguccaccaacaaggccguggugagccucuccaacggcgucagcgugcugaccuucaaggugcuggaccucaagaacuacaucgacaagcagcugcugcccauccugaacaagcagagcugcuccaucagcaacaucgagacggugauggaguuccagcagaagaacaaccggcuccuggagaucacccgcgaguucagcgugaacgccggggucaccacccccguguccacguacaugcugaccaacagcgagcuccugucccugaucaacgacaugccgaucaccaacgaccagaagaagcucaugagcaacaacgugcagaucguccggcagcaguccuacagcaucaugugcaucaucaaggaggaggugcuggcguacgugguccagcugccccucuacggcgugaucgacacccccugcuggaagcugcacacgagcccccugugcaccaccaacaccaaggagggguccaacaucugccucacgcgcaccgaccggggcugguacugcgacaacgccggcagcgucuccuucuucccgcaggccgagaccugcaaggugugcagcaaccgcguguucugcgacaccaugaacucccugacgcugcccagcgagguaaaccucugcaacgucgacaucuucaaccccaaguacgacugcaagaucaugaccuccaagaccgacgugagcuccagcgugaucaccucccugggggccaucgucagcugcuacggcaagacgaagugcaccgccagcaacaagaacaaggggaucaucaagaccuucuccaacggcugcgacuacgugagcaacaagggcguggacaccguguccgucgggaacacccuguacuacgugaacaagcaggagggcaagagccucuacgugaagggggagcccaucaucaacuucuacgacccgcuggucuuccccuccgacgaguucgacgcgagcaucucccaggugaacgagaagaucaaccagagccuggccuucauccgcaaguccgacgagcugcuccacaacgugaacgccggcaagagcacgaccaacaucaugaucaccaccaucaucaucgucaucaucgugauccugcugucccucaucgccguggggcugcugcucuacugcaaggcccggagcacgcccgucacccuguccaaggaccagcugagcggcaucaacaacaucgcguucuccaacugaggacuagugaagggaacacccaaauuuaauucagccuuaagcacaauuaauuaagagugaaacguaauuguacaagcaguuggucacccaccauagggcaugaucaacaccgcaaccuuuccuuuuucccccagugauucugaaaaaccccucuucccuucagcuugcuuagauguuccaaauuuaguaagcuuaaggcggccuacagaagaaaaagaaaaaaaaggccacaaaaguucccucucacuuucaguaaauaaaauaaaagcagcaacagaaauaaagaaauaaaugaaauucaaaaugaaauaaauauuguguugugcagcauuaaaaaaucaauaaaaauuaaaaaugagcaagaucuaaaaaaaaaaaaaaaaaaaaaaaaaaaaaaaaaaaaaaaaaaaaaaaaaaaaaaaaaaaaaaaaugcaucccccccccccccccccccccccccccccccaaaggcucuuuucagagccaccagaauu

SEQ ID NO: 7020 - RNA, 2193 nt, Artificial Sequence
  mRNA product Design f-1 comprising derived and/or modified sequence from HRSV(A2)__F_DSCav1_mut7 (opt1)
gggagagcggcucggccauuuugucccagucaguccggaggcugcggcugcagaaguaccgccugcggaguaacugcaaagaagcuuaccauggagcugcucauccugaaggccaacgccaucaccaccauccugacggcggugaccuucugcuucgccagcggccagaacaucaccgaggaguucuaccaguccacgugcagcgccgucuccaagggguaccucagcgcccugcgcaccggcugguacaccuccgugaucaccaucgagcugagcaacaucaaggagaacaagugcaacgggaccgacgccaaggugaagcucaucaagcaggagcuggacaaguacaagaacgcggucacggagcugcagaugcucaugugcuccacccccgccaccggcagcggguccgccaucgccagcggcguggcggugugcaagguccugcaccuggagggcgaggugaacaagaucaaguccgcccuccugagcaccaacaaggccguggucucccugagcaacgggguguccgugcucacguucaagguccuggaccugaagaacuacaucgacaagcagcuccugccgauccugaacaagcagagcugcuccaucagcaacaucgagaccgugauggaguuccagcagaagaacaaccggcuccuggagaucacccgcgaguucuccgugaacgccggcgucaccacgcccgugagcaccuacaugcugaccaacagcgagcuccugucccugaucaacgacaugcccaucaccaacgaccagaagaagcucaugagcaacaacgugcagaucguccggcagcaguccuacagcaucaugugcaucaucaaggaggaggugcuggccuacgugguccagcugccccucuacggggugaucgacacgccgugcuggaagcugcacaccagcccccugugcaccaccaacacgaaggagggcagcaacaucugccucacccgcaccgaccgggggugguacugcgacaacgcgggcuccgugagcuucuucccccaggccgagaccugcaaggucugcuccaaccgcguguucugcgacacgaugaacagccugacccugcccuccgaggucaaccucugcaacguggacaucuucaacccgaaguacgacugcaagaucaugaccagcaagaccgacguguccagcuccgucaucacgagccugggcgccaucguguccugcuacgggaagaccaagugcaccgccagcaacaagaacaagggcaucaucaagaccuucuccaacgggugcgacuacgugagcaacaagggcgucgacacggugagcgugggcaacacccuguacuacgucaacaagcaggaggggaagucccucuacgugaagggcgagcccaucaucaacuucuacgacccccugguguuccccagcgacgaguucgacgccuccaucagccaggucaacgagaagaucaaccagucccuggcguucauccggaaguccgacgagcuccugcacaacgugaacgccgggaaguccaccaccaacaucaugaucaccacgaucaucaucgugaucaucgucauccugcucagccugaucgccgugggccugcuccuguacugcaaggcccgcuccaccccggugacccugagcaaggaccagcuguccgggaucaacaacaucgccuucagcaacugaggacuagugaagggaacacccaaauuuaauucagccuuaagcacaauuaauuaagagugaaacguaauuguacaagcaguuggucacccaccauagggcaugaucaacaccgcaaccuuuccuuuuucccccagugauucugaaaaaccccucuucccuucagcuugcuuagauguuccaaauuuaguaagcuuaaggcggccuacagaagaaaaagaaaaaaaaggccacaaaaguucccucucacuuucaguaaauaaaauaaaagcagcaacagaaauaaagaaauaaaugaaauucaaaaugaaauaaauauuguguugugcagcauuaaaaaaucaauaaaaauuaaaaaugagcaagaucuaaaaaaaaaaaaaaaaaaaaaaaaaaaaaaaaaaaaaaaaaaaaaaaaaaaaaaaaaaaaaaaaugcaucccccccccccccccccccccccccccccccaaaggcucuuuucagagccaccagaauu

SEQ ID NO: 7021 - RNA, 2193 nt, Artificial Sequence
  mRNA product Design f-1 comprising derived and/or modified sequence from HRSV(A2)__F_DSCav1_mut7 (opt2)
gggagagcggcucggccauuuugucccagucaguccggaggcugcggcugcagaaguaccgccugcggaguaacugcaaagaagcuuaccauggagcuccucauccucaaggccaacgccaucaccaccauccucaccgccgucaccuucugcuucgccuccggccagaacaucaccgaggaguucuaccaguccaccugcuccgccgucuccaagggcuaccucuccgcccuccgcaccggcugguacaccuccgucaucaccaucgagcucuccaacaucaaggagaacaagugcaacggcaccgacgccaaggucaagcucaucaagcaggagcucgacaaguacaagaacgccgucaccgagcuccagaugcucaugugcuccacccccgccaccggcuccggcuccgccaucgccuccggcgucgccgucugcaagguccuccaccucgagggcgaggucaacaagaucaaguccgcccuccucuccaccaacaaggccgucgucucccucuccaacggcgucuccguccucaccuucaagguccucgaccucaagaacuacaucgacaagcagcuccuccccauccucaacaagcaguccugcuccaucuccaacaucgagaccgucauggaguuccagcagaagaacaaccgccuccucgagaucacccgcgaguucuccgucaacgccggcgucaccacccccgucuccaccuacaugcucaccaacuccgagcuccucucccucaucaacgacaugcccaucaccaacgaccagaagaagcucauguccaacaacguccagaucguccgccagcaguccuacuccaucaugugcaucaucaaggaggagguccucgccuacgucguccagcucccccucuacggcgucaucgacacccccugcuggaagcuccacaccuccccccucugcaccaccaacaccaaggagggcuccaacaucugccucacccgcaccgaccgcggcugguacugcgacaacgccggcuccgucuccuucuucccccaggccgagaccugcaaggucugcuccaaccgcgucuucugcgacaccaugaacucccucacccuccccuccgaggucaaccucugcaacgucgacaucuucaaccccaaguacgacugcaagaucaugaccuccaagaccgacgucuccuccuccgucaucaccucccucggcgccaucgucuccugcuacggcaagaccaagugcaccgccuccaacaagaacaagggcaucaucaagaccuucuccaacggcugcgacuacgucuccaacaagggcgucgacaccgucuccgucggcaacacccucuacuacgucaacaagcaggagggcaagucccucuacgucaagggcgagcccaucaucaacuucuacgacccccucgucuuccccuccgacgaguucgacgccuccaucucccaggucaacgagaagaucaaccagucccucgccuucauccgcaaguccgacgagcuccuccacaacgucaacgccggcaaguccaccaccaacaucaugaucaccaccaucaucaucgucaucaucgucauccuccucucccucaucgccgucggccuccuccucuacugcaaggcccgcuccacccccgucacccucuccaaggaccagcucuccggcaucaacaacaucgccuucuccaacugaggacuagugaagggaacacccaaauuuaauucagccuuaagcacaauuaauuaagagugaaacguaauuguacaagcaguuggucacccaccauagggcaugaucaacaccgcaaccuuuccuuuuucccccagugauucugaaaaaccccucuucccuucagcuugcuuagauguuccaaauuuaguaagcuuaaggcggccuacagaagaaaaagaaaaaaaaggccacaaaaguucccucucacuuucaguaaauaaaauaaaagcagcaacagaaauaaagaaauaaaugaaauucaaaaugaaauaaauauuguguugugcagcauuaaaaaaucaauaaaaauuaaaaaugagcaagaucuaaaaaaaaaaaaaaaaaaaaaaaaaaaaaaaaaaaaaaaaaaaaaaaaaaaaaaaaaaaaaaaaugcaucccccccccccccccccccccccccccccccaaaggcucuuuucagagccaccagaauu

SEQ ID NO: 7022 - RNA, 2193 nt, Artificial Sequence
  mRNA product Design f-1 comprising derived and/or modified sequence from HRSV(A2)__F_DSCav1_mut7 (opt3)
gggagagcggcucggccauuuugucccagucaguccggaggcugcggcugcagaaguaccgccugcggaguaacugcaaagaagcuuaccauggagcugcucauccuuaaggccaacgcuauuaccacaauacugacugcagugacguucugcuuugccagcggccagaauaucaccgaagaguucuaccaauccacauguucugcggucucaaaaggguauuugagugcuuuaagaacuggaugguacaccagcguuauuacaaucgaacuguccaacauuaaggagaauaaaugcaacgguaccgacgccaaggugaaacuaaucaagcaggaacucgauaaguauaaaaaugcaguaacugagcugcagaugcuuauguguucuacacccgccaccggcucggggucagcuauagcaagcggaguggccgucugcaaggugcugcacuuggagggcgaaguuaacaaaaucaagagugcucuccuguccacgaauaaagccguggucucucugagcaacgguguguccguacucacuuuuaagguuuuagaccugaagaauuacauugauaaacagcuuuugccuauccugaacaagcaaucauguaguauuagcaauaucgagaccgugauggaguuccagcagaaaaacaauaggcuacucgaaauaacacgggaguuuucugucaacgcgggggugacuaccccaguguccacauauaugcugaccaauucagaacuucugagcuugauuaacgacaugccgaucacgaacgaucagaagaaacucaugaguaauaacguccaaauuguucgccagcagucuuacuccaucaugugcaucauuaaggaggaagugcuggcauauguagugcaguuaccccuguacggagucauagacacuccuuguuggaaacuccauacaagcccacuuugcaccacuaauacaaaggagggcucgaacaucugucugacccgaacggaucguggcugguacugcgacaaugccgggucuguguccuucuuuccccaagcugaaaccuguaagguuugcucaaacagaguguucugcgauacaaugaauaguuugacucuaccuagcgaggucaaccuguguaauguggacauuuuuaacccaaaauaugauugcaagaucaugaccuccaaaacagacguaucuagcucaguuauaacuagccucggagccauuguguccuguuacgguaagaccaaaugcacagcaagcaauaagaacaagggcaucaucaaaaccuucucuaaugggugugauuaugucucaaacaagggaguggacacugucagugugggcaauacgcuguacuauguuaacaaacaggaggguaagagccuuuacgugaaaggggaacccauuaucaacuuuuaugacccucugguauucccauccgaugaguuugacgcuucuauuucgcaggucaaugaaaagauaaaccaaaguuuggccuucaucaggaaguccgaugagcuccugcacaaugugaacgcgggaaaaucaacaaccaauauuaugaucacuaccaucauuauaguuaucauugugaucuuacugagucuaauugccgucggccuccugcuuuacugcaaggcacggucuacaccggugaccuugagcaaagaccagcuguccggcaucaacaauauagcuuucucaaacugaggacuagugaagggaacacccaaauuuaauucagccuuaagcacaauuaauuaagagugaaacguaauuguacaagcaguuggucacccaccauagggcaugaucaacaccgcaaccuuuccuuuuucccccagugauucugaaaaaccccucuucccuucagcuugcuuagauguuccaaauuuaguaagcuuaaggcggccuacagaagaaaaagaaaaaaaaggccacaaaaguucccucucacuuucaguaaauaaaauaaaagcagcaacagaaauaaagaaauaaaugaaauucaaaaugaaauaaauauuguguugugcagcauuaaaaaaucaauaaaaauuaaaaaugagcaagaucuaaaaaaaaaaaaaaaaaaaaaaaaaaaaaaaaaaaaaaaaaaaaaaaaaaaaaaaaaaaaaaaaugcaucccccccccccccccccccccccccccccccaaaggcucuuuucagagccaccagaauu

SEQ ID NO: 7023 - RNA, 2193 nt, Artificial Sequence
  mRNA product Design f-1 comprising derived and/or modified sequence from HRSV(A2)__F_DSCav1_mut7 (opt4)
gggagagcggcucggccauuuugucccagucaguccggaggcugcggcugcagaaguaccgccugcggaguaacugcaaagaagcuuaccauggagcugcugauccugaaggccaacgccaucaccaccauccugaccgccgugaccuucugcuucgccagcggccagaacaucaccgaggaguucuaccagagcaccugcagcgccgugagcaagggcuaccugagcgcccugagaaccggcugguacaccagcgugaucaccaucgagcugagcaacaucaaggagaacaagugcaacggcaccgacgccaaggugaagcugaucaagcaggagcuggacaaguacaagaacgccgugaccgagcugcagaugcugaugugcagcacccccgccaccggcagcggcagcgccaucgccagcggcguggccgugugcaaggugcugcaccuggagggcgaggugaacaagaucaagagcgcccugcugagcaccaacaaggccguggugagccugagcaacggcgugagcgugcugaccuucaaggugcuggaccugaagaacuacaucgacaagcagcugcugcccauccugaacaagcagagcugcagcaucagcaacaucgagaccgugauggaguuccagcagaagaacaacagacugcuggagaucaccagagaguucagcgugaacgccggcgugaccacccccgugagcaccuacaugcugaccaacagcgagcugcugagccugaucaacgacaugcccaucaccaacgaccagaagaagcugaugagcaacaacgugcagaucgugagacagcagagcuacagcaucaugugcaucaucaaggaggaggugcuggccuacguggugcagcugccccuguacggcgugaucgacacccccugcuggaagcugcacaccagcccccugugcaccaccaacaccaaggagggcagcaacaucugccugaccagaaccgacagaggcugguacugcgacaacgccggcagcgugagcuucuucccccaggccgagaccugcaaggugugcagcaacagaguguucugcgacaccaugaacagccugacccugcccagcgaggugaaccugugcaacguggacaucuucaaccccaaguacgacugcaagaucaugaccagcaagaccgacgugagcagcagcgugaucaccagccugggcgccaucgugagcugcuacggcaagaccaagugcaccgccagcaacaagaacaagggcaucaucaagaccuucagcaacggcugcgacuacgugagcaacaagggcguggacaccgugagcgugggcaacacccuguacuacgugaacaagcaggagggcaagagccuguacgugaagggcgagcccaucaucaacuucuacgacccccugguguuccccagcgacgaguucgacgccagcaucagccaggugaacgagaagaucaaccagagccuggccuucaucagaaagagcgacgagcugcugcacaacgugaacgccggcaagagcaccaccaacaucaugaucaccaccaucaucaucgugaucaucgugauccugcugagccugaucgccgugggccugcugcuguacugcaaggccagaagcacccccgugacccugagcaaggaccagcugagcggcaucaacaacaucgccuucagcaacugaggacuagugaagggaacacccaaauuuaauucagccuuaagcacaauuaauuaagagugaaacguaauuguacaagcaguuggucacccaccauagggcaugaucaacaccgcaaccuuuccuuuuucccccagugauucugaaaaaccccucuucccuucagcuugcuuagauguuccaaauuuaguaagcuuaaggcggccuacagaagaaaaagaaaaaaaaggccacaaaaguucccucucacuuucaguaaauaaaauaaaagcagcaacagaaauaaagaaauaaaugaaauucaaaaugaaauaaauauuguguugugcagcauuaaaaaaucaauaaaaauuaaaaaugagcaagaucuaaaaaaaaaaaaaaaaaaaaaaaaaaaaaaaaaaaaaaaaaaaaaaaaaaaaaaaaaaaaaaaaugcaucccccccccccccccccccccccccccccccaaaggcucuuuucagagccaccagaauu

SEQ ID NO: 7024 - RNA, 2193 nt, Artificial Sequence
  mRNA product Design f-1 comprising derived and/or modified sequence from HRSV(A2)__F_DSCav1_mut7 (opt5)
gggagagcggcucggccauuuugucccagucaguccggaggcugcggcugcagaaguaccgccugcggaguaacugcaaagaagcuuaccauggagcugcucauccugaaggccaacgcuauuaccacaauccuuacggccgugaccuucugcuuugcgagcggccagaauauuacagaagaguucuaccaauccaccuguucugcugucagcaaaggguaucuguccgcccucagaacaggaugguacaccucuguuaucacaauugaacugagcaacaucaaggagaauaaaugcaacggcaccgacgccaaggugaaacuuaucaagcaggaacuggauaaguauaaaaaugcugugacggagcuccagaugcugauguguuccacccccgccacagggucuggaagcgcuauugccuccggcgucgcggugugcaagguucugcaccucgagggggaagugaacaaaaucaagagcgcccugcuuucuaccaauaaagcugucgugucccugagcaacggaguuucugugcucacauuuaagguccuggaccuuaagaauuacauugauaaacagcugcucccuauccugaacaagcaauccuguagcauuucuaauaucgagaccgugauggaguuccagcagaaaaacaaucggcugcucgaaauuacgcgcgaguuuuccgugaacgccggcgucacaaccccgguuagcacauauaugcugaccaauuccgaacuucugucucucaucaacgacaugcccaucaccaacgaucagaagaaacugaugagcaauaacgugcaaauugugagacagcaguccuacagcaucaugugcauuaucaaggaggaaguccuugcuuaugugguucagcugccucucuacggcgugauugacacacccuguuggaaacugcauacgucuccucugugcaccacaaauaccaaggagggguccaacaucugucucacacggaccgaucgcggaugguacugcgacaaugccggcagcgucucuuucuuuccccaagcggaaacguguaaggugugcagcaacagaguuuucugcgauacaaugaacucccugacccuuccuucugaggugaaucuguguaaugucgacaucuuuaacccgaaauaugauugcaagauuaugaccagcaaaacagacguguccagcucugucaucaccucccucggggccauugugagcuguuacggaaagacaaaaugcacggcuucuaauaagaacaagggcaucauuaaaaccuucuccaaugggugugauuauguuagcaacaagggaguggacacagucuccgugggcaauacccuguacuauguuaacaaacaggagggcaagucucuuuacgugaaaggggaacccaucaucaacuuuuaugacccucuggucuuccccagcgaugaguuugacgccuccauuucucaggugaaugaaaagaucaaccaaagccucgcuuucauucggaaguccgaugagcugcugcacaaugugaacgccggaaaaagcacaaccaauaucaugauuacgaccaucauuaucguuaucauugucauccuccugucucuuauugccgugggccugcuccuguacugcaaggcucgcuccacaccugugacccugagcaaagaccagcuuucugggaucaacaauauugcguucuccaacugaggacuagugaagggaacacccaaauuuaauucagccuuaagcacaauuaauuaagagugaaacguaauuguacaagcaguuggucacccaccauagggcaugaucaacaccgcaaccuuuccuuuuucccccagugauucugaaaaaccccucuucccuucagcuugcuuagauguuccaaauuuaguaagcuuaaggcggccuacagaagaaaaagaaaaaaaaggccacaaaaguucccucucacuuucaguaaauaaaauaaaagcagcaacagaaauaaagaaauaaaugaaauucaaaaugaaauaaauauuguguugugcagcauuaaaaaaucaauaaaaauuaaaaaugagcaagaucuaaaaaaaaaaaaaaaaaaaaaaaaaaaaaaaaaaaaaaaaaaaaaaaaaaaaaaaaaaaaaaaaugcaucccccccccccccccccccccccccccccccaaaggcucuuuucagagccaccagaauu

SEQ ID NO: 7025 - RNA, 2193 nt, Artificial Sequence
  mRNA product Design f-1 comprising derived and/or modified sequence from HRSV(A2)__F_DSCav1_mut7 (opt6)
gggagagcggcucggccauuuugucccagucaguccggaggcugcggcugcagaaguaccgccugcggaguaacugcaaagaagcuuaccauggaauuacucauacucaaagcaaaugcaauuaccacuauacucacagcuguaacuuuuuguuucgccucaggacaaaacaucacagaagaauuuuaucaauccacaugcucugccguaucaaaaggcuaccuaucugcccuaagaacagguugguacacaucuguaauaacaaucgaauuauccaacaucaaagaaaacaaaugcaacggcacagacgcaaaagucaaacucaucaaacaagaauuagauaaauauaaaaacgcaguaacagaacuacaaaugcuaaugugcucuacacccgccacaggaucaggauccgcaaucgcuucuggaguagccguuugcaaaguauuacaccuagaaggagaaguaaauaaaauaaaauccgcacuacuaucaacuaauaaagcaguaguaucacuuucuaaugguguaucaguauuaacauucaaaguccucgaccuaaaaaauuacaucgacaaacaacuauuacccauccuuaauaaacaaucaugcuccauaucaaacauagaaacugucauggaauuucaacaaaaaaacaauagacuucuagaaaucacaagagaauuuucuguaaaugcaggaguaacuacaccaguaucaacauauauguuaaccaacuccgaacuacuaucacucauaaacgacaugccaauaacaaacgaccaaaaaaaacuaaugucaaauaacguucaaauaguaagacaacaaucauacucaaucaugugcauaauaaaagaagaaguuuuagcauacgucguacaacuuccccuauacggaguaauagacaccccuugcuggaaacuccacaccucaccacuaugcacuacaaacacaaaagaagguuccaacaucugcuuaacaagaaccgaucgaggaugguacugcgacaacgcugguuccguaucuuucuucccacaagcagaaacaugcaaaguaugcuccaauagaguauucugcgacaccaugaacucacuaacucuaccauccgaaguaaaccuaugcaacgucgacauauuuaauccaaaauaugacugcaaaauaaugacuucaaaaacagacguauccucaucaguaauaacauccuuaggagcaauaguaucauguuacggcaagacaaaauguacagccucaaacaaaaacaaagguaucauuaaaaccuucuccaacggcugcgacuacguaucaaauaaaggugucgauacaguaucaguaggaaacacacucuauuacguuaauaaacaagaaggaaagucauuauacguaaaaggagaaccaauaaucaauuucuacgauccccuagucuuucccucagaugaauuugacgcaagcaucucucaagucaacgaaaaaauaaaccaaucccuagccuucauaagaaaaucagaugaacuacuucauaacgucaacgccggaaaaucaacaaccaacauaaugaucacuacaaucauaauuguaauuauaguaauacuacuaucgcuaauugccguuggacuacuacuauauuguaaagcaagaucaacacccguuacucuauccaaagaucaauuaucaggaaucaacaacauagccuucucaaauuaaggacuagugaagggaacacccaaauuuaauucagccuuaagcacaauuaauuaagagugaaacguaauuguacaagcaguuggucacccaccauagggcaugaucaacaccgcaaccuuuccuuuuucccccagugauucugaaaaaccccucuucccuucagcuugcuuagauguuccaaauuuaguaagcuuaaggcggccuacagaagaaaaagaaaaaaaaggccacaaaaguucccucucacuuucaguaaauaaaauaaaagcagcaacagaaauaaagaaauaaaugaaauucaaaaugaaauaaauauuguguugugcagcauuaaaaaaucaauaaaaauuaaaaaugagcaagaucuaaaaaaaaaaaaaaaaaaaaaaaaaaaaaaaaaaaaaaaaaaaaaaaaaaaaaaaaaaaaaaaaugcaucccccccccccccccccccccccccccccccaaaggcucuuuucagagccaccagaauu

SEQ ID NO: 7026 - RNA, 2193 nt, Artificial Sequence
  mRNA product Design f-1 comprising derived and/or modified sequence from HRSV(A2)__F_DSCav1_mut7 (opt11)
gggagagcggcucggccauuuugucccagucaguccggaggcugcggcugcagaaguaccgccugcggaguaacugcaaagaagcuuaccauggaacuacucauacuuaaagccaacgcaauaaccacaauccucaccgccgucacauucugcuucgccucgggacaaaacauaaccgaagaauuuuaccagucuaccugcuccgccgucuccaaggguuaccucuccgcgcuccgcaccgggugguacaccagcguuaucaccaucgaacuaucuaacauaaaagaaaacaagugcaacggaaccgacgcaaaagucaaacucaucaaacaagaacuagacaaauacaagaaugccgucaccgaacuacaaaugcucaugugcuccacccccgccaccggauccggcuccgccauugccuccggcgucgccguaugcaaaguccuucacuuggaaggagaaguuaacaaaauaaaaagcgcccuccugucgaccaacaaagcgguggucagccucuccaacggcgucucuguccucaccuucaaaguccucgaccucaagaacuacauagauaaacaacuacuccccauccuaaacaaacagucaugcagcauauccaacaucgaaaccgucauggaguuccaacagaaaaacaaccgccuccuugaaaucacccgcgaguucucugucaacgccggcgucaccacccccgucuccaccuacaugcucacaaacuccgaacuccucagccucaucaacgacaugccaaucaccaacgaccaaaagaaacucauguccaacaacguacaaaucguucgucaacaaucauacucaaucaugugcaucauuaaagaagaaguccucgcauacgucguccaacucccccucuauggggucaucgacaccccaugcuggaaacuccacaccucuccccuaugcaccaccaacaccaaagaaggcuccaacaucugccuaacccgaaccgaccgcggaugguacugcgacaacgccggcuccgucuccuucuucccccaggccgaaacauguaaagucugcuccaaccguguguucugcgacaccaugaacucacuaacccuccccuccgaagucaaccucugcaacgucgacaucuucaacccgaaauacgacugcaaaauaaugaccagcaaaacagacguauccucuagcgucauuaccagccuaggugcaaucguguccugcuacggcaaaacaaaaugcaccgccuccaacaaaaauaaaggaaucauaaaaaccuucuccaacggcugcgacuacgucagcaacaaaggagucgacaccgucuccguaggaaauacucuauacuaugucaacaaacaagaggguaaaucccucuacgucaaaggcgaacccaucaucaacuucuacgacccccucgucuuccccucugacgaguucgacgccagcauaucacaaguaaacgaaaagaucaaccaaucccucgcauucauucgcaaauccgacgaacuccuacacaacgucaacgccggaaaauccaccaccaacaucaugaucacuacuaucauuaucgucaucaucgucauccuccucucccucaucgcagucggccuucuacucuacugcaaggcacgcucuacacccguaacccugucuaaagaccaacucuccggcaucaacaacaucgcuuucuccaacuaaggacuagugaagggaacacccaaauuuaauucagccuuaagcacaauuaauuaagagugaaacguaauuguacaagcaguuggucacccaccauagggcaugaucaacaccgcaaccuuuccuuuuucccccagugauucugaaaaaccccucuucccuucagcuugcuuagauguuccaaauuuaguaagcuuaaggcggccuacagaagaaaaagaaaaaaaaggccacaaaaguucccucucacuuucaguaaauaaaauaaaagcagcaacagaaauaaagaaauaaaugaaauucaaaaugaaauaaauauuguguugugcagcauuaaaaaaucaauaaaaauuaaaaaugagcaagaucuaaaaaaaaaaaaaaaaaaaaaaaaaaaaaaaaaaaaaaaaaaaaaaaaaaaaaaaaaaaaaaaaugcaucccccccccccccccccccccccccccccccaaaggcucuuuucagagccaccagaauu

SEQ ID NO: 7027 - RNA, 1973 nt, Artificial Sequence
  mRNA product Design f-2 comprising derived and/or modified sequence from HRSV(A2)__F_DSCav1_mut7 (opt1)
gggagagcggcucggccauuuugucccagucaguccggaggcugcggcugcagaaguaccgccugcggaguaacugcaaagaagcuuaccauggagcugcucauccugaaggccaacgccaucaccaccauccugacggcggugaccuucugcuucgccagcggccagaacaucaccgaggaguucuaccaguccacgugcagcgccgucuccaagggguaccucagcgcccugcggaccggcugguacaccuccgugaucaccaucgagcugagcaacaucaaggagaacaagugcaacgggaccgacgccaaggugaagcucaucaagcaggagcuggacaaguacaagaacgcggucacggagcugcagaugcugaugugcuccaccccggcaaccggcuccggcuccgccaucgcgagcggcgucgccgugugcaaggugcugcaccucgagggggaggucaacaagaucaagagcgcccugcuguccaccaacaaggccguggugagccucuccaacggcgucagcgugcugaccuucaaggugcuggaccucaagaacuacaucgacaagcagcugcugcccauccugaacaagcagagcugcuccaucagcaacaucgagacggugauggaguuccagcagaagaacaaccggcuccuggagaucacccgcgaguucagcgugaacgccggggucaccacccccguguccacguacaugcugaccaacagcgagcuccugucccugaucaacgacaugccgaucaccaacgaccagaagaagcucaugagcaacaacgugcagaucguccggcagcaguccuacagcaucaugugcaucaucaaggaggaggugcuggcguacgugguccagcugccccucuacggcgugaucgacacccccugcuggaagcugcacacgagcccccugugcaccaccaacaccaaggagggguccaacaucugccucacgcgcaccgaccggggcugguacugcgacaacgccggcagcgucuccuucuucccgcaggccgagaccugcaaggugugcagcaaccgcguguucugcgacaccaugaacucccugacgcugcccagcgagguaaaccucugcaacgucgacaucuucaaccccaaguacgacugcaagaucaugaccuccaagaccgacgugagcuccagcgugaucaccucccugggggccaucgucagcugcuacggcaagacgaagugcaccgccagcaacaagaacaaggggaucaucaagaccuucuccaacggcugcgacuacgugagcaacaagggcguggacaccguguccgucgggaacacccuguacuacgugaacaagcaggagggcaagagccucuacgugaagggggagcccaucaucaacuucuacgacccgcuggucuuccccuccgacgaguucgacgcgagcaucucccaggugaacgagaagaucaaccagagccuggccuucauccgcaaguccgacgagcugcuccacaacgugaacgccggcaagagcacgaccaacaucaugaucaccaccaucaucaucgucaucaucgugauccugcugucccucaucgccguggggcugcugcucuacugcaaggcccggagcacgcccgucacccuguccaaggaccagcugagcggcaucaacaacaucgcguucuccaacugaggacuaguggaagcauuuuccuggcugauuaaaagaaauuacucagcuauggucaucuguuccuguuagaaggcuaugcagcauauuauauacuaugcgcauguuaugaaaugcauaauaaaaaauuuuaaaaaaucuaaaagaucuaaaaaaaaaaaaaaaaaaaaaaaaaaaaaaaaaaaaaaaaaaaaaaaaaaaaaaaaaaaaaaaaugcaucccccccccccccccccccccccccccccccaaaggcucuuuucagagccaccagaauu

SEQ ID NO: 7028 - RNA, 1973 nt, Artificial Sequence
  mRNA product Design f-2 comprising derived and/or modified sequence from HRSV(A2)__F_DSCav1_mut7 (opt1)
gggagagcggcucggccauuuugucccagucaguccggaggcugcggcugcagaaguaccgccugcggaguaacugcaaagaagcuuaccauggagcugcucauccugaaggccaacgccaucaccaccauccugacggcggugaccuucugcuucgccagcggccagaacaucaccgaggaguucuaccaguccacgugcagcgccgucuccaagggguaccucagcgcccugcgcaccggcugguacaccuccgugaucaccaucgagcugagcaacaucaaggagaacaagugcaacgggaccgacgccaaggugaagcucaucaagcaggagcuggacaaguacaagaacgcggucacggagcugcagaugcucaugugcuccacccccgccaccggcagcggguccgccaucgccagcggcguggcggugugcaagguccugcaccuggagggcgaggugaacaagaucaaguccgcccuccugagcaccaacaaggccguggucucccugagcaacgggguguccgugcucacguucaagguccuggaccugaagaacuacaucgacaagcagcuccugccgauccugaacaagcagagcugcuccaucagcaacaucgagaccgugauggaguuccagcagaagaacaaccggcuccuggagaucacccgcgaguucuccgugaacgccggcgucaccacgcccgugagcaccuacaugcugaccaacagcgagcuccugucccugaucaacgacaugcccaucaccaacgaccagaagaagcucaugagcaacaacgugcagaucguccggcagcaguccuacagcaucaugugcaucaucaaggaggaggugcuggccuacgugguccagcugccccucuacggggugaucgacacgccgugcuggaagcugcacaccagcccccugugcaccaccaacacgaaggagggcagcaacaucugccucacccgcaccgaccgggggugguacugcgacaacgcgggcuccgugagcuucuucccccaggccgagaccugcaaggucugcuccaaccgcguguucugcgacacgaugaacagccugacccugcccuccgaggucaaccucugcaacguggacaucuucaacccgaaguacgacugcaagaucaugaccagcaagaccgacguguccagcuccgucaucacgagccugggcgccaucguguccugcuacgggaagaccaagugcaccgccagcaacaagaacaagggcaucaucaagaccuucuccaacgggugcgacuacgugagcaacaagggcgucgacacggugagcgugggcaacacccuguacuacgucaacaagcaggaggggaagucccucuacgugaagggcgagcccaucaucaacuucuacgacccccugguguuccccagcgacgaguucgacgccuccaucagccaggucaacgagaagaucaaccagucccuggcguucauccggaaguccgacgagcuccugcacaacgugaacgccgggaaguccaccaccaacaucaugaucaccacgaucaucaucgugaucaucgucauccugcucagccugaucgccgugggccugcuccuguacugcaaggcccgcuccaccccggugacccugagcaaggaccagcuguccgggaucaacaacaucgccuucagcaacugaggacuaguggaagcauuuuccuggcugauuaaaagaaauuacucagcuauggucaucuguuccuguuagaaggcuaugcagcauauuauauacuaugcgcauguuaugaaaugcauaauaaaaaauuuuaaaaaaucuaaaagaucuaaaaaaaaaaaaaaaaaaaaaaaaaaaaaaaaaaaaaaaaaaaaaaaaaaaaaaaaaaaaaaaaugcaucccccccccccccccccccccccccccccccaaaggcucuuuucagagccaccagaauu

SEQ ID NO: 7029 - RNA, 1973 nt, Artificial Sequence
  mRNA product Design f-2 comprising derived and/or modified sequence from HRSV(A2)__F_DSCav1_mut7 (opt2)
gggagagcggcucggccauuuugucccagucaguccggaggcugcggcugcagaaguaccgccugcggaguaacugcaaagaagcuuaccauggagcuccucauccucaaggccaacgccaucaccaccauccucaccgccgucaccuucugcuucgccuccggccagaacaucaccgaggaguucuaccaguccaccugcuccgccgucuccaagggcuaccucuccgcccuccgcaccggcugguacaccuccgucaucaccaucgagcucuccaacaucaaggagaacaagugcaacggcaccgacgccaaggucaagcucaucaagcaggagcucgacaaguacaagaacgccgucaccgagcuccagaugcucaugugcuccacccccgccaccggcuccggcuccgccaucgccuccggcgucgccgucugcaagguccuccaccucgagggcgaggucaacaagaucaaguccgcccuccucuccaccaacaaggccgucgucucccucuccaacggcgucuccguccucaccuucaagguccucgaccucaagaacuacaucgacaagcagcuccuccccauccucaacaagcaguccugcuccaucuccaacaucgagaccgucauggaguuccagcagaagaacaaccgccuccucgagaucacccgcgaguucuccgucaacgccggcgucaccacccccgucuccaccuacaugcucaccaacuccgagcuccucucccucaucaacgacaugcccaucaccaacgaccagaagaagcucauguccaacaacguccagaucguccgccagcaguccuacuccaucaugugcaucaucaaggaggagguccucgccuacgucguccagcucccccucuacggcgucaucgacacccccugcuggaagcuccacaccuccccccucugcaccaccaacaccaaggagggcuccaacaucugccucacccgcaccgaccgcggcugguacugcgacaacgccggcuccgucuccuucuucccccaggccgagaccugcaaggucugcuccaaccgcgucuucugcgacaccaugaacucccucacccuccccuccgaggucaaccucugcaacgucgacaucuucaaccccaaguacgacugcaagaucaugaccuccaagaccgacgucuccuccuccgucaucaccucccucggcgccaucgucuccugcuacggcaagaccaagugcaccgccuccaacaagaacaagggcaucaucaagaccuucuccaacggcugcgacuacgucuccaacaagggcgucgacaccgucuccgucggcaacacccucuacuacgucaacaagcaggagggcaagucccucuacgucaagggcgagcccaucaucaacuucuacgacccccucgucuuccccuccgacgaguucgacgccuccaucucccaggucaacgagaagaucaaccagucccucgccuucauccgcaaguccgacgagcuccuccacaacgucaacgccggcaaguccaccaccaacaucaugaucaccaccaucaucaucgucaucaucgucauccuccucucccucaucgccgucggccuccuccucuacugcaaggcccgcuccacccccgucacccucuccaaggaccagcucuccggcaucaacaacaucgccuucuccaacugaggacuaguggaagcauuuuccuggcugauuaaaagaaauuacucagcuauggucaucuguuccuguuagaaggcuaugcagcauauuauauacuaugcgcauguuaugaaaugcauaauaaaaaauuuuaaaaaaucuaaaagaucuaaaaaaaaaaaaaaaaaaaaaaaaaaaaaaaaaaaaaaaaaaaaaaaaaaaaaaaaaaaaaaaaugcaucccccccccccccccccccccccccccccccaaaggcucuuuucagagccaccagaauu

SEQ ID NO: 7030 - RNA, 1973 nt, Artificial Sequence
  mRNA product Design f-2 comprising derived and/or modified sequence from HRSV(A2)__F_DSCav1_mut7 (opt3)
gggagagcggcucggccauuuugucccagucaguccggaggcugcggcugcagaaguaccgccugcggaguaacugcaaagaagcuuaccauggagcugcucauccuuaaggccaacgcuauuaccacaauacugacugcagugacguucugcuuugccagcggccagaauaucaccgaagaguucuaccaauccacauguucugcggucucaaaaggguauuugagugcuuuaagaacuggaugguacaccagcguuauuacaaucgaacuguccaacauuaaggagaauaaaugcaacgguaccgacgccaaggugaaacuaaucaagcaggaacucgauaaguauaaaaaugcaguaacugagcugcagaugcuuauguguucuacacccgccaccggcucggggucagcuauagcaagcggaguggccgucugcaaggugcugcacuuggagggcgaaguuaacaaaaucaagagugcucuccuguccacgaauaaagccguggucucucugagcaacgguguguccguacucacuuuuaagguuuuagaccugaagaauuacauugauaaacagcuuuugccuauccugaacaagcaaucauguaguauuagcaauaucgagaccgugauggaguuccagcagaaaaacaauaggcuacucgaaauaacacgggaguuuucugucaacgcgggggugacuaccccaguguccacauauaugcugaccaauucagaacuucugagcuugauuaacgacaugccgaucacgaacgaucagaagaaacucaugaguaauaacguccaaauuguucgccagcagucuuacuccaucaugugcaucauuaaggaggaagugcuggcauauguagugcaguuaccccuguacggagucauagacacuccuuguuggaaacuccauacaagcccacuuugcaccacuaauacaaaggagggcucgaacaucugucugacccgaacggaucguggcugguacugcgacaaugccgggucuguguccuucuuuccccaagcugaaaccuguaagguuugcucaaacagaguguucugcgauacaaugaauaguuugacucuaccuagcgaggucaaccuguguaauguggacauuuuuaacccaaaauaugauugcaagaucaugaccuccaaaacagacguaucuagcucaguuauaacuagccucggagccauuguguccuguuacgguaagaccaaaugcacagcaagcaauaagaacaagggcaucaucaaaaccuucucuaaugggugugauuaugucucaaacaagggaguggacacugucagugugggcaauacgcuguacuauguuaacaaacaggaggguaagagccuuuacgugaaaggggaacccauuaucaacuuuuaugacccucugguauucccauccgaugaguuugacgcuucuauuucgcaggucaaugaaaagauaaaccaaaguuuggccuucaucaggaaguccgaugagcuccugcacaaugugaacgcgggaaaaucaacaaccaauauuaugaucacuaccaucauuauaguuaucauugugaucuuacugagucuaauugccgucggccuccugcuuuacugcaaggcacggucuacaccggugaccuugagcaaagaccagcuguccggcaucaacaauauagcuuucucaaacugaggacuaguggaagcauuuuccuggcugauuaaaagaaauuacucagcuauggucaucuguuccuguuagaaggcuaugcagcauauuauauacuaugcgcauguuaugaaaugcauaauaaaaaauuuuaaaaaaucuaaaagaucuaaaaaaaaaaaaaaaaaaaaaaaaaaaaaaaaaaaaaaaaaaaaaaaaaaaaaaaaaaaaaaaaugcaucccccccccccccccccccccccccccccccaaaggcucuuuucagagccaccagaauu

SEQ ID NO: 7031 - RNA, 1973 nt, Artificial Sequence
  mRNA product Design f-2 comprising derived and/or modified sequence from HRSV(A2)__F_DSCav1_mut7 (opt4)
gggagagcggcucggccauuuugucccagucaguccggaggcugcggcugcagaaguaccgccugcggaguaacugcaaagaagcuuaccauggagcugcugauccugaaggccaacgccaucaccaccauccugaccgccgugaccuucugcuucgccagcggccagaacaucaccgaggaguucuaccagagcaccugcagcgccgugagcaagggcuaccugagcgcccugagaaccggcugguacaccagcgugaucaccaucgagcugagcaacaucaaggagaacaagugcaacggcaccgacgccaaggugaagcugaucaagcaggagcuggacaaguacaagaacgccgugaccgagcugcagaugcugaugugcagcacccccgccaccggcagcggcagcgccaucgccagcggcguggccgugugcaaggugcugcaccuggagggcgaggugaacaagaucaagagcgcccugcugagcaccaacaaggccguggugagccugagcaacggcgugagcgugcugaccuucaaggugcuggaccugaagaacuacaucgacaagcagcugcugcccauccugaacaagcagagcugcagcaucagcaacaucgagaccgugauggaguuccagcagaagaacaacagacugcuggagaucaccagagaguucagcgugaacgccggcgugaccacccccgugagcaccuacaugcugaccaacagcgagcugcugagccugaucaacgacaugcccaucaccaacgaccagaagaagcugaugagcaacaacgugcagaucgugagacagcagagcuacagcaucaugugcaucaucaaggaggaggugcuggccuacguggugcagcugccccuguacggcgugaucgacacccccugcuggaagcugcacaccagcccccugugcaccaccaacaccaaggagggcagcaacaucugccugaccagaaccgacagaggcugguacugcgacaacgccggcagcgugagcuucuucccccaggccgagaccugcaaggugugcagcaacagaguguucugcgacaccaugaacagccugacccugcccagcgaggugaaccugugcaacguggacaucuucaaccccaaguacgacugcaagaucaugaccagcaagaccgacgugagcagcagcgugaucaccagccugggcgccaucgugagcugcuacggcaagaccaagugcaccgccagcaacaagaacaagggcaucaucaagaccuucagcaacggcugcgacuacgugagcaacaagggcguggacaccgugagcgugggcaacacccuguacuacgugaacaagcaggagggcaagagccuguacgugaagggcgagcccaucaucaacuucuacgacccccugguguuccccagcgacgaguucgacgccagcaucagccaggugaacgagaagaucaaccagagccuggccuucaucagaaagagcgacgagcugcugcacaacgugaacgccggcaagagcaccaccaacaucaugaucaccaccaucaucaucgugaucaucgugauccugcugagccugaucgccgugggccugcugcuguacugcaaggccagaagcacccccgugacccugagcaaggaccagcugagcggcaucaacaacaucgccuucagcaacugaggacuaguggaagcauuuuccuggcugauuaaaagaaauuacucagcuauggucaucuguuccuguuagaaggcuaugcagcauauuauauacuaugcgcauguuaugaaaugcauaauaaaaaauuuuaaaaaaucuaaaagaucuaaaaaaaaaaaaaaaaaaaaaaaaaaaaaaaaaaaaaaaaaaaaaaaaaaaaaaaaaaaaaaaaugcaucccccccccccccccccccccccccccccccaaaggcucuuuucagagccaccagaauu

SEQ ID NO: 7032 - RNA, 1973 nt, Artificial Sequence
  mRNA product Design f-2 comprising derived and/or modified sequence from HRSV(A2)__F_DSCav1_mut7 (opt5)
gggagagcggcucggccauuuugucccagucaguccggaggcugcggcugcagaaguaccgccugcggaguaacugcaaagaagcuuaccauggagcugcucauccugaaggccaacgcuauuaccacaauccuuacggccgugaccuucugcuuugcgagcggccagaauauuacagaagaguucuaccaauccaccuguucugcugucagcaaaggguaucuguccgcccucagaacaggaugguacaccucuguuaucacaauugaacugagcaacaucaaggagaauaaaugcaacggcaccgacgccaaggugaaacuuaucaagcaggaacuggauaaguauaaaaaugcugugacggagcuccagaugcugauguguuccacccccgccacagggucuggaagcgcuauugccuccggcgucgcggugugcaagguucugcaccucgagggggaagugaacaaaaucaagagcgcccugcuuucuaccaauaaagcugucgugucccugagcaacggaguuucugugcucacauuuaagguccuggaccuuaagaauuacauugauaaacagcugcucccuauccugaacaagcaauccuguagcauuucuaauaucgagaccgugauggaguuccagcagaaaaacaaucggcugcucgaaauuacgcgcgaguuuuccgugaacgccggcgucacaaccccgguuagcacauauaugcugaccaauuccgaacuucugucucucaucaacgacaugcccaucaccaacgaucagaagaaacugaugagcaauaacgugcaaauugugagacagcaguccuacagcaucaugugcauuaucaaggaggaaguccuugcuuaugugguucagcugccucucuacggcgugauugacacacccuguuggaaacugcauacgucuccucugugcaccacaaauaccaaggagggguccaacaucugucucacacggaccgaucgcggaugguacugcgacaaugccggcagcgucucuuucuuuccccaagcggaaacguguaaggugugcagcaacagaguuuucugcgauacaaugaacucccugacccuuccuucugaggugaaucuguguaaugucgacaucuuuaacccgaaauaugauugcaagauuaugaccagcaaaacagacguguccagcucugucaucaccucccucggggccauugugagcuguuacggaaagacaaaaugcacggcuucuaauaagaacaagggcaucauuaaaaccuucuccaaugggugugauuauguuagcaacaagggaguggacacagucuccgugggcaauacccuguacuauguuaacaaacaggagggcaagucucuuuacgugaaaggggaacccaucaucaacuuuuaugacccucuggucuuccccagcgaugaguuugacgccuccauuucucaggugaaugaaaagaucaaccaaagccucgcuuucauucggaaguccgaugagcugcugcacaaugugaacgccggaaaaagcacaaccaauaucaugauuacgaccaucauuaucguuaucauugucauccuccugucucuuauugccgugggccugcuccuguacugcaaggcucgcuccacaccugugacccugagcaaagaccagcuuucugggaucaacaauauugcguucuccaacugaggacuaguggaagcauuuuccuggcugauuaaaagaaauuacucagcuauggucaucuguuccuguuagaaggcuaugcagcauauuauauacuaugcgcauguuaugaaaugcauaauaaaaaauuuuaaaaaaucuaaaagaucuaaaaaaaaaaaaaaaaaaaaaaaaaaaaaaaaaaaaaaaaaaaaaaaaaaaaaaaaaaaaaaaaugcaucccccccccccccccccccccccccccccccaaaggcucuuuucagagccaccagaauu

SEQ ID NO: 7033 - RNA, 1973 nt, Artificial Sequence
  mRNA product Design f-2 comprising derived and/or modified sequence from HRSV(A2)__F_DSCav1_mut7 (opt6)
gggagagcggcucggccauuuugucccagucaguccggaggcugcggcugcagaaguaccgccugcggaguaacugcaaagaagcuuaccauggaauuacucauacucaaagcaaaugcaauuaccacuauacucacagcuguaacuuuuuguuucgccucaggacaaaacaucacagaagaauuuuaucaauccacaugcucugccguaucaaaaggcuaccuaucugcccuaagaacagguugguacacaucuguaauaacaaucgaauuauccaacaucaaagaaaacaaaugcaacggcacagacgcaaaagucaaacucaucaaacaagaauuagauaaauauaaaaacgcaguaacagaacuacaaaugcuaaugugcucuacacccgccacaggaucaggauccgcaaucgcuucuggaguagccguuugcaaaguauuacaccuagaaggagaaguaaauaaaauaaaauccgcacuacuaucaacuaauaaagcaguaguaucacuuucuaaugguguaucaguauuaacauucaaaguccucgaccuaaaaaauuacaucgacaaacaacuauuacccauccuuaauaaacaaucaugcuccauaucaaacauagaaacugucauggaauuucaacaaaaaaacaauagacuucuagaaaucacaagagaauuuucuguaaaugcaggaguaacuacaccaguaucaacauauauguuaaccaacuccgaacuacuaucacucauaaacgacaugccaauaacaaacgaccaaaaaaaacuaaugucaaauaacguucaaauaguaagacaacaaucauacucaaucaugugcauaauaaaagaagaaguuuuagcauacgucguacaacuuccccuauacggaguaauagacaccccuugcuggaaacuccacaccucaccacuaugcacuacaaacacaaaagaagguuccaacaucugcuuaacaagaaccgaucgaggaugguacugcgacaacgcugguuccguaucuuucuucccacaagcagaaacaugcaaaguaugcuccaauagaguauucugcgacaccaugaacucacuaacucuaccauccgaaguaaaccuaugcaacgucgacauauuuaauccaaaauaugacugcaaaauaaugacuucaaaaacagacguauccucaucaguaauaacauccuuaggagcaauaguaucauguuacggcaagacaaaauguacagccucaaacaaaaacaaagguaucauuaaaaccuucuccaacggcugcgacuacguaucaaauaaaggugucgauacaguaucaguaggaaacacacucuauuacguuaauaaacaagaaggaaagucauuauacguaaaaggagaaccaauaaucaauuucuacgauccccuagucuuucccucagaugaauuugacgcaagcaucucucaagucaacgaaaaaauaaaccaaucccuagccuucauaagaaaaucagaugaacuacuucauaacgucaacgccggaaaaucaacaaccaacauaaugaucacuacaaucauaauuguaauuauaguaauacuacuaucgcuaauugccguuggacuacuacuauauuguaaagcaagaucaacacccguuacucuauccaaagaucaauuaucaggaaucaacaacauagccuucucaaauuaaggacuaguggaagcauuuuccuggcugauuaaaagaaauuacucagcuauggucaucuguuccuguuagaaggcuaugcagcauauuauauacuaugcgcauguuaugaaaugcauaauaaaaaauuuuaaaaaaucuaaaagaucuaaaaaaaaaaaaaaaaaaaaaaaaaaaaaaaaaaaaaaaaaaaaaaaaaaaaaaaaaaaaaaaaugcaucccccccccccccccccccccccccccccccaaaggcucuuuucagagccaccagaauu

SEQ ID NO: 7034 - RNA, 1973 nt, Artificial Sequence
  mRNA product Design f-2 comprising derived and/or modified sequence from HRSV(A2)__F_DSCav1_mut7 (opt11)
gggagagcggcucggccauuuugucccagucaguccggaggcugcggcugcagaaguaccgccugcggaguaacugcaaagaagcuuaccauggaacuacucauacuuaaagccaacgcaauaaccacaauccucaccgccgucacauucugcuucgccucgggacaaaacauaaccgaagaauuuuaccagucuaccugcuccgccgucuccaaggguuaccucuccgcgcuccgcaccgggugguacaccagcguuaucaccaucgaacuaucuaacauaaaagaaaacaagugcaacggaaccgacgcaaaagucaaacucaucaaacaagaacuagacaaauacaagaaugccgucaccgaacuacaaaugcucaugugcuccacccccgccaccggauccggcuccgccauugccuccggcgucgccguaugcaaaguccuucacuuggaaggagaaguuaacaaaauaaaaagcgcccuccugucgaccaacaaagcgguggucagccucuccaacggcgucucuguccucaccuucaaaguccucgaccucaagaacuacauagauaaacaacuacuccccauccuaaacaaacagucaugcagcauauccaacaucgaaaccgucauggaguuccaacagaaaaacaaccgccuccuugaaaucacccgcgaguucucugucaacgccggcgucaccacccccgucuccaccuacaugcucacaaacuccgaacuccucagccucaucaacgacaugccaaucaccaacgaccaaaagaaacucauguccaacaacguacaaaucguucgucaacaaucauacucaaucaugugcaucauuaaagaagaaguccucgcauacgucguccaacucccccucuauggggucaucgacaccccaugcuggaaacuccacaccucuccccuaugcaccaccaacaccaaagaaggcuccaacaucugccuaacccgaaccgaccgcggaugguacugcgacaacgccggcuccgucuccuucuucccccaggccgaaacauguaaagucugcuccaaccguguguucugcgacaccaugaacucacuaacccuccccuccgaagucaaccucugcaacgucgacaucuucaacccgaaauacgacugcaaaauaaugaccagcaaaacagacguauccucuagcgucauuaccagccuaggugcaaucguguccugcuacggcaaaacaaaaugcaccgccuccaacaaaaauaaaggaaucauaaaaaccuucuccaacggcugcgacuacgucagcaacaaaggagucgacaccgucuccguaggaaauacucuauacuaugucaacaaacaagaggguaaaucccucuacgucaaaggcgaacccaucaucaacuucuacgacccccucgucuuccccucugacgaguucgacgccagcauaucacaaguaaacgaaaagaucaaccaaucccucgcauucauucgcaaauccgacgaacuccuacacaacgucaacgccggaaaauccaccaccaacaucaugaucacuacuaucauuaucgucaucaucgucauccuccucucccucaucgcagucggccuucuacucuacugcaaggcacgcucuacacccguaacccugucuaaagaccaacucuccggcaucaacaacaucgcuuucuccaacuaaggacuaguggaagcauuuuccuggcugauuaaaagaaauuacucagcuauggucaucuguuccuguuagaaggcuaugcagcauauuauauacuaugcgcauguuaugaaaugcauaauaaaaaauuuuaaaaaaucuaaaagaucuaaaaaaaaaaaaaaaaaaaaaaaaaaaaaaaaaaaaaaaaaaaaaaaaaaaaaaaaaaaaaaaaugcaucccccccccccccccccccccccccccccccaaaggcucuuuucagagccaccagaauu

SEQ ID NO: 7035 - RNA, 1964 nt, Artificial Sequence
  mRNA product Design f-3 comprising derived and/or modified sequence from HRSV(A2)__F_DSCav1_mut7 (opt1)
gggagagucccgcagucggcguccagcggcucugcuuguucgugugugugucguugcaggccuuauucaagcuuaccauggagcugcucauccugaaggccaacgccaucaccaccauccugacggcggugaccuucugcuucgccagcggccagaacaucaccgaggaguucuaccaguccacgugcagcgccgucuccaagggguaccucagcgcccugcggaccggcugguacaccuccgugaucaccaucgagcugagcaacaucaaggagaacaagugcaacgggaccgacgccaaggugaagcucaucaagcaggagcuggacaaguacaagaacgcggucacggagcugcagaugcugaugugcuccaccccggcaaccggcuccggcuccgccaucgcgagcggcgucgccgugugcaaggugcugcaccucgagggggaggucaacaagaucaagagcgcccugcuguccaccaacaaggccguggugagccucuccaacggcgucagcgugcugaccuucaaggugcuggaccucaagaacuacaucgacaagcagcugcugcccauccugaacaagcagagcugcuccaucagcaacaucgagacggugauggaguuccagcagaagaacaaccggcuccuggagaucacccgcgaguucagcgugaacgccggggucaccacccccguguccacguacaugcugaccaacagcgagcuccugucccugaucaacgacaugccgaucaccaacgaccagaagaagcucaugagcaacaacgugcagaucguccggcagcaguccuacagcaucaugugcaucaucaaggaggaggugcuggcguacgugguccagcugccccucuacggcgugaucgacacccccugcuggaagcugcacacgagcccccugugcaccaccaacaccaaggagggguccaacaucugccucacgcgcaccgaccggggcugguacugcgacaacgccggcagcgucuccuucuucccgcaggccgagaccugcaaggugugcagcaaccgcguguucugcgacaccaugaacucccugacgcugcccagcgagguaaaccucugcaacgucgacaucuucaaccccaaguacgacugcaagaucaugaccuccaagaccgacgugagcuccagcgugaucaccucccugggggccaucgucagcugcuacggcaagacgaagugcaccgccagcaacaagaacaaggggaucaucaagaccuucuccaacggcugcgacuacgugagcaacaagggcguggacaccguguccgucgggaacacccuguacuacgugaacaagcaggagggcaagagccucuacgugaagggggagcccaucaucaacuucuacgacccgcuggucuuccccuccgacgaguucgacgcgagcaucucccaggugaacgagaagaucaaccagagccuggccuucauccgcaaguccgacgagcugcuccacaacgugaacgccggcaagagcacgaccaacaucaugaucaccaccaucaucaucgucaucaucgugauccugcugucccucaucgccguggggcugcugcucuacugcaaggcccggagcacgcccgucacccuguccaaggaccagcugagcggcaucaacaacaucgcguucuccaacugaggacuaguacuggcugcaucucccuuuccucuguccuccauccuucucccaggauggugaagggggaccugguacccagugauccccaccccaggauccuaaaucaugacuuaccugcuaauaaaaacucauuggaaaagugagaagaucuaaaaaaaaaaaaaaaaaaaaaaaaaaaaaaaaaaaaaaaaaaaaaaaaaaaaaaaaaaaaaaaaugcaucccccccccccccccccccccccccccccccaaaggcucuuuucagagccaccagaauu

SEQ ID NO: 7036 - RNA, 1964 nt, Artificial Sequence
  mRNA product Design f-3 comprising derived and/or modified sequence from HRSV(A2)__F_DSCav1_mut7 (opt1)
gggagagucccgcagucggcguccagcggcucugcuuguucgugugugugucguugcaggccuuauucaagcuuaccauggagcugcucauccugaaggccaacgccaucaccaccauccugacggcggugaccuucugcuucgccagcggccagaacaucaccgaggaguucuaccaguccacgugcagcgccgucuccaagggguaccucagcgcccugcgcaccggcugguacaccuccgugaucaccaucgagcugagcaacaucaaggagaacaagugcaacgggaccgacgccaaggugaagcucaucaagcaggagcuggacaaguacaagaacgcggucacggagcugcagaugcucaugugcuccacccccgccaccggcagcggguccgccaucgccagcggcguggcggugugcaagguccugcaccuggagggcgaggugaacaagaucaaguccgcccuccugagcaccaacaaggccguggucucccugagcaacgggguguccgugcucacguucaagguccuggaccugaagaacuacaucgacaagcagcuccugccgauccugaacaagcagagcugcuccaucagcaacaucgagaccgugauggaguuccagcagaagaacaaccggcuccuggagaucacccgcgaguucuccgugaacgccggcgucaccacgcccgugagcaccuacaugcugaccaacagcgagcuccugucccugaucaacgacaugcccaucaccaacgaccagaagaagcucaugagcaacaacgugcagaucguccggcagcaguccuacagcaucaugugcaucaucaaggaggaggugcuggccuacgugguccagcugccccucuacggggugaucgacacgccgugcuggaagcugcacaccagcccccugugcaccaccaacacgaaggagggcagcaacaucugccucacccgcaccgaccgggggugguacugcgacaacgcgggcuccgugagcuucuucccccaggccgagaccugcaaggucugcuccaaccgcguguucugcgacacgaugaacagccugacccugcccuccgaggucaaccucugcaacguggacaucuucaacccgaaguacgacugcaagaucaugaccagcaagaccgacguguccagcuccgucaucacgagccugggcgccaucguguccugcuacgggaagaccaagugcaccgccagcaacaagaacaagggcaucaucaagaccuucuccaacgggugcgacuacgugagcaacaagggcgucgacacggugagcgugggcaacacccuguacuacgucaacaagcaggaggggaagucccucuacgugaagggcgagcccaucaucaacuucuacgacccccugguguuccccagcgacgaguucgacgccuccaucagccaggucaacgagaagaucaaccagucccuggcguucauccggaaguccgacgagcuccugcacaacgugaacgccgggaaguccaccaccaacaucaugaucaccacgaucaucaucgugaucaucgucauccugcucagccugaucgccgugggccugcuccuguacugcaaggcccgcuccaccccggugacccugagcaaggaccagcuguccgggaucaacaacaucgccuucagcaacugaggacuaguacuggcugcaucucccuuuccucuguccuccauccuucucccaggauggugaagggggaccugguacccagugauccccaccccaggauccuaaaucaugacuuaccugcuaauaaaaacucauuggaaaagugagaagaucuaaaaaaaaaaaaaaaaaaaaaaaaaaaaaaaaaaaaaaaaaaaaaaaaaaaaaaaaaaaaaaaaugcaucccccccccccccccccccccccccccccccaaaggcucuuuucagagccaccagaauu

SEQ ID NO: 7037 - RNA, 1964 nt, Artificial Sequence
  mRNA product Design f-3 comprising derived and/or modified sequence from HRSV(A2)__F_DSCav1_mut7 (opt2)
gggagagucccgcagucggcguccagcggcucugcuuguucgugugugugucguugcaggccuuauucaagcuuaccauggagcuccucauccucaaggccaacgccaucaccaccauccucaccgccgucaccuucugcuucgccuccggccagaacaucaccgaggaguucuaccaguccaccugcuccgccgucuccaagggcuaccucuccgcccuccgcaccggcugguacaccuccgucaucaccaucgagcucuccaacaucaaggagaacaagugcaacggcaccgacgccaaggucaagcucaucaagcaggagcucgacaaguacaagaacgccgucaccgagcuccagaugcucaugugcuccacccccgccaccggcuccggcuccgccaucgccuccggcgucgccgucugcaagguccuccaccucgagggcgaggucaacaagaucaaguccgcccuccucuccaccaacaaggccgucgucucccucuccaacggcgucuccguccucaccuucaagguccucgaccucaagaacuacaucgacaagcagcuccuccccauccucaacaagcaguccugcuccaucuccaacaucgagaccgucauggaguuccagcagaagaacaaccgccuccucgagaucacccgcgaguucuccgucaacgccggcgucaccacccccgucuccaccuacaugcucaccaacuccgagcuccucucccucaucaacgacaugcccaucaccaacgaccagaagaagcucauguccaacaacguccagaucguccgccagcaguccuacuccaucaugugcaucaucaaggaggagguccucgccuacgucguccagcucccccucuacggcgucaucgacacccccugcuggaagcuccacaccuccccccucugcaccaccaacaccaaggagggcuccaacaucugccucacccgcaccgaccgcggcugguacugcgacaacgccggcuccgucuccuucuucccccaggccgagaccugcaaggucugcuccaaccgcgucuucugcgacaccaugaacucccucacccuccccuccgaggucaaccucugcaacgucgacaucuucaaccccaaguacgacugcaagaucaugaccuccaagaccgacgucuccuccuccgucaucaccucccucggcgccaucgucuccugcuacggcaagaccaagugcaccgccuccaacaagaacaagggcaucaucaagaccuucuccaacggcugcgacuacgucuccaacaagggcgucgacaccgucuccgucggcaacacccucuacuacgucaacaagcaggagggcaagucccucuacgucaagggcgagcccaucaucaacuucuacgacccccucgucuuccccuccgacgaguucgacgccuccaucucccaggucaacgagaagaucaaccagucccucgccuucauccgcaaguccgacgagcuccuccacaacgucaacgccggcaaguccaccaccaacaucaugaucaccaccaucaucaucgucaucaucgucauccuccucucccucaucgccgucggccuccuccucuacugcaaggcccgcuccacccccgucacccucuccaaggaccagcucuccggcaucaacaacaucgccuucuccaacugaggacuaguacuggcugcaucucccuuuccucuguccuccauccuucucccaggauggugaagggggaccugguacccagugauccccaccccaggauccuaaaucaugacuuaccugcuaauaaaaacucauuggaaaagugagaagaucuaaaaaaaaaaaaaaaaaaaaaaaaaaaaaaaaaaaaaaaaaaaaaaaaaaaaaaaaaaaaaaaaugcaucccccccccccccccccccccccccccccccaaaggcucuuuucagagccaccagaauu

SEQ ID NO: 7038 - RNA, 1964 nt, Artificial Sequence
  mRNA product Design f-3 comprising derived and/or modified sequence from HRSV(A2)__F_DSCav1_mut7 (opt3)
gggagagucccgcagucggcguccagcggcucugcuuguucgugugugugucguugcaggccuuauucaagcuuaccauggagcugcucauccuuaaggccaacgcuauuaccacaauacugacugcagugacguucugcuuugccagcggccagaauaucaccgaagaguucuaccaauccacauguucugcggucucaaaaggguauuugagugcuuuaagaacuggaugguacaccagcguuauuacaaucgaacuguccaacauuaaggagaauaaaugcaacgguaccgacgccaaggugaaacuaaucaagcaggaacucgauaaguauaaaaaugcaguaacugagcugcagaugcuuauguguucuacacccgccaccggcucggggucagcuauagcaagcggaguggccgucugcaaggugcugcacuuggagggcgaaguuaacaaaaucaagagugcucuccuguccacgaauaaagccguggucucucugagcaacgguguguccguacucacuuuuaagguuuuagaccugaagaauuacauugauaaacagcuuuugccuauccugaacaagcaaucauguaguauuagcaauaucgagaccgugauggaguuccagcagaaaaacaauaggcuacucgaaauaacacgggaguuuucugucaacgcgggggugacuaccccaguguccacauauaugcugaccaauucagaacuucugagcuugauuaacgacaugccgaucacgaacgaucagaagaaacucaugaguaauaacguccaaauuguucgccagcagucuuacuccaucaugugcaucauuaaggaggaagugcuggcauauguagugcaguuaccccuguacggagucauagacacuccuuguuggaaacuccauacaagcccacuuugcaccacuaauacaaaggagggcucgaacaucugucugacccgaacggaucguggcugguacugcgacaaugccgggucuguguccuucuuuccccaagcugaaaccuguaagguuugcucaaacagaguguucugcgauacaaugaauaguuugacucuaccuagcgaggucaaccuguguaauguggacauuuuuaacccaaaauaugauugcaagaucaugaccuccaaaacagacguaucuagcucaguuauaacuagccucggagccauuguguccuguuacgguaagaccaaaugcacagcaagcaauaagaacaagggcaucaucaaaaccuucucuaaugggugugauuaugucucaaacaagggaguggacacugucagugugggcaauacgcuguacuauguuaacaaacaggaggguaagagccuuuacgugaaaggggaacccauuaucaacuuuuaugacccucugguauucccauccgaugaguuugacgcuucuauuucgcaggucaaugaaaagauaaaccaaaguuuggccuucaucaggaaguccgaugagcuccugcacaaugugaacgcgggaaaaucaacaaccaauauuaugaucacuaccaucauuauaguuaucauugugaucuuacugagucuaauugccgucggccuccugcuuuacugcaaggcacggucuacaccggugaccuugagcaaagaccagcuguccggcaucaacaauauagcuuucucaaacugaggacuaguacuggcugcaucucccuuuccucuguccuccauccuucucccaggauggugaagggggaccugguacccagugauccccaccccaggauccuaaaucaugacuuaccugcuaauaaaaacucauuggaaaagugagaagaucuaaaaaaaaaaaaaaaaaaaaaaaaaaaaaaaaaaaaaaaaaaaaaaaaaaaaaaaaaaaaaaaaugcaucccccccccccccccccccccccccccccccaaaggcucuuuucagagccaccagaauu

SEQ ID NO: 7039 - RNA, 1964 nt, Artificial Sequence
  mRNA product Design f-3 comprising derived and/or modified sequence from HRSV(A2)__F_DSCav1_mut7 (opt4)
gggagagucccgcagucggcguccagcggcucugcuuguucgugugugugucguugcaggccuuauucaagcuuaccauggagcugcugauccugaaggccaacgccaucaccaccauccugaccgccgugaccuucugcuucgccagcggccagaacaucaccgaggaguucuaccagagcaccugcagcgccgugagcaagggcuaccugagcgcccugagaaccggcugguacaccagcgugaucaccaucgagcugagcaacaucaaggagaacaagugcaacggcaccgacgccaaggugaagcugaucaagcaggagcuggacaaguacaagaacgccgugaccgagcugcagaugcugaugugcagcacccccgccaccggcagcggcagcgccaucgccagcggcguggccgugugcaaggugcugcaccuggagggcgaggugaacaagaucaagagcgcccugcugagcaccaacaaggccguggugagccugagcaacggcgugagcgugcugaccuucaaggugcuggaccugaagaacuacaucgacaagcagcugcugcccauccugaacaagcagagcugcagcaucagcaacaucgagaccgugauggaguuccagcagaagaacaacagacugcuggagaucaccagagaguucagcgugaacgccggcgugaccacccccgugagcaccuacaugcugaccaacagcgagcugcugagccugaucaacgacaugcccaucaccaacgaccagaagaagcugaugagcaacaacgugcagaucgugagacagcagagcuacagcaucaugugcaucaucaaggaggaggugcuggccuacguggugcagcugccccuguacggcgugaucgacacccccugcuggaagcugcacaccagcccccugugcaccaccaacaccaaggagggcagcaacaucugccugaccagaaccgacagaggcugguacugcgacaacgccggcagcgugagcuucuucccccaggccgagaccugcaaggugugcagcaacagaguguucugcgacaccaugaacagccugacccugcccagcgaggugaaccugugcaacguggacaucuucaaccccaaguacgacugcaagaucaugaccagcaagaccgacgugagcagcagcgugaucaccagccugggcgccaucgugagcugcuacggcaagaccaagugcaccgccagcaacaagaacaagggcaucaucaagaccuucagcaacggcugcgacuacgugagcaacaagggcguggacaccgugagcgugggcaacacccuguacuacgugaacaagcaggagggcaagagccuguacgugaagggcgagcccaucaucaacuucuacgacccccugguguuccccagcgacgaguucgacgccagcaucagccaggugaacgagaagaucaaccagagccuggccuucaucagaaagagcgacgagcugcugcacaacgugaacgccggcaagagcaccaccaacaucaugaucaccaccaucaucaucgugaucaucgugauccugcugagccugaucgccgugggccugcugcuguacugcaaggccagaagcacccccgugacccugagcaaggaccagcugagcggcaucaacaacaucgccuucagcaacugaggacuaguacuggcugcaucucccuuuccucuguccuccauccuucucccaggauggugaagggggaccugguacccagugauccccaccccaggauccuaaaucaugacuuaccugcuaauaaaaacucauuggaaaagugagaagaucuaaaaaaaaaaaaaaaaaaaaaaaaaaaaaaaaaaaaaaaaaaaaaaaaaaaaaaaaaaaaaaaaugcaucccccccccccccccccccccccccccccccaaaggcucuuuucagagccaccagaauu

SEQ ID NO: 7040 - RNA, 1964 nt, Artificial Sequence
  mRNA product Design f-3 comprising derived and/or modified sequence from HRSV(A2)__F_DSCav1_mut7 (opt5)
gggagagucccgcagucggcguccagcggcucugcuuguucgugugugugucguugcaggccuuauucaagcuuaccauggagcugcucauccugaaggccaacgcuauuaccacaauccuuacggccgugaccuucugcuuugcgagcggccagaauauuacagaagaguucuaccaauccaccuguucugcugucagcaaaggguaucuguccgcccucagaacaggaugguacaccucuguuaucacaauugaacugagcaacaucaaggagaauaaaugcaacggcaccgacgccaaggugaaacuuaucaagcaggaacuggauaaguauaaaaaugcugugacggagcuccagaugcugauguguuccacccccgccacagggucuggaagcgcuauugccuccggcgucgcggugugcaagguucugcaccucgagggggaagugaacaaaaucaagagcgcccugcuuucuaccaauaaagcugucgugucccugagcaacggaguuucugugcucacauuuaagguccuggaccuuaagaauuacauugauaaacagcugcucccuauccugaacaagcaauccuguagcauuucuaauaucgagaccgugauggaguuccagcagaaaaacaaucggcugcucgaaauuacgcgcgaguuuuccgugaacgccggcgucacaaccccgguuagcacauauaugcugaccaauuccgaacuucugucucucaucaacgacaugcccaucaccaacgaucagaagaaacugaugagcaauaacgugcaaauugugagacagcaguccuacagcaucaugugcauuaucaaggaggaaguccuugcuuaugugguucagcugccucucuacggcgugauugacacacccuguuggaaacugcauacgucuccucugugcaccacaaauaccaaggagggguccaacaucugucucacacggaccgaucgcggaugguacugcgacaaugccggcagcgucucuuucuuuccccaagcggaaacguguaaggugugcagcaacagaguuuucugcgauacaaugaacucccugacccuuccuucugaggugaaucuguguaaugucgacaucuuuaacccgaaauaugauugcaagauuaugaccagcaaaacagacguguccagcucugucaucaccucccucggggccauugugagcuguuacggaaagacaaaaugcacggcuucuaauaagaacaagggcaucauuaaaaccuucuccaaugggugugauuauguuagcaacaagggaguggacacagucuccgugggcaauacccuguacuauguuaacaaacaggagggcaagucucuuuacgugaaaggggaacccaucaucaacuuuuaugacccucuggucuuccccagcgaugaguuugacgccuccauuucucaggugaaugaaaagaucaaccaaagccucgcuuucauucggaaguccgaugagcugcugcacaaugugaacgccggaaaaagcacaaccaauaucaugauuacgaccaucauuaucguuaucauugucauccuccugucucuuauugccgugggccugcuccuguacugcaaggcucgcuccacaccugugacccugagcaaagaccagcuuucugggaucaacaauauugcguucuccaacugaggacuaguacuggcugcaucucccuuuccucuguccuccauccuucucccaggauggugaagggggaccugguacccagugauccccaccccaggauccuaaaucaugacuuaccugcuaauaaaaacucauuggaaaagugagaagaucuaaaaaaaaaaaaaaaaaaaaaaaaaaaaaaaaaaaaaaaaaaaaaaaaaaaaaaaaaaaaaaaaugcaucccccccccccccccccccccccccccccccaaaggcucuuuucagagccaccagaauu

SEQ ID NO: 7041 - RNA, 1964 nt, Artificial Sequence
  mRNA product Design f-3 comprising derived and/or modified sequence from HRSV(A2)__F_DSCav1_mut7 (opt6)
gggagagucccgcagucggcguccagcggcucugcuuguucgugugugugucguugcaggccuuauucaagcuuaccauggaauuacucauacucaaagcaaaugcaauuaccacuauacucacagcuguaacuuuuuguuucgccucaggacaaaacaucacagaagaauuuuaucaauccacaugcucugccguaucaaaaggcuaccuaucugcccuaagaacagguugguacacaucuguaauaacaaucgaauuauccaacaucaaagaaaacaaaugcaacggcacagacgcaaaagucaaacucaucaaacaagaauuagauaaauauaaaaacgcaguaacagaacuacaaaugcuaaugugcucuacacccgccacaggaucaggauccgcaaucgcuucuggaguagccguuugcaaaguauuacaccuagaaggagaaguaaauaaaauaaaauccgcacuacuaucaacuaauaaagcaguaguaucacuuucuaaugguguaucaguauuaacauucaaaguccucgaccuaaaaaauuacaucgacaaacaacuauuacccauccuuaauaaacaaucaugcuccauaucaaacauagaaacugucauggaauuucaacaaaaaaacaauagacuucuagaaaucacaagagaauuuucuguaaaugcaggaguaacuacaccaguaucaacauauauguuaaccaacuccgaacuacuaucacucauaaacgacaugccaauaacaaacgaccaaaaaaaacuaaugucaaauaacguucaaauaguaagacaacaaucauacucaaucaugugcauaauaaaagaagaaguuuuagcauacgucguacaacuuccccuauacggaguaauagacaccccuugcuggaaacuccacaccucaccacuaugcacuacaaacacaaaagaagguuccaacaucugcuuaacaagaaccgaucgaggaugguacugcgacaacgcugguuccguaucuuucuucccacaagcagaaacaugcaaaguaugcuccaauagaguauucugcgacaccaugaacucacuaacucuaccauccgaaguaaaccuaugcaacgucgacauauuuaauccaaaauaugacugcaaaauaaugacuucaaaaacagacguauccucaucaguaauaacauccuuaggagcaauaguaucauguuacggcaagacaaaauguacagccucaaacaaaaacaaagguaucauuaaaaccuucuccaacggcugcgacuacguaucaaauaaaggugucgauacaguaucaguaggaaacacacucuauuacguuaauaaacaagaaggaaagucauuauacguaaaaggagaaccaauaaucaauuucuacgauccccuagucuuucccucagaugaauuugacgcaagcaucucucaagucaacgaaaaaauaaaccaaucccuagccuucauaagaaaaucagaugaacuacuucauaacgucaacgccggaaaaucaacaaccaacauaaugaucacuacaaucauaauuguaauuauaguaauacuacuaucgcuaauugccguuggacuacuacuauauuguaaagcaagaucaacacccguuacucuauccaaagaucaauuaucaggaaucaacaacauagccuucucaaauuaaggacuaguacuggcugcaucucccuuuccucuguccuccauccuucucccaggauggugaagggggaccugguacccagugauccccaccccaggauccuaaaucaugacuuaccugcuaauaaaaacucauuggaaaagugagaagaucuaaaaaaaaaaaaaaaaaaaaaaaaaaaaaaaaaaaaaaaaaaaaaaaaaaaaaaaaaaaaaaaaugcaucccccccccccccccccccccccccccccccaaaggcucuuuucagagccaccagaauu

SEQ ID NO: 7042 - RNA, 1964 nt, Artificial Sequence
  mRNA product Design f-3 comprising derived and/or modified sequence from HRSV(A2)__F_DSCav1_mut7 (opt11)
gggagagucccgcagucggcguccagcggcucugcuuguucgugugugugucguugcaggccuuauucaagcuuaccauggaacuacucauacuuaaagccaacgcaauaaccacaauccucaccgccgucacauucugcuucgccucgggacaaaacauaaccgaagaauuuuaccagucuaccugcuccgccgucuccaaggguuaccucuccgcgcuccgcaccgggugguacaccagcguuaucaccaucgaacuaucuaacauaaaagaaaacaagugcaacggaaccgacgcaaaagucaaacucaucaaacaagaacuagacaaauacaagaaugccgucaccgaacuacaaaugcucaugugcuccacccccgccaccggauccggcuccgccauugccuccggcgucgccguaugcaaaguccuucacuuggaaggagaaguuaacaaaauaaaaagcgcccuccugucgaccaacaaagcgguggucagccucuccaacggcgucucuguccucaccuucaaaguccucgaccucaagaacuacauagauaaacaacuacuccccauccuaaacaaacagucaugcagcauauccaacaucgaaaccgucauggaguuccaacagaaaaacaaccgccuccuugaaaucacccgcgaguucucugucaacgccggcgucaccacccccgucuccaccuacaugcucacaaacuccgaacuccucagccucaucaacgacaugccaaucaccaacgaccaaaagaaacucauguccaacaacguacaaaucguucgucaacaaucauacucaaucaugugcaucauuaaagaagaaguccucgcauacgucguccaacucccccucuauggggucaucgacaccccaugcuggaaacuccacaccucuccccuaugcaccaccaacaccaaagaaggcuccaacaucugccuaacccgaaccgaccgcggaugguacugcgacaacgccggcuccgucuccuucuucccccaggccgaaacauguaaagucugcuccaaccguguguucugcgacaccaugaacucacuaacccuccccuccgaagucaaccucugcaacgucgacaucuucaacccgaaauacgacugcaaaauaaugaccagcaaaacagacguauccucuagcgucauuaccagccuaggugcaaucguguccugcuacggcaaaacaaaaugcaccgccuccaacaaaaauaaaggaaucauaaaaaccuucuccaacggcugcgacuacgucagcaacaaaggagucgacaccgucuccguaggaaauacucuauacuaugucaacaaacaagaggguaaaucccucuacgucaaaggcgaacccaucaucaacuucuacgacccccucgucuuccccucugacgaguucgacgccagcauaucacaaguaaacgaaaagaucaaccaaucccucgcauucauucgcaaauccgacgaacuccuacacaacgucaacgccggaaaauccaccaccaacaucaugaucacuacuaucauuaucgucaucaucgucauccuccucucccucaucgcagucggccuucuacucuacugcaaggcacgcucuacacccguaacccugucuaaagaccaacucuccggcaucaacaacaucgcuuucuccaacuaaggacuaguacuggcugcaucucccuuuccucuguccuccauccuucucccaggauggugaagggggaccugguacccagugauccccaccccaggauccuaaaucaugacuuaccugcuaauaaaaacucauuggaaaagugagaagaucuaaaaaaaaaaaaaaaaaaaaaaaaaaaaaaaaaaaaaaaaaaaaaaaaaaaaaaaaaaaaaaaaugcaucccccccccccccccccccccccccccccccaaaggcucuuuucagagccaccagaauu

SEQ ID NO: 7043 - RNA, 2180 nt, Artificial Sequence
  mRNA product Design f-4 comprising derived and/or modified sequence from HRSV(A2)__F_DSCav1_mut7 (opt1)
gggagagucccgcagucggcguccagcggcucugcuuguucgugugugugucguugcaggccuuauucaagcuuaccauggagcugcucauccugaaggccaacgccaucaccaccauccugacggcggugaccuucugcuucgccagcggccagaacaucaccgaggaguucuaccaguccacgugcagcgccgucuccaagggguaccucagcgcccugcggaccggcugguacaccuccgugaucaccaucgagcugagcaacaucaaggagaacaagugcaacgggaccgacgccaaggugaagcucaucaagcaggagcuggacaaguacaagaacgcggucacggagcugcagaugcugaugugcuccaccccggcaaccggcuccggcuccgccaucgcgagcggcgucgccgugugcaaggugcugcaccucgagggggaggucaacaagaucaagagcgcccugcuguccaccaacaaggccguggugagccucuccaacggcgucagcgugcugaccuucaaggugcuggaccucaagaacuacaucgacaagcagcugcugcccauccugaacaagcagagcugcuccaucagcaacaucgagacggugauggaguuccagcagaagaacaaccggcuccuggagaucacccgcgaguucagcgugaacgccggggucaccacccccguguccacguacaugcugaccaacagcgagcuccugucccugaucaacgacaugccgaucaccaacgaccagaagaagcucaugagcaacaacgugcagaucguccggcagcaguccuacagcaucaugugcaucaucaaggaggaggugcuggcguacgugguccagcugccccucuacggcgugaucgacacccccugcuggaagcugcacacgagcccccugugcaccaccaacaccaaggagggguccaacaucugccucacgcgcaccgaccggggcugguacugcgacaacgccggcagcgucuccuucuucccgcaggccgagaccugcaaggugugcagcaaccgcguguucugcgacaccaugaacucccugacgcugcccagcgagguaaaccucugcaacgucgacaucuucaaccccaaguacgacugcaagaucaugaccuccaagaccgacgugagcuccagcgugaucaccucccugggggccaucgucagcugcuacggcaagacgaagugcaccgccagcaacaagaacaaggggaucaucaagaccuucuccaacggcugcgacuacgugagcaacaagggcguggacaccguguccgucgggaacacccuguacuacgugaacaagcaggagggcaagagccucuacgugaagggggagcccaucaucaacuucuacgacccgcuggucuuccccuccgacgaguucgacgcgagcaucucccaggugaacgagaagaucaaccagagccuggccuucauccgcaaguccgacgagcugcuccacaacgugaacgccggcaagagcacgaccaacaucaugaucaccaccaucaucaucgucaucaucgugauccugcugucccucaucgccguggggcugcugcucuacugcaaggcccggagcacgcccgucacccuguccaaggaccagcugagcggcaucaacaacaucgcguucuccaacugaggacuagugaagggaacacccaaauuuaauucagccuuaagcacaauuaauuaagagugaaacguaauuguacaagcaguuggucacccaccauagggcaugaucaacaccgcaaccuuuccuuuuucccccagugauucugaaaaaccccucuucccuucagcuugcuuagauguuccaaauuuaguaagcuuaaggcggccuacagaagaaaaagaaaaaaaaggccacaaaaguucccucucacuuucaguaaauaaaauaaaagcagcaacagaaauaaagaaauaaaugaaauucaaaaugaaauaaauauuguguugugcagcauuaaaaaaucaauaaaaauuaaaaaugagcaagaucuaaaaaaaaaaaaaaaaaaaaaaaaaaaaaaaaaaaaaaaaaaaaaaaaaaaaaaaaaaaaaaaaugcaucccccccccccccccccccccccccccccccaaaggcucuuuucagagccaccagaauu

SEQ ID NO: 7044 - RNA, 2180 nt, Artificial Sequence
  mRNA product Design f-4 comprising derived and/or modified sequence from HRSV(A2)__F_DSCav1_mut7 (opt1)
gggagagucccgcagucggcguccagcggcucugcuuguucgugugugugucguugcaggccuuauucaagcuuaccauggagcugcucauccugaaggccaacgccaucaccaccauccugacggcggugaccuucugcuucgccagcggccagaacaucaccgaggaguucuaccaguccacgugcagcgccgucuccaagggguaccucagcgcccugcgcaccggcugguacaccuccgugaucaccaucgagcugagcaacaucaaggagaacaagugcaacgggaccgacgccaaggugaagcucaucaagcaggagcuggacaaguacaagaacgcggucacggagcugcagaugcucaugugcuccacccccgccaccggcagcggguccgccaucgccagcggcguggcggugugcaagguccugcaccuggagggcgaggugaacaagaucaaguccgcccuccugagcaccaacaaggccguggucucccugagcaacgggguguccgugcucacguucaagguccuggaccugaagaacuacaucgacaagcagcuccugccgauccugaacaagcagagcugcuccaucagcaacaucgagaccgugauggaguuccagcagaagaacaaccggcuccuggagaucacccgcgaguucuccgugaacgccggcgucaccacgcccgugagcaccuacaugcugaccaacagcgagcuccugucccugaucaacgacaugcccaucaccaacgaccagaagaagcucaugagcaacaacgugcagaucguccggcagcaguccuacagcaucaugugcaucaucaaggaggaggugcuggccuacgugguccagcugccccucuacggggugaucgacacgccgugcuggaagcugcacaccagcccccugugcaccaccaacacgaaggagggcagcaacaucugccucacccgcaccgaccgggggugguacugcgacaacgcgggcuccgugagcuucuucccccaggccgagaccugcaaggucugcuccaaccgcguguucugcgacacgaugaacagccugacccugcccuccgaggucaaccucugcaacguggacaucuucaacccgaaguacgacugcaagaucaugaccagcaagaccgacguguccagcuccgucaucacgagccugggcgccaucguguccugcuacgggaagaccaagugcaccgccagcaacaagaacaagggcaucaucaagaccuucuccaacgggugcgacuacgugagcaacaagggcgucgacacggugagcgugggcaacacccuguacuacgucaacaagcaggaggggaagucccucuacgugaagggcgagcccaucaucaacuucuacgacccccugguguuccccagcgacgaguucgacgccuccaucagccaggucaacgagaagaucaaccagucccuggcguucauccggaaguccgacgagcuccugcacaacgugaacgccgggaaguccaccaccaacaucaugaucaccacgaucaucaucgugaucaucgucauccugcucagccugaucgccgugggccugcuccuguacugcaaggcccgcuccaccccggugacccugagcaaggaccagcuguccgggaucaacaacaucgccuucagcaacugaggacuagugaagggaacacccaaauuuaauucagccuuaagcacaauuaauuaagagugaaacguaauuguacaagcaguuggucacccaccauagggcaugaucaacaccgcaaccuuuccuuuuucccccagugauucugaaaaaccccucuucccuucagcuugcuuagauguuccaaauuuaguaagcuuaaggcggccuacagaagaaaaagaaaaaaaaggccacaaaaguucccucucacuuucaguaaauaaaauaaaagcagcaacagaaauaaagaaauaaaugaaauucaaaaugaaauaaauauuguguugugcagcauuaaaaaaucaauaaaaauuaaaaaugagcaagaucuaaaaaaaaaaaaaaaaaaaaaaaaaaaaaaaaaaaaaaaaaaaaaaaaaaaaaaaaaaaaaaaaugcaucccccccccccccccccccccccccccccccaaaggcucuuuucagagccaccagaauu

SEQ ID NO: 7045 - RNA, 2180 nt, Artificial Sequence
  mRNA product Design f-4 comprising derived and/or modified sequence from HRSV(A2)__F_DSCav1_mut7 (opt2)
gggagagucccgcagucggcguccagcggcucugcuuguucgugugugugucguugcaggccuuauucaagcuuaccauggagcuccucauccucaaggccaacgccaucaccaccauccucaccgccgucaccuucugcuucgccuccggccagaacaucaccgaggaguucuaccaguccaccugcuccgccgucuccaagggcuaccucuccgcccuccgcaccggcugguacaccuccgucaucaccaucgagcucuccaacaucaaggagaacaagugcaacggcaccgacgccaaggucaagcucaucaagcaggagcucgacaaguacaagaacgccgucaccgagcuccagaugcucaugugcuccacccccgccaccggcuccggcuccgccaucgccuccggcgucgccgucugcaagguccuccaccucgagggcgaggucaacaagaucaaguccgcccuccucuccaccaacaaggccgucgucucccucuccaacggcgucuccguccucaccuucaagguccucgaccucaagaacuacaucgacaagcagcuccuccccauccucaacaagcaguccugcuccaucuccaacaucgagaccgucauggaguuccagcagaagaacaaccgccuccucgagaucacccgcgaguucuccgucaacgccggcgucaccacccccgucuccaccuacaugcucaccaacuccgagcuccucucccucaucaacgacaugcccaucaccaacgaccagaagaagcucauguccaacaacguccagaucguccgccagcaguccuacuccaucaugugcaucaucaaggaggagguccucgccuacgucguccagcucccccucuacggcgucaucgacacccccugcuggaagcuccacaccuccccccucugcaccaccaacaccaaggagggcuccaacaucugccucacccgcaccgaccgcggcugguacugcgacaacgccggcuccgucuccuucuucccccaggccgagaccugcaaggucugcuccaaccgcgucuucugcgacaccaugaacucccucacccuccccuccgaggucaaccucugcaacgucgacaucuucaaccccaaguacgacugcaagaucaugaccuccaagaccgacgucuccuccuccgucaucaccucccucggcgccaucgucuccugcuacggcaagaccaagugcaccgccuccaacaagaacaagggcaucaucaagaccuucuccaacggcugcgacuacgucuccaacaagggcgucgacaccgucuccgucggcaacacccucuacuacgucaacaagcaggagggcaagucccucuacgucaagggcgagcccaucaucaacuucuacgacccccucgucuuccccuccgacgaguucgacgccuccaucucccaggucaacgagaagaucaaccagucccucgccuucauccgcaaguccgacgagcuccuccacaacgucaacgccggcaaguccaccaccaacaucaugaucaccaccaucaucaucgucaucaucgucauccuccucucccucaucgccgucggccuccuccucuacugcaaggcccgcuccacccccgucacccucuccaaggaccagcucuccggcaucaacaacaucgccuucuccaacugaggacuagugaagggaacacccaaauuuaauucagccuuaagcacaauuaauuaagagugaaacguaauuguacaagcaguuggucacccaccauagggcaugaucaacaccgcaaccuuuccuuuuucccccagugauucugaaaaaccccucuucccuucagcuugcuuagauguuccaaauuuaguaagcuuaaggcggccuacagaagaaaaagaaaaaaaaggccacaaaaguucccucucacuuucaguaaauaaaauaaaagcagcaacagaaauaaagaaauaaaugaaauucaaaaugaaauaaauauuguguugugcagcauuaaaaaaucaauaaaaauuaaaaaugagcaagaucuaaaaaaaaaaaaaaaaaaaaaaaaaaaaaaaaaaaaaaaaaaaaaaaaaaaaaaaaaaaaaaaaugcaucccccccccccccccccccccccccccccccaaaggcucuuuucagagccaccagaauu

SEQ ID NO: 7046 - RNA, 2180 nt, Artificial Sequence
  mRNA product Design f-4 comprising derived and/or modified sequence from HRSV(A2)__F_DSCav1_mut7 (opt3)
gggagagucccgcagucggcguccagcggcucugcuuguucgugugugugucguugcaggccuuauucaagcuuaccauggagcugcucauccuuaaggccaacgcuauuaccacaauacugacugcagugacguucugcuuugccagcggccagaauaucaccgaagaguucuaccaauccacauguucugcggucucaaaaggguauuugagugcuuuaagaacuggaugguacaccagcguuauuacaaucgaacuguccaacauuaaggagaauaaaugcaacgguaccgacgccaaggugaaacuaaucaagcaggaacucgauaaguauaaaaaugcaguaacugagcugcagaugcuuauguguucuacacccgccaccggcucggggucagcuauagcaagcggaguggccgucugcaaggugcugcacuuggagggcgaaguuaacaaaaucaagagugcucuccuguccacgaauaaagccguggucucucugagcaacgguguguccguacucacuuuuaagguuuuagaccugaagaauuacauugauaaacagcuuuugccuauccugaacaagcaaucauguaguauuagcaauaucgagaccgugauggaguuccagcagaaaaacaauaggcuacucgaaauaacacgggaguuuucugucaacgcgggggugacuaccccaguguccacauauaugcugaccaauucagaacuucugagcuugauuaacgacaugccgaucacgaacgaucagaagaaacucaugaguaauaacguccaaauuguucgccagcagucuuacuccaucaugugcaucauuaaggaggaagugcuggcauauguagugcaguuaccccuguacggagucauagacacuccuuguuggaaacuccauacaagcccacuuugcaccacuaauacaaaggagggcucgaacaucugucugacccgaacggaucguggcugguacugcgacaaugccgggucuguguccuucuuuccccaagcugaaaccuguaagguuugcucaaacagaguguucugcgauacaaugaauaguuugacucuaccuagcgaggucaaccuguguaauguggacauuuuuaacccaaaauaugauugcaagaucaugaccuccaaaacagacguaucuagcucaguuauaacuagccucggagccauuguguccuguuacgguaagaccaaaugcacagcaagcaauaagaacaagggcaucaucaaaaccuucucuaaugggugugauuaugucucaaacaagggaguggacacugucagugugggcaauacgcuguacuauguuaacaaacaggaggguaagagccuuuacgugaaaggggaacccauuaucaacuuuuaugacccucugguauucccauccgaugaguuugacgcuucuauuucgcaggucaaugaaaagauaaaccaaaguuuggccuucaucaggaaguccgaugagcuccugcacaaugugaacgcgggaaaaucaacaaccaauauuaugaucacuaccaucauuauaguuaucauugugaucuuacugagucuaauugccgucggccuccugcuuuacugcaaggcacggucuacaccggugaccuugagcaaagaccagcuguccggcaucaacaauauagcuuucucaaacugaggacuagugaagggaacacccaaauuuaauucagccuuaagcacaauuaauuaagagugaaacguaauuguacaagcaguuggucacccaccauagggcaugaucaacaccgcaaccuuuccuuuuucccccagugauucugaaaaaccccucuucccuucagcuugcuuagauguuccaaauuuaguaagcuuaaggcggccuacagaagaaaaagaaaaaaaaggccacaaaaguucccucucacuuucaguaaauaaaauaaaagcagcaacagaaauaaagaaauaaaugaaauucaaaaugaaauaaauauuguguugugcagcauuaaaaaaucaauaaaaauuaaaaaugagcaagaucuaaaaaaaaaaaaaaaaaaaaaaaaaaaaaaaaaaaaaaaaaaaaaaaaaaaaaaaaaaaaaaaaugcaucccccccccccccccccccccccccccccccaaaggcucuuuucagagccaccagaauu

SEQ ID NO: 7047 - RNA, 2180 nt, Artificial Sequence
  mRNA product Design f-4 comprising derived and/or modified sequence from HRSV(A2)__F_DSCav1_mut7 (opt4)
gggagagucccgcagucggcguccagcggcucugcuuguucgugugugugucguugcaggccuuauucaagcuuaccauggagcugcugauccugaaggccaacgccaucaccaccauccugaccgccgugaccuucugcuucgccagcggccagaacaucaccgaggaguucuaccagagcaccugcagcgccgugagcaagggcuaccugagcgcccugagaaccggcugguacaccagcgugaucaccaucgagcugagcaacaucaaggagaacaagugcaacggcaccgacgccaaggugaagcugaucaagcaggagcuggacaaguacaagaacgccgugaccgagcugcagaugcugaugugcagcacccccgccaccggcagcggcagcgccaucgccagcggcguggccgugugcaaggugcugcaccuggagggcgaggugaacaagaucaagagcgcccugcugagcaccaacaaggccguggugagccugagcaacggcgugagcgugcugaccuucaaggugcuggaccugaagaacuacaucgacaagcagcugcugcccauccugaacaagcagagcugcagcaucagcaacaucgagaccgugauggaguuccagcagaagaacaacagacugcuggagaucaccagagaguucagcgugaacgccggcgugaccacccccgugagcaccuacaugcugaccaacagcgagcugcugagccugaucaacgacaugcccaucaccaacgaccagaagaagcugaugagcaacaacgugcagaucgugagacagcagagcuacagcaucaugugcaucaucaaggaggaggugcuggccuacguggugcagcugccccuguacggcgugaucgacacccccugcuggaagcugcacaccagcccccugugcaccaccaacaccaaggagggcagcaacaucugccugaccagaaccgacagaggcugguacugcgacaacgccggcagcgugagcuucuucccccaggccgagaccugcaaggugugcagcaacagaguguucugcgacaccaugaacagccugacccugcccagcgaggugaaccugugcaacguggacaucuucaaccccaaguacgacugcaagaucaugaccagcaagaccgacgugagcagcagcgugaucaccagccugggcgccaucgugagcugcuacggcaagaccaagugcaccgccagcaacaagaacaagggcaucaucaagaccuucagcaacggcugcgacuacgugagcaacaagggcguggacaccgugagcgugggcaacacccuguacuacgugaacaagcaggagggcaagagccuguacgugaagggcgagcccaucaucaacuucuacgacccccugguguuccccagcgacgaguucgacgccagcaucagccaggugaacgagaagaucaaccagagccuggccuucaucagaaagagcgacgagcugcugcacaacgugaacgccggcaagagcaccaccaacaucaugaucaccaccaucaucaucgugaucaucgugauccugcugagccugaucgccgugggccugcugcuguacugcaaggccagaagcacccccgugacccugagcaaggaccagcugagcggcaucaacaacaucgccuucagcaacugaggacuagugaagggaacacccaaauuuaauucagccuuaagcacaauuaauuaagagugaaacguaauuguacaagcaguuggucacccaccauagggcaugaucaacaccgcaaccuuuccuuuuucccccagugauucugaaaaaccccucuucccuucagcuugcuuagauguuccaaauuuaguaagcuuaaggcggccuacagaagaaaaagaaaaaaaaggccacaaaaguucccucucacuuucaguaaauaaaauaaaagcagcaacagaaauaaagaaauaaaugaaauucaaaaugaaauaaauauuguguugugcagcauuaaaaaaucaauaaaaauuaaaaaugagcaagaucuaaaaaaaaaaaaaaaaaaaaaaaaaaaaaaaaaaaaaaaaaaaaaaaaaaaaaaaaaaaaaaaaugcaucccccccccccccccccccccccccccccccaaaggcucuuuucagagccaccagaauu

SEQ ID NO: 7048 - RNA, 2180 nt, Artificial Sequence
  mRNA product Design f-4 comprising derived and/or modified sequence from HRSV(A2)__F_DSCav1_mut7 (opt5)
gggagagucccgcagucggcguccagcggcucugcuuguucgugugugugucguugcaggccuuauucaagcuuaccauggagcugcucauccugaaggccaacgcuauuaccacaauccuuacggccgugaccuucugcuuugcgagcggccagaauauuacagaagaguucuaccaauccaccuguucugcugucagcaaaggguaucuguccgcccucagaacaggaugguacaccucuguuaucacaauugaacugagcaacaucaaggagaauaaaugcaacggcaccgacgccaaggugaaacuuaucaagcaggaacuggauaaguauaaaaaugcugugacggagcuccagaugcugauguguuccacccccgccacagggucuggaagcgcuauugccuccggcgucgcggugugcaagguucugcaccucgagggggaagugaacaaaaucaagagcgcccugcuuucuaccaauaaagcugucgugucccugagcaacggaguuucugugcucacauuuaagguccuggaccuuaagaauuacauugauaaacagcugcucccuauccugaacaagcaauccuguagcauuucuaauaucgagaccgugauggaguuccagcagaaaaacaaucggcugcucgaaauuacgcgcgaguuuuccgugaacgccggcgucacaaccccgguuagcacauauaugcugaccaauuccgaacuucugucucucaucaacgacaugcccaucaccaacgaucagaagaaacugaugagcaauaacgugcaaauugugagacagcaguccuacagcaucaugugcauuaucaaggaggaaguccuugcuuaugugguucagcugccucucuacggcgugauugacacacccuguuggaaacugcauacgucuccucugugcaccacaaauaccaaggagggguccaacaucugucucacacggaccgaucgcggaugguacugcgacaaugccggcagcgucucuuucuuuccccaagcggaaacguguaaggugugcagcaacagaguuuucugcgauacaaugaacucccugacccuuccuucugaggugaaucuguguaaugucgacaucuuuaacccgaaauaugauugcaagauuaugaccagcaaaacagacguguccagcucugucaucaccucccucggggccauugugagcuguuacggaaagacaaaaugcacggcuucuaauaagaacaagggcaucauuaaaaccuucuccaaugggugugauuauguuagcaacaagggaguggacacagucuccgugggcaauacccuguacuauguuaacaaacaggagggcaagucucuuuacgugaaaggggaacccaucaucaacuuuuaugacccucuggucuuccccagcgaugaguuugacgccuccauuucucaggugaaugaaaagaucaaccaaagccucgcuuucauucggaaguccgaugagcugcugcacaaugugaacgccggaaaaagcacaaccaauaucaugauuacgaccaucauuaucguuaucauugucauccuccugucucuuauugccgugggccugcuccuguacugcaaggcucgcuccacaccugugacccugagcaaagaccagcuuucugggaucaacaauauugcguucuccaacugaggacuagugaagggaacacccaaauuuaauucagccuuaagcacaauuaauuaagagugaaacguaauuguacaagcaguuggucacccaccauagggcaugaucaacaccgcaaccuuuccuuuuucccccagugauucugaaaaaccccucuucccuucagcuugcuuagauguuccaaauuuaguaagcuuaaggcggccuacagaagaaaaagaaaaaaaaggccacaaaaguucccucucacuuucaguaaauaaaauaaaagcagcaacagaaauaaagaaauaaaugaaauucaaaaugaaauaaauauuguguugugcagcauuaaaaaaucaauaaaaauuaaaaaugagcaagaucuaaaaaaaaaaaaaaaaaaaaaaaaaaaaaaaaaaaaaaaaaaaaaaaaaaaaaaaaaaaaaaaaugcaucccccccccccccccccccccccccccccccaaaggcucuuuucagagccaccagaauu

SEQ ID NO: 7049 - RNA, 2180 nt, Artificial Sequence
  mRNA product Design f-4 comprising derived and/or modified sequence from HRSV(A2)__F_DSCav1_mut7 (opt6)
gggagagucccgcagucggcguccagcggcucugcuuguucgugugugugucguugcaggccuuauucaagcuuaccauggaauuacucauacucaaagcaaaugcaauuaccacuauacucacagcuguaacuuuuuguuucgccucaggacaaaacaucacagaagaauuuuaucaauccacaugcucugccguaucaaaaggcuaccuaucugcccuaagaacagguugguacacaucuguaauaacaaucgaauuauccaacaucaaagaaaacaaaugcaacggcacagacgcaaaagucaaacucaucaaacaagaauuagauaaauauaaaaacgcaguaacagaacuacaaaugcuaaugugcucuacacccgccacaggaucaggauccgcaaucgcuucuggaguagccguuugcaaaguauuacaccuagaaggagaaguaaauaaaauaaaauccgcacuacuaucaacuaauaaagcaguaguaucacuuucuaaugguguaucaguauuaacauucaaaguccucgaccuaaaaaauuacaucgacaaacaacuauuacccauccuuaauaaacaaucaugcuccauaucaaacauagaaacugucauggaauuucaacaaaaaaacaauagacuucuagaaaucacaagagaauuuucuguaaaugcaggaguaacuacaccaguaucaacauauauguuaaccaacuccgaacuacuaucacucauaaacgacaugccaauaacaaacgaccaaaaaaaacuaaugucaaauaacguucaaauaguaagacaacaaucauacucaaucaugugcauaauaaaagaagaaguuuuagcauacgucguacaacuuccccuauacggaguaauagacaccccuugcuggaaacuccacaccucaccacuaugcacuacaaacacaaaagaagguuccaacaucugcuuaacaagaaccgaucgaggaugguacugcgacaacgcugguuccguaucuuucuucccacaagcagaaacaugcaaaguaugcuccaauagaguauucugcgacaccaugaacucacuaacucuaccauccgaaguaaaccuaugcaacgucgacauauuuaauccaaaauaugacugcaaaauaaugacuucaaaaacagacguauccucaucaguaauaacauccuuaggagcaauaguaucauguuacggcaagacaaaauguacagccucaaacaaaaacaaagguaucauuaaaaccuucuccaacggcugcgacuacguaucaaauaaaggugucgauacaguaucaguaggaaacacacucuauuacguuaauaaacaagaaggaaagucauuauacguaaaaggagaaccaauaaucaauuucuacgauccccuagucuuucccucagaugaauuugacgcaagcaucucucaagucaacgaaaaaauaaaccaaucccuagccuucauaagaaaaucagaugaacuacuucauaacgucaacgccggaaaaucaacaaccaacauaaugaucacuacaaucauaauuguaauuauaguaauacuacuaucgcuaauugccguuggacuacuacuauauuguaaagcaagaucaacacccguuacucuauccaaagaucaauuaucaggaaucaacaacauagccuucucaaauuaaggacuagugaagggaacacccaaauuuaauucagccuuaagcacaauuaauuaagagugaaacguaauuguacaagcaguuggucacccaccauagggcaugaucaacaccgcaaccuuuccuuuuucccccagugauucugaaaaaccccucuucccuucagcuugcuuagauguuccaaauuuaguaagcuuaaggcggccuacagaagaaaaagaaaaaaaaggccacaaaaguucccucucacuuucaguaaauaaaauaaaagcagcaacagaaauaaagaaauaaaugaaauucaaaaugaaauaaauauuguguugugcagcauuaaaaaaucaauaaaaauuaaaaaugagcaagaucuaaaaaaaaaaaaaaaaaaaaaaaaaaaaaaaaaaaaaaaaaaaaaaaaaaaaaaaaaaaaaaaaugcaucccccccccccccccccccccccccccccccaaaggcucuuuucagagccaccagaauu

SEQ ID NO: 7050 - RNA, 2180 nt, Artificial Sequence
  mRNA product Design f-4 comprising derived and/or modified sequence from HRSV(A2)__F_DSCav1_mut7 (opt11)
gggagagucccgcagucggcguccagcggcucugcuuguucgugugugugucguugcaggccuuauucaagcuuaccauggaacuacucauacuuaaagccaacgcaauaaccacaauccucaccgccgucacauucugcuucgccucgggacaaaacauaaccgaagaauuuuaccagucuaccugcuccgccgucuccaaggguuaccucuccgcgcuccgcaccgggugguacaccagcguuaucaccaucgaacuaucuaacauaaaagaaaacaagugcaacggaaccgacgcaaaagucaaacucaucaaacaagaacuagacaaauacaagaaugccgucaccgaacuacaaaugcucaugugcuccacccccgccaccggauccggcuccgccauugccuccggcgucgccguaugcaaaguccuucacuuggaaggagaaguuaacaaaauaaaaagcgcccuccugucgaccaacaaagcgguggucagccucuccaacggcgucucuguccucaccuucaaaguccucgaccucaagaacuacauagauaaacaacuacuccccauccuaaacaaacagucaugcagcauauccaacaucgaaaccgucauggaguuccaacagaaaaacaaccgccuccuugaaaucacccgcgaguucucugucaacgccggcgucaccacccccgucuccaccuacaugcucacaaacuccgaacuccucagccucaucaacgacaugccaaucaccaacgaccaaaagaaacucauguccaacaacguacaaaucguucgucaacaaucauacucaaucaugugcaucauuaaagaagaaguccucgcauacgucguccaacucccccucuauggggucaucgacaccccaugcuggaaacuccacaccucuccccuaugcaccaccaacaccaaagaaggcuccaacaucugccuaacccgaaccgaccgcggaugguacugcgacaacgccggcuccgucuccuucuucccccaggccgaaacauguaaagucugcuccaaccguguguucugcgacaccaugaacucacuaacccuccccuccgaagucaaccucugcaacgucgacaucuucaacccgaaauacgacugcaaaauaaugaccagcaaaacagacguauccucuagcgucauuaccagccuaggugcaaucguguccugcuacggcaaaacaaaaugcaccgccuccaacaaaaauaaaggaaucauaaaaaccuucuccaacggcugcgacuacgucagcaacaaaggagucgacaccgucuccguaggaaauacucuauacuaugucaacaaacaagaggguaaaucccucuacgucaaaggcgaacccaucaucaacuucuacgacccccucgucuuccccucugacgaguucgacgccagcauaucacaaguaaacgaaaagaucaaccaaucccucgcauucauucgcaaauccgacgaacuccuacacaacgucaacgccggaaaauccaccaccaacaucaugaucacuacuaucauuaucgucaucaucgucauccuccucucccucaucgcagucggccuucuacucuacugcaaggcacgcucuacacccguaacccugucuaaagaccaacucuccggcaucaacaacaucgcuuucuccaacuaaggacuagugaagggaacacccaaauuuaauucagccuuaagcacaauuaauuaagagugaaacguaauuguacaagcaguuggucacccaccauagggcaugaucaacaccgcaaccuuuccuuuuucccccagugauucugaaaaaccccucuucccuucagcuugcuuagauguuccaaauuuaguaagcuuaaggcggccuacagaagaaaaagaaaaaaaaggccacaaaaguucccucucacuuucaguaaauaaaauaaaagcagcaacagaaauaaagaaauaaaugaaauucaaaaugaaauaaauauuguguugugcagcauuaaaaaaucaauaaaaauuaaaaaugagcaagaucuaaaaaaaaaaaaaaaaaaaaaaaaaaaaaaaaaaaaaaaaaaaaaaaaaaaaaaaaaaaaaaaaugcaucccccccccccccccccccccccccccccccaaaggcucuuuucagagccaccagaauu

SEQ ID NO: 7051 - RNA, 1956 nt, Artificial Sequence
  mRNA product Design f-5 comprising derived and/or modified sequence from HRSV(A2)__F_DSCav1_mut7 (opt1)
gggagacuuucccauucuguagcagaauuugguguugccuguggucuuggucccgcggagaagcuuaccauggagcugcucauccugaaggccaacgccaucaccaccauccugacggcggugaccuucugcuucgccagcggccagaacaucaccgaggaguucuaccaguccacgugcagcgccgucuccaagggguaccucagcgcccugcggaccggcugguacaccuccgugaucaccaucgagcugagcaacaucaaggagaacaagugcaacgggaccgacgccaaggugaagcucaucaagcaggagcuggacaaguacaagaacgcggucacggagcugcagaugcugaugugcuccaccccggcaaccggcuccggcuccgccaucgcgagcggcgucgccgugugcaaggugcugcaccucgagggggaggucaacaagaucaagagcgcccugcuguccaccaacaaggccguggugagccucuccaacggcgucagcgugcugaccuucaaggugcuggaccucaagaacuacaucgacaagcagcugcugcccauccugaacaagcagagcugcuccaucagcaacaucgagacggugauggaguuccagcagaagaacaaccggcuccuggagaucacccgcgaguucagcgugaacgccggggucaccacccccguguccacguacaugcugaccaacagcgagcuccugucccugaucaacgacaugccgaucaccaacgaccagaagaagcucaugagcaacaacgugcagaucguccggcagcaguccuacagcaucaugugcaucaucaaggaggaggugcuggcguacgugguccagcugccccucuacggcgugaucgacacccccugcuggaagcugcacacgagcccccugugcaccaccaacaccaaggagggguccaacaucugccucacgcgcaccgaccggggcugguacugcgacaacgccggcagcgucuccuucuucccgcaggccgagaccugcaaggugugcagcaaccgcguguucugcgacaccaugaacucccugacgcugcccagcgagguaaaccucugcaacgucgacaucuucaaccccaaguacgacugcaagaucaugaccuccaagaccgacgugagcuccagcgugaucaccucccugggggccaucgucagcugcuacggcaagacgaagugcaccgccagcaacaagaacaaggggaucaucaagaccuucuccaacggcugcgacuacgugagcaacaagggcguggacaccguguccgucgggaacacccuguacuacgugaacaagcaggagggcaagagccucuacgugaagggggagcccaucaucaacuucuacgacccgcuggucuuccccuccgacgaguucgacgcgagcaucucccaggugaacgagaagaucaaccagagccuggccuucauccgcaaguccgacgagcugcuccacaacgugaacgccggcaagagcacgaccaacaucaugaucaccaccaucaucaucgucaucaucgugauccugcugucccucaucgccguggggcugcugcucuacugcaaggcccggagcacgcccgucacccuguccaaggaccagcugagcggcaucaacaacaucgcguucuccaacugaggacuaguacuggcugcaucucccuuuccucuguccuccauccuucucccaggauggugaagggggaccugguacccagugauccccaccccaggauccuaaaucaugacuuaccugcuaauaaaaacucauuggaaaagugagaagaucuaaaaaaaaaaaaaaaaaaaaaaaaaaaaaaaaaaaaaaaaaaaaaaaaaaaaaaaaaaaaaaaaugcaucccccccccccccccccccccccccccccccaaaggcucuuuucagagccaccagaauu

SEQ ID NO: 7052 - RNA, 1956 nt, Artificial Sequence
  mRNA product Design f-5 comprising derived and/or modified sequence from HRSV(A2)__F_DSCav1_mut7 (opt1)
gggagacuuucccauucuguagcagaauuugguguugccuguggucuuggucccgcggagaagcuuaccauggagcugcucauccugaaggccaacgccaucaccaccauccugacggcggugaccuucugcuucgccagcggccagaacaucaccgaggaguucuaccaguccacgugcagcgccgucuccaagggguaccucagcgcccugcgcaccggcugguacaccuccgugaucaccaucgagcugagcaacaucaaggagaacaagugcaacgggaccgacgccaaggugaagcucaucaagcaggagcuggacaaguacaagaacgcggucacggagcugcagaugcucaugugcuccacccccgccaccggcagcggguccgccaucgccagcggcguggcggugugcaagguccugcaccuggagggcgaggugaacaagaucaaguccgcccuccugagcaccaacaaggccguggucucccugagcaacgggguguccgugcucacguucaagguccuggaccugaagaacuacaucgacaagcagcuccugccgauccugaacaagcagagcugcuccaucagcaacaucgagaccgugauggaguuccagcagaagaacaaccggcuccuggagaucacccgcgaguucuccgugaacgccggcgucaccacgcccgugagcaccuacaugcugaccaacagcgagcuccugucccugaucaacgacaugcccaucaccaacgaccagaagaagcucaugagcaacaacgugcagaucguccggcagcaguccuacagcaucaugugcaucaucaaggaggaggugcuggccuacgugguccagcugccccucuacggggugaucgacacgccgugcuggaagcugcacaccagcccccugugcaccaccaacacgaaggagggcagcaacaucugccucacccgcaccgaccgggggugguacugcgacaacgcgggcuccgugagcuucuucccccaggccgagaccugcaaggucugcuccaaccgcguguucugcgacacgaugaacagccugacccugcccuccgaggucaaccucugcaacguggacaucuucaacccgaaguacgacugcaagaucaugaccagcaagaccgacguguccagcuccgucaucacgagccugggcgccaucguguccugcuacgggaagaccaagugcaccgccagcaacaagaacaagggcaucaucaagaccuucuccaacgggugcgacuacgugagcaacaagggcgucgacacggugagcgugggcaacacccuguacuacgucaacaagcaggaggggaagucccucuacgugaagggcgagcccaucaucaacuucuacgacccccugguguuccccagcgacgaguucgacgccuccaucagccaggucaacgagaagaucaaccagucccuggcguucauccggaaguccgacgagcuccugcacaacgugaacgccgggaaguccaccaccaacaucaugaucaccacgaucaucaucgugaucaucgucauccugcucagccugaucgccgugggccugcuccuguacugcaaggcccgcuccaccccggugacccugagcaaggaccagcuguccgggaucaacaacaucgccuucagcaacugaggacuaguacuggcugcaucucccuuuccucuguccuccauccuucucccaggauggugaagggggaccugguacccagugauccccaccccaggauccuaaaucaugacuuaccugcuaauaaaaacucauuggaaaagugagaagaucuaaaaaaaaaaaaaaaaaaaaaaaaaaaaaaaaaaaaaaaaaaaaaaaaaaaaaaaaaaaaaaaaugcaucccccccccccccccccccccccccccccccaaaggcucuuuucagagccaccagaauu

SEQ ID NO: 7053 - RNA, 1956 nt, Artificial Sequence
  mRNA product Design f-5 comprising derived and/or modified sequence from HRSV(A2)__F_DSCav1_mut7 (opt2)
gggagacuuucccauucuguagcagaauuugguguugccuguggucuuggucccgcggagaagcuuaccauggagcuccucauccucaaggccaacgccaucaccaccauccucaccgccgucaccuucugcuucgccuccggccagaacaucaccgaggaguucuaccaguccaccugcuccgccgucuccaagggcuaccucuccgcccuccgcaccggcugguacaccuccgucaucaccaucgagcucuccaacaucaaggagaacaagugcaacggcaccgacgccaaggucaagcucaucaagcaggagcucgacaaguacaagaacgccgucaccgagcuccagaugcucaugugcuccacccccgccaccggcuccggcuccgccaucgccuccggcgucgccgucugcaagguccuccaccucgagggcgaggucaacaagaucaaguccgcccuccucuccaccaacaaggccgucgucucccucuccaacggcgucuccguccucaccuucaagguccucgaccucaagaacuacaucgacaagcagcuccuccccauccucaacaagcaguccugcuccaucuccaacaucgagaccgucauggaguuccagcagaagaacaaccgccuccucgagaucacccgcgaguucuccgucaacgccggcgucaccacccccgucuccaccuacaugcucaccaacuccgagcuccucucccucaucaacgacaugcccaucaccaacgaccagaagaagcucauguccaacaacguccagaucguccgccagcaguccuacuccaucaugugcaucaucaaggaggagguccucgccuacgucguccagcucccccucuacggcgucaucgacacccccugcuggaagcuccacaccuccccccucugcaccaccaacaccaaggagggcuccaacaucugccucacccgcaccgaccgcggcugguacugcgacaacgccggcuccgucuccuucuucccccaggccgagaccugcaaggucugcuccaaccgcgucuucugcgacaccaugaacucccucacccuccccuccgaggucaaccucugcaacgucgacaucuucaaccccaaguacgacugcaagaucaugaccuccaagaccgacgucuccuccuccgucaucaccucccucggcgccaucgucuccugcuacggcaagaccaagugcaccgccuccaacaagaacaagggcaucaucaagaccuucuccaacggcugcgacuacgucuccaacaagggcgucgacaccgucuccgucggcaacacccucuacuacgucaacaagcaggagggcaagucccucuacgucaagggcgagcccaucaucaacuucuacgacccccucgucuuccccuccgacgaguucgacgccuccaucucccaggucaacgagaagaucaaccagucccucgccuucauccgcaaguccgacgagcuccuccacaacgucaacgccggcaaguccaccaccaacaucaugaucaccaccaucaucaucgucaucaucgucauccuccucucccucaucgccgucggccuccuccucuacugcaaggcccgcuccacccccgucacccucuccaaggaccagcucuccggcaucaacaacaucgccuucuccaacugaggacuaguacuggcugcaucucccuuuccucuguccuccauccuucucccaggauggugaagggggaccugguacccagugauccccaccccaggauccuaaaucaugacuuaccugcuaauaaaaacucauuggaaaagugagaagaucuaaaaaaaaaaaaaaaaaaaaaaaaaaaaaaaaaaaaaaaaaaaaaaaaaaaaaaaaaaaaaaaaugcaucccccccccccccccccccccccccccccccaaaggcucuuuucagagccaccagaauu

SEQ ID NO: 7054 - RNA, 1956 nt, Artificial Sequence
  mRNA product Design f-5 comprising derived and/or modified sequence from HRSV(A2)__F_DSCav1_mut7 (opt3)
gggagacuuucccauucuguagcagaauuugguguugccuguggucuuggucccgcggagaagcuuaccauggagcugcucauccuuaaggccaacgcuauuaccacaauacugacugcagugacguucugcuuugccagcggccagaauaucaccgaagaguucuaccaauccacauguucugcggucucaaaaggguauuugagugcuuuaagaacuggaugguacaccagcguuauuacaaucgaacuguccaacauuaaggagaauaaaugcaacgguaccgacgccaaggugaaacuaaucaagcaggaacucgauaaguauaaaaaugcaguaacugagcugcagaugcuuauguguucuacacccgccaccggcucggggucagcuauagcaagcggaguggccgucugcaaggugcugcacuuggagggcgaaguuaacaaaaucaagagugcucuccuguccacgaauaaagccguggucucucugagcaacgguguguccguacucacuuuuaagguuuuagaccugaagaauuacauugauaaacagcuuuugccuauccugaacaagcaaucauguaguauuagcaauaucgagaccgugauggaguuccagcagaaaaacaauaggcuacucgaaauaacacgggaguuuucugucaacgcgggggugacuaccccaguguccacauauaugcugaccaauucagaacuucugagcuugauuaacgacaugccgaucacgaacgaucagaagaaacucaugaguaauaacguccaaauuguucgccagcagucuuacuccaucaugugcaucauuaaggaggaagugcuggcauauguagugcaguuaccccuguacggagucauagacacuccuuguuggaaacuccauacaagcccacuuugcaccacuaauacaaaggagggcucgaacaucugucugacccgaacggaucguggcugguacugcgacaaugccgggucuguguccuucuuuccccaagcugaaaccuguaagguuugcucaaacagaguguucugcgauacaaugaauaguuugacucuaccuagcgaggucaaccuguguaauguggacauuuuuaacccaaaauaugauugcaagaucaugaccuccaaaacagacguaucuagcucaguuauaacuagccucggagccauuguguccuguuacgguaagaccaaaugcacagcaagcaauaagaacaagggcaucaucaaaaccuucucuaaugggugugauuaugucucaaacaagggaguggacacugucagugugggcaauacgcuguacuauguuaacaaacaggaggguaagagccuuuacgugaaaggggaacccauuaucaacuuuuaugacccucugguauucccauccgaugaguuugacgcuucuauuucgcaggucaaugaaaagauaaaccaaaguuuggccuucaucaggaaguccgaugagcuccugcacaaugugaacgcgggaaaaucaacaaccaauauuaugaucacuaccaucauuauaguuaucauugugaucuuacugagucuaauugccgucggccuccugcuuuacugcaaggcacggucuacaccggugaccuugagcaaagaccagcuguccggcaucaacaauauagcuuucucaaacugaggacuaguacuggcugcaucucccuuuccucuguccuccauccuucucccaggauggugaagggggaccugguacccagugauccccaccccaggauccuaaaucaugacuuaccugcuaauaaaaacucauuggaaaagugagaagaucuaaaaaaaaaaaaaaaaaaaaaaaaaaaaaaaaaaaaaaaaaaaaaaaaaaaaaaaaaaaaaaaaugcaucccccccccccccccccccccccccccccccaaaggcucuuuucagagccaccagaauu

SEQ ID NO: 7055 - RNA, 1956 nt, Artificial Sequence
  mRNA product Design f-5 comprising derived and/or modified sequence from HRSV(A2)__F_DSCav1_mut7 (opt4)
gggagacuuucccauucuguagcagaauuugguguugccuguggucuuggucccgcggagaagcuuaccauggagcugcugauccugaaggccaacgccaucaccaccauccugaccgccgugaccuucugcuucgccagcggccagaacaucaccgaggaguucuaccagagcaccugcagcgccgugagcaagggcuaccugagcgcccugagaaccggcugguacaccagcgugaucaccaucgagcugagcaacaucaaggagaacaagugcaacggcaccgacgccaaggugaagcugaucaagcaggagcuggacaaguacaagaacgccgugaccgagcugcagaugcugaugugcagcacccccgccaccggcagcggcagcgccaucgccagcggcguggccgugugcaaggugcugcaccuggagggcgaggugaacaagaucaagagcgcccugcugagcaccaacaaggccguggugagccugagcaacggcgugagcgugcugaccuucaaggugcuggaccugaagaacuacaucgacaagcagcugcugcccauccugaacaagcagagcugcagcaucagcaacaucgagaccgugauggaguuccagcagaagaacaacagacugcuggagaucaccagagaguucagcgugaacgccggcgugaccacccccgugagcaccuacaugcugaccaacagcgagcugcugagccugaucaacgacaugcccaucaccaacgaccagaagaagcugaugagcaacaacgugcagaucgugagacagcagagcuacagcaucaugugcaucaucaaggaggaggugcuggccuacguggugcagcugccccuguacggcgugaucgacacccccugcuggaagcugcacaccagcccccugugcaccaccaacaccaaggagggcagcaacaucugccugaccagaaccgacagaggcugguacugcgacaacgccggcagcgugagcuucuucccccaggccgagaccugcaaggugugcagcaacagaguguucugcgacaccaugaacagccugacccugcccagcgaggugaaccugugcaacguggacaucuucaaccccaaguacgacugcaagaucaugaccagcaagaccgacgugagcagcagcgugaucaccagccugggcgccaucgugagcugcuacggcaagaccaagugcaccgccagcaacaagaacaagggcaucaucaagaccuucagcaacggcugcgacuacgugagcaacaagggcguggacaccgugagcgugggcaacacccuguacuacgugaacaagcaggagggcaagagccuguacgugaagggcgagcccaucaucaacuucuacgacccccugguguuccccagcgacgaguucgacgccagcaucagccaggugaacgagaagaucaaccagagccuggccuucaucagaaagagcgacgagcugcugcacaacgugaacgccggcaagagcaccaccaacaucaugaucaccaccaucaucaucgugaucaucgugauccugcugagccugaucgccgugggccugcugcuguacugcaaggccagaagcacccccgugacccugagcaaggaccagcugagcggcaucaacaacaucgccuucagcaacugaggacuaguacuggcugcaucucccuuuccucuguccuccauccuucucccaggauggugaagggggaccugguacccagugauccccaccccaggauccuaaaucaugacuuaccugcuaauaaaaacucauuggaaaagugagaagaucuaaaaaaaaaaaaaaaaaaaaaaaaaaaaaaaaaaaaaaaaaaaaaaaaaaaaaaaaaaaaaaaaugcaucccccccccccccccccccccccccccccccaaaggcucuuuucagagccaccagaauu

SEQ ID NO: 7056 - RNA, 1956 nt, Artificial Sequence
  mRNA product Design f-5 comprising derived and/or modified sequence from HRSV(A2)__F_DSCav1_mut7 (opt5)
gggagacuuucccauucuguagcagaauuugguguugccuguggucuuggucccgcggagaagcuuaccauggagcugcucauccugaaggccaacgcuauuaccacaauccuuacggccgugaccuucugcuuugcgagcggccagaauauuacagaagaguucuaccaauccaccuguucugcugucagcaaaggguaucuguccgcccucagaacaggaugguacaccucuguuaucacaauugaacugagcaacaucaaggagaauaaaugcaacggcaccgacgccaaggugaaacuuaucaagcaggaacuggauaaguauaaaaaugcugugacggagcuccagaugcugauguguuccacccccgccacagggucuggaagcgcuauugccuccggcgucgcggugugcaagguucugcaccucgagggggaagugaacaaaaucaagagcgcccugcuuucuaccaauaaagcugucgugucccugagcaacggaguuucugugcucacauuuaagguccuggaccuuaagaauuacauugauaaacagcugcucccuauccugaacaagcaauccuguagcauuucuaauaucgagaccgugauggaguuccagcagaaaaacaaucggcugcucgaaauuacgcgcgaguuuuccgugaacgccggcgucacaaccccgguuagcacauauaugcugaccaauuccgaacuucugucucucaucaacgacaugcccaucaccaacgaucagaagaaacugaugagcaauaacgugcaaauugugagacagcaguccuacagcaucaugugcauuaucaaggaggaaguccuugcuuaugugguucagcugccucucuacggcgugauugacacacccuguuggaaacugcauacgucuccucugugcaccacaaauaccaaggagggguccaacaucugucucacacggaccgaucgcggaugguacugcgacaaugccggcagcgucucuuucuuuccccaagcggaaacguguaaggugugcagcaacagaguuuucugcgauacaaugaacucccugacccuuccuucugaggugaaucuguguaaugucgacaucuuuaacccgaaauaugauugcaagauuaugaccagcaaaacagacguguccagcucugucaucaccucccucggggccauugugagcuguuacggaaagacaaaaugcacggcuucuaauaagaacaagggcaucauuaaaaccuucuccaaugggugugauuauguuagcaacaagggaguggacacagucuccgugggcaauacccuguacuauguuaacaaacaggagggcaagucucuuuacgugaaaggggaacccaucaucaacuuuuaugacccucuggucuuccccagcgaugaguuugacgccuccauuucucaggugaaugaaaagaucaaccaaagccucgcuuucauucggaaguccgaugagcugcugcacaaugugaacgccggaaaaagcacaaccaauaucaugauuacgaccaucauuaucguuaucauugucauccuccugucucuuauugccgugggccugcuccuguacugcaaggcucgcuccacaccugugacccugagcaaagaccagcuuucugggaucaacaauauugcguucuccaacugaggacuaguacuggcugcaucucccuuuccucuguccuccauccuucucccaggauggugaagggggaccugguacccagugauccccaccccaggauccuaaaucaugacuuaccugcuaauaaaaacucauuggaaaagugagaagaucuaaaaaaaaaaaaaaaaaaaaaaaaaaaaaaaaaaaaaaaaaaaaaaaaaaaaaaaaaaaaaaaaugcaucccccccccccccccccccccccccccccccaaaggcucuuuucagagccaccagaauu

SEQ ID NO: 7057 - RNA, 1956 nt, Artificial Sequence
  mRNA product Design f-5 comprising derived and/or modified sequence from HRSV(A2)__F_DSCav1_mut7 (opt6)
gggagacuuucccauucuguagcagaauuugguguugccuguggucuuggucccgcggagaagcuuaccauggaauuacucauacucaaagcaaaugcaauuaccacuauacucacagcuguaacuuuuuguuucgccucaggacaaaacaucacagaagaauuuuaucaauccacaugcucugccguaucaaaaggcuaccuaucugcccuaagaacagguugguacacaucuguaauaacaaucgaauuauccaacaucaaagaaaacaaaugcaacggcacagacgcaaaagucaaacucaucaaacaagaauuagauaaauauaaaaacgcaguaacagaacuacaaaugcuaaugugcucuacacccgccacaggaucaggauccgcaaucgcuucuggaguagccguuugcaaaguauuacaccuagaaggagaaguaaauaaaauaaaauccgcacuacuaucaacuaauaaagcaguaguaucacuuucuaaugguguaucaguauuaacauucaaaguccucgaccuaaaaaauuacaucgacaaacaacuauuacccauccuuaauaaacaaucaugcuccauaucaaacauagaaacugucauggaauuucaacaaaaaaacaauagacuucuagaaaucacaagagaauuuucuguaaaugcaggaguaacuacaccaguaucaacauauauguuaaccaacuccgaacuacuaucacucauaaacgacaugccaauaacaaacgaccaaaaaaaacuaaugucaaauaacguucaaauaguaagacaacaaucauacucaaucaugugcauaauaaaagaagaaguuuuagcauacgucguacaacuuccccuauacggaguaauagacaccccuugcuggaaacuccacaccucaccacuaugcacuacaaacacaaaagaagguuccaacaucugcuuaacaagaaccgaucgaggaugguacugcgacaacgcugguuccguaucuuucuucccacaagcagaaacaugcaaaguaugcuccaauagaguauucugcgacaccaugaacucacuaacucuaccauccgaaguaaaccuaugcaacgucgacauauuuaauccaaaauaugacugcaaaauaaugacuucaaaaacagacguauccucaucaguaauaacauccuuaggagcaauaguaucauguuacggcaagacaaaauguacagccucaaacaaaaacaaagguaucauuaaaaccuucuccaacggcugcgacuacguaucaaauaaaggugucgauacaguaucaguaggaaacacacucuauuacguuaauaaacaagaaggaaagucauuauacguaaaaggagaaccaauaaucaauuucuacgauccccuagucuuucccucagaugaauuugacgcaagcaucucucaagucaacgaaaaaauaaaccaaucccuagccuucauaagaaaaucagaugaacuacuucauaacgucaacgccggaaaaucaacaaccaacauaaugaucacuacaaucauaauuguaauuauaguaauacuacuaucgcuaauugccguuggacuacuacuauauuguaaagcaagaucaacacccguuacucuauccaaagaucaauuaucaggaaucaacaacauagccuucucaaauuaaggacuaguacuggcugcaucucccuuuccucuguccuccauccuucucccaggauggugaagggggaccugguacccagugauccccaccccaggauccuaaaucaugacuuaccugcuaauaaaaacucauuggaaaagugagaagaucuaaaaaaaaaaaaaaaaaaaaaaaaaaaaaaaaaaaaaaaaaaaaaaaaaaaaaaaaaaaaaaaaugcaucccccccccccccccccccccccccccccccaaaggcucuuuucagagccaccagaauu

SEQ ID NO: 7058 - RNA, 1956 nt, Artificial Sequence
  mRNA product Design f-5 comprising derived and/or modified sequence from HRSV(A2)__F_DSCav1_mut7 (opt11)
gggagacuuucccauucuguagcagaauuugguguugccuguggucuuggucccgcggagaagcuuaccauggaacuacucauacuuaaagccaacgcaauaaccacaauccucaccgccgucacauucugcuucgccucgggacaaaacauaaccgaagaauuuuaccagucuaccugcuccgccgucuccaaggguuaccucuccgcgcuccgcaccgggugguacaccagcguuaucaccaucgaacuaucuaacauaaaagaaaacaagugcaacggaaccgacgcaaaagucaaacucaucaaacaagaacuagacaaauacaagaaugccgucaccgaacuacaaaugcucaugugcuccacccccgccaccggauccggcuccgccauugccuccggcgucgccguaugcaaaguccuucacuuggaaggagaaguuaacaaaauaaaaagcgcccuccugucgaccaacaaagcgguggucagccucuccaacggcgucucuguccucaccuucaaaguccucgaccucaagaacuacauagauaaacaacuacuccccauccuaaacaaacagucaugcagcauauccaacaucgaaaccgucauggaguuccaacagaaaaacaaccgccuccuugaaaucacccgcgaguucucugucaacgccggcgucaccacccccgucuccaccuacaugcucacaaacuccgaacuccucagccucaucaacgacaugccaaucaccaacgaccaaaagaaacucauguccaacaacguacaaaucguucgucaacaaucauacucaaucaugugcaucauuaaagaagaaguccucgcauacgucguccaacucccccucuauggggucaucgacaccccaugcuggaaacuccacaccucuccccuaugcaccaccaacaccaaagaaggcuccaacaucugccuaacccgaaccgaccgcggaugguacugcgacaacgccggcuccgucuccuucuucccccaggccgaaacauguaaagucugcuccaaccguguguucugcgacaccaugaacucacuaacccuccccuccgaagucaaccucugcaacgucgacaucuucaacccgaaauacgacugcaaaauaaugaccagcaaaacagacguauccucuagcgucauuaccagccuaggugcaaucguguccugcuacggcaaaacaaaaugcaccgccuccaacaaaaauaaaggaaucauaaaaaccuucuccaacggcugcgacuacgucagcaacaaaggagucgacaccgucuccguaggaaauacucuauacuaugucaacaaacaagaggguaaaucccucuacgucaaaggcgaacccaucaucaacuucuacgacccccucgucuuccccucugacgaguucgacgccagcauaucacaaguaaacgaaaagaucaaccaaucccucgcauucauucgcaaauccgacgaacuccuacacaacgucaacgccggaaaauccaccaccaacaucaugaucacuacuaucauuaucgucaucaucgucauccuccucucccucaucgcagucggccuucuacucuacugcaaggcacgcucuacacccguaacccugucuaaagaccaacucuccggcaucaacaacaucgcuuucuccaacuaaggacuaguacuggcugcaucucccuuuccucuguccuccauccuucucccaggauggugaagggggaccugguacccagugauccccaccccaggauccuaaaucaugacuuaccugcuaauaaaaacucauuggaaaagugagaagaucuaaaaaaaaaaaaaaaaaaaaaaaaaaaaaaaaaaaaaaaaaaaaaaaaaaaaaaaaaaaaaaaaugcaucccccccccccccccccccccccccccccccaaaggcucuuuucagagccaccagaauu

SEQ ID NO: 7059 - RNA, 1952 nt, Artificial Sequence
  mRNA product Design g-1 comprising derived and/or modified sequence from HRSV(A2)__F_DSCav1_mut7 (opt1)
gggagacuuucccauucuguagcagaauuugguguugccuguggucuuggucccgcggagaagcuuaccauggagcugcucauccugaaggccaacgccaucaccaccauccugacggcggugaccuucugcuucgccagcggccagaacaucaccgaggaguucuaccaguccacgugcagcgccgucuccaagggguaccucagcgcccugcggaccggcugguacaccuccgugaucaccaucgagcugagcaacaucaaggagaacaagugcaacgggaccgacgccaaggugaagcucaucaagcaggagcuggacaaguacaagaacgcggucacggagcugcagaugcugaugugcuccaccccggcaaccggcuccggcuccgccaucgcgagcggcgucgccgugugcaaggugcugcaccucgagggggaggucaacaagaucaagagcgcccugcuguccaccaacaaggccguggugagccucuccaacggcgucagcgugcugaccuucaaggugcuggaccucaagaacuacaucgacaagcagcugcugcccauccugaacaagcagagcugcuccaucagcaacaucgagacggugauggaguuccagcagaagaacaaccggcuccuggagaucacccgcgaguucagcgugaacgccggggucaccacccccguguccacguacaugcugaccaacagcgagcuccugucccugaucaacgacaugccgaucaccaacgaccagaagaagcucaugagcaacaacgugcagaucguccggcagcaguccuacagcaucaugugcaucaucaaggaggaggugcuggcguacgugguccagcugccccucuacggcgugaucgacacccccugcuggaagcugcacacgagcccccugugcaccaccaacaccaaggagggguccaacaucugccucacgcgcaccgaccggggcugguacugcgacaacgccggcagcgucuccuucuucccgcaggccgagaccugcaaggugugcagcaaccgcguguucugcgacaccaugaacucccugacgcugcccagcgagguaaaccucugcaacgucgacaucuucaaccccaaguacgacugcaagaucaugaccuccaagaccgacgugagcuccagcgugaucaccucccugggggccaucgucagcugcuacggcaagacgaagugcaccgccagcaacaagaacaaggggaucaucaagaccuucuccaacggcugcgacuacgugagcaacaagggcguggacaccguguccgucgggaacacccuguacuacgugaacaagcaggagggcaagagccucuacgugaagggggagcccaucaucaacuucuacgacccgcuggucuuccccuccgacgaguucgacgcgagcaucucccaggugaacgagaagaucaaccagagccuggccuucauccgcaaguccgacgagcugcuccacaacgugaacgccggcaagagcacgaccaacaucaugaucaccaccaucaucaucgucaucaucgugauccugcugucccucaucgccguggggcugcugcucuacugcaaggcccggagcacgcccgucacccuguccaaggaccagcugagcggcaucaacaacaucgcguucuccaacugaggacuaguggaagcauuuuccuggcugauuaaaagaaauuacucagcuauggucaucuguuccuguuagaaggcuaugcagcauauuauauacuaugcgcauguuaugaaaugcauaauaaaaaauuuuaaaaaaucuaaaagaucuaaaaaaaaaaaaaaaaaaaaaaaaaaaaaaaaaaaaaaaaaaaaaaaaaaaaaaaaaaaaaaaaugcaucccccccccccccccccccccccccccccccaaaggcucuuuucagagccaccagaauu

SEQ ID NO: 7060 - RNA, 1952 nt, Artificial Sequence
  mRNA product Design g-1 comprising derived and/or modified sequence from HRSV(A2)__F_DSCav1_mut7 (opt1)
gggagacuuucccauucuguagcagaauuugguguugccuguggucuuggucccgcggagaagcuuaccauggagcugcucauccugaaggccaacgccaucaccaccauccugacggcggugaccuucugcuucgccagcggccagaacaucaccgaggaguucuaccaguccacgugcagcgccgucuccaagggguaccucagcgcccugcgcaccggcugguacaccuccgugaucaccaucgagcugagcaacaucaaggagaacaagugcaacgggaccgacgccaaggugaagcucaucaagcaggagcuggacaaguacaagaacgcggucacggagcugcagaugcucaugugcuccacccccgccaccggcagcggguccgccaucgccagcggcguggcggugugcaagguccugcaccuggagggcgaggugaacaagaucaaguccgcccuccugagcaccaacaaggccguggucucccugagcaacgggguguccgugcucacguucaagguccuggaccugaagaacuacaucgacaagcagcuccugccgauccugaacaagcagagcugcuccaucagcaacaucgagaccgugauggaguuccagcagaagaacaaccggcuccuggagaucacccgcgaguucuccgugaacgccggcgucaccacgcccgugagcaccuacaugcugaccaacagcgagcuccugucccugaucaacgacaugcccaucaccaacgaccagaagaagcucaugagcaacaacgugcagaucguccggcagcaguccuacagcaucaugugcaucaucaaggaggaggugcuggccuacgugguccagcugccccucuacggggugaucgacacgccgugcuggaagcugcacaccagcccccugugcaccaccaacacgaaggagggcagcaacaucugccucacccgcaccgaccgggggugguacugcgacaacgcgggcuccgugagcuucuucccccaggccgagaccugcaaggucugcuccaaccgcguguucugcgacacgaugaacagccugacccugcccuccgaggucaaccucugcaacguggacaucuucaacccgaaguacgacugcaagaucaugaccagcaagaccgacguguccagcuccgucaucacgagccugggcgccaucguguccugcuacgggaagaccaagugcaccgccagcaacaagaacaagggcaucaucaagaccuucuccaacgggugcgacuacgugagcaacaagggcgucgacacggugagcgugggcaacacccuguacuacgucaacaagcaggaggggaagucccucuacgugaagggcgagcccaucaucaacuucuacgacccccugguguuccccagcgacgaguucgacgccuccaucagccaggucaacgagaagaucaaccagucccuggcguucauccggaaguccgacgagcuccugcacaacgugaacgccgggaaguccaccaccaacaucaugaucaccacgaucaucaucgugaucaucgucauccugcucagccugaucgccgugggccugcuccuguacugcaaggcccgcuccaccccggugacccugagcaaggaccagcuguccgggaucaacaacaucgccuucagcaacugaggacuaguggaagcauuuuccuggcugauuaaaagaaauuacucagcuauggucaucuguuccuguuagaaggcuaugcagcauauuauauacuaugcgcauguuaugaaaugcauaauaaaaaauuuuaaaaaaucuaaaagaucuaaaaaaaaaaaaaaaaaaaaaaaaaaaaaaaaaaaaaaaaaaaaaaaaaaaaaaaaaaaaaaaaugcaucccccccccccccccccccccccccccccccaaaggcucuuuucagagccaccagaauu

SEQ ID NO: 7061 - RNA, 1952 nt, Artificial Sequence
  mRNA product Design g-1 comprising derived and/or modified sequence from HRSV(A2)__F_DSCav1_mut7 (opt2)
gggagacuuucccauucuguagcagaauuugguguugccuguggucuuggucccgcggagaagcuuaccauggagcuccucauccucaaggccaacgccaucaccaccauccucaccgccgucaccuucugcuucgccuccggccagaacaucaccgaggaguucuaccaguccaccugcuccgccgucuccaagggcuaccucuccgcccuccgcaccggcugguacaccuccgucaucaccaucgagcucuccaacaucaaggagaacaagugcaacggcaccgacgccaaggucaagcucaucaagcaggagcucgacaaguacaagaacgccgucaccgagcuccagaugcucaugugcuccacccccgccaccggcuccggcuccgccaucgccuccggcgucgccgucugcaagguccuccaccucgagggcgaggucaacaagaucaaguccgcccuccucuccaccaacaaggccgucgucucccucuccaacggcgucuccguccucaccuucaagguccucgaccucaagaacuacaucgacaagcagcuccuccccauccucaacaagcaguccugcuccaucuccaacaucgagaccgucauggaguuccagcagaagaacaaccgccuccucgagaucacccgcgaguucuccgucaacgccggcgucaccacccccgucuccaccuacaugcucaccaacuccgagcuccucucccucaucaacgacaugcccaucaccaacgaccagaagaagcucauguccaacaacguccagaucguccgccagcaguccuacuccaucaugugcaucaucaaggaggagguccucgccuacgucguccagcucccccucuacggcgucaucgacacccccugcuggaagcuccacaccuccccccucugcaccaccaacaccaaggagggcuccaacaucugccucacccgcaccgaccgcggcugguacugcgacaacgccggcuccgucuccuucuucccccaggccgagaccugcaaggucugcuccaaccgcgucuucugcgacaccaugaacucccucacccuccccuccgaggucaaccucugcaacgucgacaucuucaaccccaaguacgacugcaagaucaugaccuccaagaccgacgucuccuccuccgucaucaccucccucggcgccaucgucuccugcuacggcaagaccaagugcaccgccuccaacaagaacaagggcaucaucaagaccuucuccaacggcugcgacuacgucuccaacaagggcgucgacaccgucuccgucggcaacacccucuacuacgucaacaagcaggagggcaagucccucuacgucaagggcgagcccaucaucaacuucuacgacccccucgucuuccccuccgacgaguucgacgccuccaucucccaggucaacgagaagaucaaccagucccucgccuucauccgcaaguccgacgagcuccuccacaacgucaacgccggcaaguccaccaccaacaucaugaucaccaccaucaucaucgucaucaucgucauccuccucucccucaucgccgucggccuccuccucuacugcaaggcccgcuccacccccgucacccucuccaaggaccagcucuccggcaucaacaacaucgccuucuccaacugaggacuaguggaagcauuuuccuggcugauuaaaagaaauuacucagcuauggucaucuguuccuguuagaaggcuaugcagcauauuauauacuaugcgcauguuaugaaaugcauaauaaaaaauuuuaaaaaaucuaaaagaucuaaaaaaaaaaaaaaaaaaaaaaaaaaaaaaaaaaaaaaaaaaaaaaaaaaaaaaaaaaaaaaaaugcaucccccccccccccccccccccccccccccccaaaggcucuuuucagagccaccagaauu

SEQ ID NO: 7062 - RNA, 1952 nt, Artificial Sequence
  mRNA product Design g-1 comprising derived and/or modified sequence from HRSV(A2)__F_DSCav1_mut7 (opt3)
gggagacuuucccauucuguagcagaauuugguguugccuguggucuuggucccgcggagaagcuuaccauggagcugcucauccuuaaggccaacgcuauuaccacaauacugacugcagugacguucugcuuugccagcggccagaauaucaccgaagaguucuaccaauccacauguucugcggucucaaaaggguauuugagugcuuuaagaacuggaugguacaccagcguuauuacaaucgaacuguccaacauuaaggagaauaaaugcaacgguaccgacgccaaggugaaacuaaucaagcaggaacucgauaaguauaaaaaugcaguaacugagcugcagaugcuuauguguucuacacccgccaccggcucggggucagcuauagcaagcggaguggccgucugcaaggugcugcacuuggagggcgaaguuaacaaaaucaagagugcucuccuguccacgaauaaagccguggucucucugagcaacgguguguccguacucacuuuuaagguuuuagaccugaagaauuacauugauaaacagcuuuugccuauccugaacaagcaaucauguaguauuagcaauaucgagaccgugauggaguuccagcagaaaaacaauaggcuacucgaaauaacacgggaguuuucugucaacgcgggggugacuaccccaguguccacauauaugcugaccaauucagaacuucugagcuugauuaacgacaugccgaucacgaacgaucagaagaaacucaugaguaauaacguccaaauuguucgccagcagucuuacuccaucaugugcaucauuaaggaggaagugcuggcauauguagugcaguuaccccuguacggagucauagacacuccuuguuggaaacuccauacaagcccacuuugcaccacuaauacaaaggagggcucgaacaucugucugacccgaacggaucguggcugguacugcgacaaugccgggucuguguccuucuuuccccaagcugaaaccuguaagguuugcucaaacagaguguucugcgauacaaugaauaguuugacucuaccuagcgaggucaaccuguguaauguggacauuuuuaacccaaaauaugauugcaagaucaugaccuccaaaacagacguaucuagcucaguuauaacuagccucggagccauuguguccuguuacgguaagaccaaaugcacagcaagcaauaagaacaagggcaucaucaaaaccuucucuaaugggugugauuaugucucaaacaagggaguggacacugucagugugggcaauacgcuguacuauguuaacaaacaggaggguaagagccuuuacgugaaaggggaacccauuaucaacuuuuaugacccucugguauucccauccgaugaguuugacgcuucuauuucgcaggucaaugaaaagauaaaccaaaguuuggccuucaucaggaaguccgaugagcuccugcacaaugugaacgcgggaaaaucaacaaccaauauuaugaucacuaccaucauuauaguuaucauugugaucuuacugagucuaauugccgucggccuccugcuuuacugcaaggcacggucuacaccggugaccuugagcaaagaccagcuguccggcaucaacaauauagcuuucucaaacugaggacuaguggaagcauuuuccuggcugauuaaaagaaauuacucagcuauggucaucuguuccuguuagaaggcuaugcagcauauuauauacuaugcgcauguuaugaaaugcauaauaaaaaauuuuaaaaaaucuaaaagaucuaaaaaaaaaaaaaaaaaaaaaaaaaaaaaaaaaaaaaaaaaaaaaaaaaaaaaaaaaaaaaaaaugcaucccccccccccccccccccccccccccccccaaaggcucuuuucagagccaccagaauu

SEQ ID NO: 7063 - RNA, 1952 nt, Artificial Sequence
  mRNA product Design g-1 comprising derived and/or modified sequence from HRSV(A2)__F_DSCav1_mut7 (opt4)
gggagacuuucccauucuguagcagaauuugguguugccuguggucuuggucccgcggagaagcuuaccauggagcugcugauccugaaggccaacgccaucaccaccauccugaccgccgugaccuucugcuucgccagcggccagaacaucaccgaggaguucuaccagagcaccugcagcgccgugagcaagggcuaccugagcgcccugagaaccggcugguacaccagcgugaucaccaucgagcugagcaacaucaaggagaacaagugcaacggcaccgacgccaaggugaagcugaucaagcaggagcuggacaaguacaagaacgccgugaccgagcugcagaugcugaugugcagcacccccgccaccggcagcggcagcgccaucgccagcggcguggccgugugcaaggugcugcaccuggagggcgaggugaacaagaucaagagcgcccugcugagcaccaacaaggccguggugagccugagcaacggcgugagcgugcugaccuucaaggugcuggaccugaagaacuacaucgacaagcagcugcugcccauccugaacaagcagagcugcagcaucagcaacaucgagaccgugauggaguuccagcagaagaacaacagacugcuggagaucaccagagaguucagcgugaacgccggcgugaccacccccgugagcaccuacaugcugaccaacagcgagcugcugagccugaucaacgacaugcccaucaccaacgaccagaagaagcugaugagcaacaacgugcagaucgugagacagcagagcuacagcaucaugugcaucaucaaggaggaggugcuggccuacguggugcagcugccccuguacggcgugaucgacacccccugcuggaagcugcacaccagcccccugugcaccaccaacaccaaggagggcagcaacaucugccugaccagaaccgacagaggcugguacugcgacaacgccggcagcgugagcuucuucccccaggccgagaccugcaaggugugcagcaacagaguguucugcgacaccaugaacagccugacccugcccagcgaggugaaccugugcaacguggacaucuucaaccccaaguacgacugcaagaucaugaccagcaagaccgacgugagcagcagcgugaucaccagccugggcgccaucgugagcugcuacggcaagaccaagugcaccgccagcaacaagaacaagggcaucaucaagaccuucagcaacggcugcgacuacgugagcaacaagggcguggacaccgugagcgugggcaacacccuguacuacgugaacaagcaggagggcaagagccuguacgugaagggcgagcccaucaucaacuucuacgacccccugguguuccccagcgacgaguucgacgccagcaucagccaggugaacgagaagaucaaccagagccuggccuucaucagaaagagcgacgagcugcugcacaacgugaacgccggcaagagcaccaccaacaucaugaucaccaccaucaucaucgugaucaucgugauccugcugagccugaucgccgugggccugcugcuguacugcaaggccagaagcacccccgugacccugagcaaggaccagcugagcggcaucaacaacaucgccuucagcaacugaggacuaguggaagcauuuuccuggcugauuaaaagaaauuacucagcuauggucaucuguuccuguuagaaggcuaugcagcauauuauauacuaugcgcauguuaugaaaugcauaauaaaaaauuuuaaaaaaucuaaaagaucuaaaaaaaaaaaaaaaaaaaaaaaaaaaaaaaaaaaaaaaaaaaaaaaaaaaaaaaaaaaaaaaaugcaucccccccccccccccccccccccccccccccaaaggcucuuuucagagccaccagaauu

SEQ ID NO: 7064 - RNA, 1952 nt, Artificial Sequence
  mRNA product Design g-1 comprising derived and/or modified sequence from HRSV(A2)__F_DSCav1_mut7 (opt5)
gggagacuuucccauucuguagcagaauuugguguugccuguggucuuggucccgcggagaagcuuaccauggagcugcucauccugaaggccaacgcuauuaccacaauccuuacggccgugaccuucugcuuugcgagcggccagaauauuacagaagaguucuaccaauccaccuguucugcugucagcaaaggguaucuguccgcccucagaacaggaugguacaccucuguuaucacaauugaacugagcaacaucaaggagaauaaaugcaacggcaccgacgccaaggugaaacuuaucaagcaggaacuggauaaguauaaaaaugcugugacggagcuccagaugcugauguguuccacccccgccacagggucuggaagcgcuauugccuccggcgucgcggugugcaagguucugcaccucgagggggaagugaacaaaaucaagagcgcccugcuuucuaccaauaaagcugucgugucccugagcaacggaguuucugugcucacauuuaagguccuggaccuuaagaauuacauugauaaacagcugcucccuauccugaacaagcaauccuguagcauuucuaauaucgagaccgugauggaguuccagcagaaaaacaaucggcugcucgaaauuacgcgcgaguuuuccgugaacgccggcgucacaaccccgguuagcacauauaugcugaccaauuccgaacuucugucucucaucaacgacaugcccaucaccaacgaucagaagaaacugaugagcaauaacgugcaaauugugagacagcaguccuacagcaucaugugcauuaucaaggaggaaguccuugcuuaugugguucagcugccucucuacggcgugauugacacacccuguuggaaacugcauacgucuccucugugcaccacaaauaccaaggagggguccaacaucugucucacacggaccgaucgcggaugguacugcgacaaugccggcagcgucucuuucuuuccccaagcggaaacguguaaggugugcagcaacagaguuuucugcgauacaaugaacucccugacccuuccuucugaggugaaucuguguaaugucgacaucuuuaacccgaaauaugauugcaagauuaugaccagcaaaacagacguguccagcucugucaucaccucccucggggccauugugagcuguuacggaaagacaaaaugcacggcuucuaauaagaacaagggcaucauuaaaaccuucuccaaugggugugauuauguuagcaacaagggaguggacacagucuccgugggcaauacccuguacuauguuaacaaacaggagggcaagucucuuuacgugaaaggggaacccaucaucaacuuuuaugacccucuggucuuccccagcgaugaguuugacgccuccauuucucaggugaaugaaaagaucaaccaaagccucgcuuucauucggaaguccgaugagcugcugcacaaugugaacgccggaaaaagcacaaccaauaucaugauuacgaccaucauuaucguuaucauugucauccuccugucucuuauugccgugggccugcuccuguacugcaaggcucgcuccacaccugugacccugagcaaagaccagcuuucugggaucaacaauauugcguucuccaacugaggacuaguggaagcauuuuccuggcugauuaaaagaaauuacucagcuauggucaucuguuccuguuagaaggcuaugcagcauauuauauacuaugcgcauguuaugaaaugcauaauaaaaaauuuuaaaaaaucuaaaagaucuaaaaaaaaaaaaaaaaaaaaaaaaaaaaaaaaaaaaaaaaaaaaaaaaaaaaaaaaaaaaaaaaugcaucccccccccccccccccccccccccccccccaaaggcucuuuucagagccaccagaauu

SEQ ID NO: 7065 - RNA, 1952 nt, Artificial Sequence
  mRNA product Design g-1 comprising derived and/or modified sequence from HRSV(A2)__F_DSCav1_mut7 (opt6)
gggagacuuucccauucuguagcagaauuugguguugccuguggucuuggucccgcggagaagcuuaccauggaauuacucauacucaaagcaaaugcaauuaccacuauacucacagcuguaacuuuuuguuucgccucaggacaaaacaucacagaagaauuuuaucaauccacaugcucugccguaucaaaaggcuaccuaucugcccuaagaacagguugguacacaucuguaauaacaaucgaauuauccaacaucaaagaaaacaaaugcaacggcacagacgcaaaagucaaacucaucaaacaagaauuagauaaauauaaaaacgcaguaacagaacuacaaaugcuaaugugcucuacacccgccacaggaucaggauccgcaaucgcuucuggaguagccguuugcaaaguauuacaccuagaaggagaaguaaauaaaauaaaauccgcacuacuaucaacuaauaaagcaguaguaucacuuucuaaugguguaucaguauuaacauucaaaguccucgaccuaaaaaauuacaucgacaaacaacuauuacccauccuuaauaaacaaucaugcuccauaucaaacauagaaacugucauggaauuucaacaaaaaaacaauagacuucuagaaaucacaagagaauuuucuguaaaugcaggaguaacuacaccaguaucaacauauauguuaaccaacuccgaacuacuaucacucauaaacgacaugccaauaacaaacgaccaaaaaaaacuaaugucaaauaacguucaaauaguaagacaacaaucauacucaaucaugugcauaauaaaagaagaaguuuuagcauacgucguacaacuuccccuauacggaguaauagacaccccuugcuggaaacuccacaccucaccacuaugcacuacaaacacaaaagaagguuccaacaucugcuuaacaagaaccgaucgaggaugguacugcgacaacgcugguuccguaucuuucuucccacaagcagaaacaugcaaaguaugcuccaauagaguauucugcgacaccaugaacucacuaacucuaccauccgaaguaaaccuaugcaacgucgacauauuuaauccaaaauaugacugcaaaauaaugacuucaaaaacagacguauccucaucaguaauaacauccuuaggagcaauaguaucauguuacggcaagacaaaauguacagccucaaacaaaaacaaagguaucauuaaaaccuucuccaacggcugcgacuacguaucaaauaaaggugucgauacaguaucaguaggaaacacacucuauuacguuaauaaacaagaaggaaagucauuauacguaaaaggagaaccaauaaucaauuucuacgauccccuagucuuucccucagaugaauuugacgcaagcaucucucaagucaacgaaaaaauaaaccaaucccuagccuucauaagaaaaucagaugaacuacuucauaacgucaacgccggaaaaucaacaaccaacauaaugaucacuacaaucauaauuguaauuauaguaauacuacuaucgcuaauugccguuggacuacuacuauauuguaaagcaagaucaacacccguuacucuauccaaagaucaauuaucaggaaucaacaacauagccuucucaaauuaaggacuaguggaagcauuuuccuggcugauuaaaagaaauuacucagcuauggucaucuguuccuguuagaaggcuaugcagcauauuauauacuaugcgcauguuaugaaaugcauaauaaaaaauuuuaaaaaaucuaaaagaucuaaaaaaaaaaaaaaaaaaaaaaaaaaaaaaaaaaaaaaaaaaaaaaaaaaaaaaaaaaaaaaaaugcaucccccccccccccccccccccccccccccccaaaggcucuuuucagagccaccagaauu

SEQ ID NO: 7066 - RNA, 1952 nt, Artificial Sequence
  mRNA product Design g-1 comprising derived and/or modified sequence from HRSV(A2)__F_DSCav1_mut7 (opt11)
gggagacuuucccauucuguagcagaauuugguguugccuguggucuuggucccgcggagaagcuuaccauggaacuacucauacuuaaagccaacgcaauaaccacaauccucaccgccgucacauucugcuucgccucgggacaaaacauaaccgaagaauuuuaccagucuaccugcuccgccgucuccaaggguuaccucuccgcgcuccgcaccgggugguacaccagcguuaucaccaucgaacuaucuaacauaaaagaaaacaagugcaacggaaccgacgcaaaagucaaacucaucaaacaagaacuagacaaauacaagaaugccgucaccgaacuacaaaugcucaugugcuccacccccgccaccggauccggcuccgccauugccuccggcgucgccguaugcaaaguccuucacuuggaaggagaaguuaacaaaauaaaaagcgcccuccugucgaccaacaaagcgguggucagccucuccaacggcgucucuguccucaccuucaaaguccucgaccucaagaacuacauagauaaacaacuacuccccauccuaaacaaacagucaugcagcauauccaacaucgaaaccgucauggaguuccaacagaaaaacaaccgccuccuugaaaucacccgcgaguucucugucaacgccggcgucaccacccccgucuccaccuacaugcucacaaacuccgaacuccucagccucaucaacgacaugccaaucaccaacgaccaaaagaaacucauguccaacaacguacaaaucguucgucaacaaucauacucaaucaugugcaucauuaaagaagaaguccucgcauacgucguccaacucccccucuauggggucaucgacaccccaugcuggaaacuccacaccucuccccuaugcaccaccaacaccaaagaaggcuccaacaucugccuaacccgaaccgaccgcggaugguacugcgacaacgccggcuccgucuccuucuucccccaggccgaaacauguaaagucugcuccaaccguguguucugcgacaccaugaacucacuaacccuccccuccgaagucaaccucugcaacgucgacaucuucaacccgaaauacgacugcaaaauaaugaccagcaaaacagacguauccucuagcgucauuaccagccuaggugcaaucguguccugcuacggcaaaacaaaaugcaccgccuccaacaaaaauaaaggaaucauaaaaaccuucuccaacggcugcgacuacgucagcaacaaaggagucgacaccgucuccguaggaaauacucuauacuaugucaacaaacaagaggguaaaucccucuacgucaaaggcgaacccaucaucaacuucuacgacccccucgucuuccccucugacgaguucgacgccagcauaucacaaguaaacgaaaagaucaaccaaucccucgcauucauucgcaaauccgacgaacuccuacacaacgucaacgccggaaaauccaccaccaacaucaugaucacuacuaucauuaucgucaucaucgucauccuccucucccucaucgcagucggccuucuacucuacugcaaggcacgcucuacacccguaacccugucuaaagaccaacucuccggcaucaacaacaucgcuuucuccaacuaaggacuaguggaagcauuuuccuggcugauuaaaagaaauuacucagcuauggucaucuguuccuguuagaaggcuaugcagcauauuauauacuaugcgcauguuaugaaaugcauaauaaaaaauuuuaaaaaaucuaaaagaucuaaaaaaaaaaaaaaaaaaaaaaaaaaaaaaaaaaaaaaaaaaaaaaaaaaaaaaaaaaaaaaaaugcaucccccccccccccccccccccccccccccccaaaggcucuuuucagagccaccagaauu

SEQ ID NO: 7067 - RNA, 1967 nt, Artificial Sequence
  mRNA product Design g-2 comprising derived and/or modified sequence from HRSV(A2)__F_DSCav1_mut7 (opt1)
gggagaguccgcucagccagguugcagaagcggcuuagcguguguccuaaucuucucucugcguguagguaggccugugccgcaaacaagcuuaccauggagcugcucauccugaaggccaacgccaucaccaccauccugacggcggugaccuucugcuucgccagcggccagaacaucaccgaggaguucuaccaguccacgugcagcgccgucuccaagggguaccucagcgcccugcggaccggcugguacaccuccgugaucaccaucgagcugagcaacaucaaggagaacaagugcaacgggaccgacgccaaggugaagcucaucaagcaggagcuggacaaguacaagaacgcggucacggagcugcagaugcugaugugcuccaccccggcaaccggcuccggcuccgccaucgcgagcggcgucgccgugugcaaggugcugcaccucgagggggaggucaacaagaucaagagcgcccugcuguccaccaacaaggccguggugagccucuccaacggcgucagcgugcugaccuucaaggugcuggaccucaagaacuacaucgacaagcagcugcugcccauccugaacaagcagagcugcuccaucagcaacaucgagacggugauggaguuccagcagaagaacaaccggcuccuggagaucacccgcgaguucagcgugaacgccggggucaccacccccguguccacguacaugcugaccaacagcgagcuccugucccugaucaacgacaugccgaucaccaacgaccagaagaagcucaugagcaacaacgugcagaucguccggcagcaguccuacagcaucaugugcaucaucaaggaggaggugcuggcguacgugguccagcugccccucuacggcgugaucgacacccccugcuggaagcugcacacgagcccccugugcaccaccaacaccaaggagggguccaacaucugccucacgcgcaccgaccggggcugguacugcgacaacgccggcagcgucuccuucuucccgcaggccgagaccugcaaggugugcagcaaccgcguguucugcgacaccaugaacucccugacgcugcccagcgagguaaaccucugcaacgucgacaucuucaaccccaaguacgacugcaagaucaugaccuccaagaccgacgugagcuccagcgugaucaccucccugggggccaucgucagcugcuacggcaagacgaagugcaccgccagcaacaagaacaaggggaucaucaagaccuucuccaacggcugcgacuacgugagcaacaagggcguggacaccguguccgucgggaacacccuguacuacgugaacaagcaggagggcaagagccucuacgugaagggggagcccaucaucaacuucuacgacccgcuggucuuccccuccgacgaguucgacgcgagcaucucccaggugaacgagaagaucaaccagagccuggccuucauccgcaaguccgacgagcugcuccacaacgugaacgccggcaagagcacgaccaacaucaugaucaccaccaucaucaucgucaucaucgugauccugcugucccucaucgccguggggcugcugcucuacugcaaggcccggagcacgcccgucacccuguccaaggaccagcugagcggcaucaacaacaucgcguucuccaacugaggacuaguaauaaggaaacuguaugaaugucugugggcaggaagugaagagauccuucuguaaagguuuuuggaauuaugucugcugaauaauaaacuuuuuugaaauaauaaaucugguagaaaaaugagaucuaaaaaaaaaaaaaaaaaaaaaaaaaaaaaaaaaaaaaaaaaaaaaaaaaaaaaaaaaaaaaaaaugcaucccccccccccccccccccccccccccccccaaaggcucuuuucagagccaccagaauu

SEQ ID NO: 7068 - RNA, 1967 nt, Artificial Sequence
  mRNA product Design g-2 comprising derived and/or modified sequence from HRSV(A2)__F_DSCav1_mut7 (opt1)
gggagaguccgcucagccagguugcagaagcggcuuagcguguguccuaaucuucucucugcguguagguaggccugugccgcaaacaagcuuaccauggagcugcucauccugaaggccaacgccaucaccaccauccugacggcggugaccuucugcuucgccagcggccagaacaucaccgaggaguucuaccaguccacgugcagcgccgucuccaagggguaccucagcgcccugcgcaccggcugguacaccuccgugaucaccaucgagcugagcaacaucaaggagaacaagugcaacgggaccgacgccaaggugaagcucaucaagcaggagcuggacaaguacaagaacgcggucacggagcugcagaugcucaugugcuccacccccgccaccggcagcggguccgccaucgccagcggcguggcggugugcaagguccugcaccuggagggcgaggugaacaagaucaaguccgcccuccugagcaccaacaaggccguggucucccugagcaacgggguguccgugcucacguucaagguccuggaccugaagaacuacaucgacaagcagcuccugccgauccugaacaagcagagcugcuccaucagcaacaucgagaccgugauggaguuccagcagaagaacaaccggcuccuggagaucacccgcgaguucuccgugaacgccggcgucaccacgcccgugagcaccuacaugcugaccaacagcgagcuccugucccugaucaacgacaugcccaucaccaacgaccagaagaagcucaugagcaacaacgugcagaucguccggcagcaguccuacagcaucaugugcaucaucaaggaggaggugcuggccuacgugguccagcugccccucuacggggugaucgacacgccgugcuggaagcugcacaccagcccccugugcaccaccaacacgaaggagggcagcaacaucugccucacccgcaccgaccgggggugguacugcgacaacgcgggcuccgugagcuucuucccccaggccgagaccugcaaggucugcuccaaccgcguguucugcgacacgaugaacagccugacccugcccuccgaggucaaccucugcaacguggacaucuucaacccgaaguacgacugcaagaucaugaccagcaagaccgacguguccagcuccgucaucacgagccugggcgccaucguguccugcuacgggaagaccaagugcaccgccagcaacaagaacaagggcaucaucaagaccuucuccaacgggugcgacuacgugagcaacaagggcgucgacacggugagcgugggcaacacccuguacuacgucaacaagcaggaggggaagucccucuacgugaagggcgagcccaucaucaacuucuacgacccccugguguuccccagcgacgaguucgacgccuccaucagccaggucaacgagaagaucaaccagucccuggcguucauccggaaguccgacgagcuccugcacaacgugaacgccgggaaguccaccaccaacaucaugaucaccacgaucaucaucgugaucaucgucauccugcucagccugaucgccgugggccugcuccuguacugcaaggcccgcuccaccccggugacccugagcaaggaccagcuguccgggaucaacaacaucgccuucagcaacugaggacuaguaauaaggaaacuguaugaaugucugugggcaggaagugaagagauccuucuguaaagguuuuuggaauuaugucugcugaauaauaaacuuuuuugaaauaauaaaucugguagaaaaaugagaucuaaaaaaaaaaaaaaaaaaaaaaaaaaaaaaaaaaaaaaaaaaaaaaaaaaaaaaaaaaaaaaaaugcaucccccccccccccccccccccccccccccccaaaggcucuuuucagagccaccagaauu

SEQ ID NO: 7069 - RNA, 1967 nt, Artificial Sequence
  mRNA product Design g-2 comprising derived and/or modified sequence from HRSV(A2)__F_DSCav1_mut7 (opt2)
gggagaguccgcucagccagguugcagaagcggcuuagcguguguccuaaucuucucucugcguguagguaggccugugccgcaaacaagcuuaccauggagcuccucauccucaaggccaacgccaucaccaccauccucaccgccgucaccuucugcuucgccuccggccagaacaucaccgaggaguucuaccaguccaccugcuccgccgucuccaagggcuaccucuccgcccuccgcaccggcugguacaccuccgucaucaccaucgagcucuccaacaucaaggagaacaagugcaacggcaccgacgccaaggucaagcucaucaagcaggagcucgacaaguacaagaacgccgucaccgagcuccagaugcucaugugcuccacccccgccaccggcuccggcuccgccaucgccuccggcgucgccgucugcaagguccuccaccucgagggcgaggucaacaagaucaaguccgcccuccucuccaccaacaaggccgucgucucccucuccaacggcgucuccguccucaccuucaagguccucgaccucaagaacuacaucgacaagcagcuccuccccauccucaacaagcaguccugcuccaucuccaacaucgagaccgucauggaguuccagcagaagaacaaccgccuccucgagaucacccgcgaguucuccgucaacgccggcgucaccacccccgucuccaccuacaugcucaccaacuccgagcuccucucccucaucaacgacaugcccaucaccaacgaccagaagaagcucauguccaacaacguccagaucguccgccagcaguccuacuccaucaugugcaucaucaaggaggagguccucgccuacgucguccagcucccccucuacggcgucaucgacacccccugcuggaagcuccacaccuccccccucugcaccaccaacaccaaggagggcuccaacaucugccucacccgcaccgaccgcggcugguacugcgacaacgccggcuccgucuccuucuucccccaggccgagaccugcaaggucugcuccaaccgcgucuucugcgacaccaugaacucccucacccuccccuccgaggucaaccucugcaacgucgacaucuucaaccccaaguacgacugcaagaucaugaccuccaagaccgacgucuccuccuccgucaucaccucccucggcgccaucgucuccugcuacggcaagaccaagugcaccgccuccaacaagaacaagggcaucaucaagaccuucuccaacggcugcgacuacgucuccaacaagggcgucgacaccgucuccgucggcaacacccucuacuacgucaacaagcaggagggcaagucccucuacgucaagggcgagcccaucaucaacuucuacgacccccucgucuuccccuccgacgaguucgacgccuccaucucccaggucaacgagaagaucaaccagucccucgccuucauccgcaaguccgacgagcuccuccacaacgucaacgccggcaaguccaccaccaacaucaugaucaccaccaucaucaucgucaucaucgucauccuccucucccucaucgccgucggccuccuccucuacugcaaggcccgcuccacccccgucacccucuccaaggaccagcucuccggcaucaacaacaucgccuucuccaacugaggacuaguaauaaggaaacuguaugaaugucugugggcaggaagugaagagauccuucuguaaagguuuuuggaauuaugucugcugaauaauaaacuuuuuugaaauaauaaaucugguagaaaaaugagaucuaaaaaaaaaaaaaaaaaaaaaaaaaaaaaaaaaaaaaaaaaaaaaaaaaaaaaaaaaaaaaaaaugcaucccccccccccccccccccccccccccccccaaaggcucuuuucagagccaccagaauu

SEQ ID NO: 7070 - RNA, 1967 nt, Artificial Sequence
  mRNA product Design g-2 comprising derived and/or modified sequence from HRSV(A2)__F_DSCav1_mut7 (opt3)
gggagaguccgcucagccagguugcagaagcggcuuagcguguguccuaaucuucucucugcguguagguaggccugugccgcaaacaagcuuaccauggagcugcucauccuuaaggccaacgcuauuaccacaauacugacugcagugacguucugcuuugccagcggccagaauaucaccgaagaguucuaccaauccacauguucugcggucucaaaaggguauuugagugcuuuaagaacuggaugguacaccagcguuauuacaaucgaacuguccaacauuaaggagaauaaaugcaacgguaccgacgccaaggugaaacuaaucaagcaggaacucgauaaguauaaaaaugcaguaacugagcugcagaugcuuauguguucuacacccgccaccggcucggggucagcuauagcaagcggaguggccgucugcaaggugcugcacuuggagggcgaaguuaacaaaaucaagagugcucuccuguccacgaauaaagccguggucucucugagcaacgguguguccguacucacuuuuaagguuuuagaccugaagaauuacauugauaaacagcuuuugccuauccugaacaagcaaucauguaguauuagcaauaucgagaccgugauggaguuccagcagaaaaacaauaggcuacucgaaauaacacgggaguuuucugucaacgcgggggugacuaccccaguguccacauauaugcugaccaauucagaacuucugagcuugauuaacgacaugccgaucacgaacgaucagaagaaacucaugaguaauaacguccaaauuguucgccagcagucuuacuccaucaugugcaucauuaaggaggaagugcuggcauauguagugcaguuaccccuguacggagucauagacacuccuuguuggaaacuccauacaagcccacuuugcaccacuaauacaaaggagggcucgaacaucugucugacccgaacggaucguggcugguacugcgacaaugccgggucuguguccuucuuuccccaagcugaaaccuguaagguuugcucaaacagaguguucugcgauacaaugaauaguuugacucuaccuagcgaggucaaccuguguaauguggacauuuuuaacccaaaauaugauugcaagaucaugaccuccaaaacagacguaucuagcucaguuauaacuagccucggagccauuguguccuguuacgguaagaccaaaugcacagcaagcaauaagaacaagggcaucaucaaaaccuucucuaaugggugugauuaugucucaaacaagggaguggacacugucagugugggcaauacgcuguacuauguuaacaaacaggaggguaagagccuuuacgugaaaggggaacccauuaucaacuuuuaugacccucugguauucccauccgaugaguuugacgcuucuauuucgcaggucaaugaaaagauaaaccaaaguuuggccuucaucaggaaguccgaugagcuccugcacaaugugaacgcgggaaaaucaacaaccaauauuaugaucacuaccaucauuauaguuaucauugugaucuuacugagucuaauugccgucggccuccugcuuuacugcaaggcacggucuacaccggugaccuugagcaaagaccagcuguccggcaucaacaauauagcuuucucaaacugaggacuaguaauaaggaaacuguaugaaugucugugggcaggaagugaagagauccuucuguaaagguuuuuggaauuaugucugcugaauaauaaacuuuuuugaaauaauaaaucugguagaaaaaugagaucuaaaaaaaaaaaaaaaaaaaaaaaaaaaaaaaaaaaaaaaaaaaaaaaaaaaaaaaaaaaaaaaaugcaucccccccccccccccccccccccccccccccaaaggcucuuuucagagccaccagaauu

SEQ ID NO: 7071 - RNA, 1967 nt, Artificial Sequence
  mRNA product Design g-2 comprising derived and/or modified sequence from HRSV(A2)__F_DSCav1_mut7 (opt4)
gggagaguccgcucagccagguugcagaagcggcuuagcguguguccuaaucuucucucugcguguagguaggccugugccgcaaacaagcuuaccauggagcugcugauccugaaggccaacgccaucaccaccauccugaccgccgugaccuucugcuucgccagcggccagaacaucaccgaggaguucuaccagagcaccugcagcgccgugagcaagggcuaccugagcgcccugagaaccggcugguacaccagcgugaucaccaucgagcugagcaacaucaaggagaacaagugcaacggcaccgacgccaaggugaagcugaucaagcaggagcuggacaaguacaagaacgccgugaccgagcugcagaugcugaugugcagcacccccgccaccggcagcggcagcgccaucgccagcggcguggccgugugcaaggugcugcaccuggagggcgaggugaacaagaucaagagcgcccugcugagcaccaacaaggccguggugagccugagcaacggcgugagcgugcugaccuucaaggugcuggaccugaagaacuacaucgacaagcagcugcugcccauccugaacaagcagagcugcagcaucagcaacaucgagaccgugauggaguuccagcagaagaacaacagacugcuggagaucaccagagaguucagcgugaacgccggcgugaccacccccgugagcaccuacaugcugaccaacagcgagcugcugagccugaucaacgacaugcccaucaccaacgaccagaagaagcugaugagcaacaacgugcagaucgugagacagcagagcuacagcaucaugugcaucaucaaggaggaggugcuggccuacguggugcagcugccccuguacggcgugaucgacacccccugcuggaagcugcacaccagcccccugugcaccaccaacaccaaggagggcagcaacaucugccugaccagaaccgacagaggcugguacugcgacaacgccggcagcgugagcuucuucccccaggccgagaccugcaaggugugcagcaacagaguguucugcgacaccaugaacagccugacccugcccagcgaggugaaccugugcaacguggacaucuucaaccccaaguacgacugcaagaucaugaccagcaagaccgacgugagcagcagcgugaucaccagccugggcgccaucgugagcugcuacggcaagaccaagugcaccgccagcaacaagaacaagggcaucaucaagaccuucagcaacggcugcgacuacgugagcaacaagggcguggacaccgugagcgugggcaacacccuguacuacgugaacaagcaggagggcaagagccuguacgugaagggcgagcccaucaucaacuucuacgacccccugguguuccccagcgacgaguucgacgccagcaucagccaggugaacgagaagaucaaccagagccuggccuucaucagaaagagcgacgagcugcugcacaacgugaacgccggcaagagcaccaccaacaucaugaucaccaccaucaucaucgugaucaucgugauccugcugagccugaucgccgugggccugcugcuguacugcaaggccagaagcacccccgugacccugagcaaggaccagcugagcggcaucaacaacaucgccuucagcaacugaggacuaguaauaaggaaacuguaugaaugucugugggcaggaagugaagagauccuucuguaaagguuuuuggaauuaugucugcugaauaauaaacuuuuuugaaauaauaaaucugguagaaaaaugagaucuaaaaaaaaaaaaaaaaaaaaaaaaaaaaaaaaaaaaaaaaaaaaaaaaaaaaaaaaaaaaaaaaugcaucccccccccccccccccccccccccccccccaaaggcucuuuucagagccaccagaauu

SEQ ID NO: 7072 - RNA, 1967 nt, Artificial Sequence
  mRNA product Design g-2 comprising derived and/or modified sequence from HRSV(A2)__F_DSCav1_mut7 (opt5)
gggagaguccgcucagccagguugcagaagcggcuuagcguguguccuaaucuucucucugcguguagguaggccugugccgcaaacaagcuuaccauggagcugcucauccugaaggccaacgcuauuaccacaauccuuacggccgugaccuucugcuuugcgagcggccagaauauuacagaagaguucuaccaauccaccuguucugcugucagcaaaggguaucuguccgcccucagaacaggaugguacaccucuguuaucacaauugaacugagcaacaucaaggagaauaaaugcaacggcaccgacgccaaggugaaacuuaucaagcaggaacuggauaaguauaaaaaugcugugacggagcuccagaugcugauguguuccacccccgccacagggucuggaagcgcuauugccuccggcgucgcggugugcaagguucugcaccucgagggggaagugaacaaaaucaagagcgcccugcuuucuaccaauaaagcugucgugucccugagcaacggaguuucugugcucacauuuaagguccuggaccuuaagaauuacauugauaaacagcugcucccuauccugaacaagcaauccuguagcauuucuaauaucgagaccgugauggaguuccagcagaaaaacaaucggcugcucgaaauuacgcgcgaguuuuccgugaacgccggcgucacaaccccgguuagcacauauaugcugaccaauuccgaacuucugucucucaucaacgacaugcccaucaccaacgaucagaagaaacugaugagcaauaacgugcaaauugugagacagcaguccuacagcaucaugugcauuaucaaggaggaaguccuugcuuaugugguucagcugccucucuacggcgugauugacacacccuguuggaaacugcauacgucuccucugugcaccacaaauaccaaggagggguccaacaucugucucacacggaccgaucgcggaugguacugcgacaaugccggcagcgucucuuucuuuccccaagcggaaacguguaaggugugcagcaacagaguuuucugcgauacaaugaacucccugacccuuccuucugaggugaaucuguguaaugucgacaucuuuaacccgaaauaugauugcaagauuaugaccagcaaaacagacguguccagcucugucaucaccucccucggggccauugugagcuguuacggaaagacaaaaugcacggcuucuaauaagaacaagggcaucauuaaaaccuucuccaaugggugugauuauguuagcaacaagggaguggacacagucuccgugggcaauacccuguacuauguuaacaaacaggagggcaagucucuuuacgugaaaggggaacccaucaucaacuuuuaugacccucuggucuuccccagcgaugaguuugacgccuccauuucucaggugaaugaaaagaucaaccaaagccucgcuuucauucggaaguccgaugagcugcugcacaaugugaacgccggaaaaagcacaaccaauaucaugauuacgaccaucauuaucguuaucauugucauccuccugucucuuauugccgugggccugcuccuguacugcaaggcucgcuccacaccugugacccugagcaaagaccagcuuucugggaucaacaauauugcguucuccaacugaggacuaguaauaaggaaacuguaugaaugucugugggcaggaagugaagagauccuucuguaaagguuuuuggaauuaugucugcugaauaauaaacuuuuuugaaauaauaaaucugguagaaaaaugagaucuaaaaaaaaaaaaaaaaaaaaaaaaaaaaaaaaaaaaaaaaaaaaaaaaaaaaaaaaaaaaaaaaugcaucccccccccccccccccccccccccccccccaaaggcucuuuucagagccaccagaauu

SEQ ID NO: 7073 - RNA, 1967 nt, Artificial Sequence
  mRNA product Design g-2 comprising derived and/or modified sequence from HRSV(A2)__F_DSCav1_mut7 (opt6)
gggagaguccgcucagccagguugcagaagcggcuuagcguguguccuaaucuucucucugcguguagguaggccugugccgcaaacaagcuuaccauggaauuacucauacucaaagcaaaugcaauuaccacuauacucacagcuguaacuuuuuguuucgccucaggacaaaacaucacagaagaauuuuaucaauccacaugcucugccguaucaaaaggcuaccuaucugcccuaagaacagguugguacacaucuguaauaacaaucgaauuauccaacaucaaagaaaacaaaugcaacggcacagacgcaaaagucaaacucaucaaacaagaauuagauaaauauaaaaacgcaguaacagaacuacaaaugcuaaugugcucuacacccgccacaggaucaggauccgcaaucgcuucuggaguagccguuugcaaaguauuacaccuagaaggagaaguaaauaaaauaaaauccgcacuacuaucaacuaauaaagcaguaguaucacuuucuaaugguguaucaguauuaacauucaaaguccucgaccuaaaaaauuacaucgacaaacaacuauuacccauccuuaauaaacaaucaugcuccauaucaaacauagaaacugucauggaauuucaacaaaaaaacaauagacuucuagaaaucacaagagaauuuucuguaaaugcaggaguaacuacaccaguaucaacauauauguuaaccaacuccgaacuacuaucacucauaaacgacaugccaauaacaaacgaccaaaaaaaacuaaugucaaauaacguucaaauaguaagacaacaaucauacucaaucaugugcauaauaaaagaagaaguuuuagcauacgucguacaacuuccccuauacggaguaauagacaccccuugcuggaaacuccacaccucaccacuaugcacuacaaacacaaaagaagguuccaacaucugcuuaacaagaaccgaucgaggaugguacugcgacaacgcugguuccguaucuuucuucccacaagcagaaacaugcaaaguaugcuccaauagaguauucugcgacaccaugaacucacuaacucuaccauccgaaguaaaccuaugcaacgucgacauauuuaauccaaaauaugacugcaaaauaaugacuucaaaaacagacguauccucaucaguaauaacauccuuaggagcaauaguaucauguuacggcaagacaaaauguacagccucaaacaaaaacaaagguaucauuaaaaccuucuccaacggcugcgacuacguaucaaauaaaggugucgauacaguaucaguaggaaacacacucuauuacguuaauaaacaagaaggaaagucauuauacguaaaaggagaaccaauaaucaauuucuacgauccccuagucuuucccucagaugaauuugacgcaagcaucucucaagucaacgaaaaaauaaaccaaucccuagccuucauaagaaaaucagaugaacuacuucauaacgucaacgccggaaaaucaacaaccaacauaaugaucacuacaaucauaauuguaauuauaguaauacuacuaucgcuaauugccguuggacuacuacuauauuguaaagcaagaucaacacccguuacucuauccaaagaucaauuaucaggaaucaacaacauagccuucucaaauuaaggacuaguaauaaggaaacuguaugaaugucugugggcaggaagugaagagauccuucuguaaagguuuuuggaauuaugucugcugaauaauaaacuuuuuugaaauaauaaaucugguagaaaaaugagaucuaaaaaaaaaaaaaaaaaaaaaaaaaaaaaaaaaaaaaaaaaaaaaaaaaaaaaaaaaaaaaaaaugcaucccccccccccccccccccccccccccccccaaaggcucuuuucagagccaccagaauu

SEQ ID NO: 7074 - RNA, 1967 nt, Artificial Sequence
  mRNA product Design g-2 comprising derived and/or modified sequence from HRSV(A2)__F_DSCav1_mut7 (opt11)
gggagaguccgcucagccagguugcagaagcggcuuagcguguguccuaaucuucucucugcguguagguaggccugugccgcaaacaagcuuaccauggaacuacucauacuuaaagccaacgcaauaaccacaauccucaccgccgucacauucugcuucgccucgggacaaaacauaaccgaagaauuuuaccagucuaccugcuccgccgucuccaaggguuaccucuccgcgcuccgcaccgggugguacaccagcguuaucaccaucgaacuaucuaacauaaaagaaaacaagugcaacggaaccgacgcaaaagucaaacucaucaaacaagaacuagacaaauacaagaaugccgucaccgaacuacaaaugcucaugugcuccacccccgccaccggauccggcuccgccauugccuccggcgucgccguaugcaaaguccuucacuuggaaggagaaguuaacaaaauaaaaagcgcccuccugucgaccaacaaagcgguggucagccucuccaacggcgucucuguccucaccuucaaaguccucgaccucaagaacuacauagauaaacaacuacuccccauccuaaacaaacagucaugcagcauauccaacaucgaaaccgucauggaguuccaacagaaaaacaaccgccuccuugaaaucacccgcgaguucucugucaacgccggcgucaccacccccgucuccaccuacaugcucacaaacuccgaacuccucagccucaucaacgacaugccaaucaccaacgaccaaaagaaacucauguccaacaacguacaaaucguucgucaacaaucauacucaaucaugugcaucauuaaagaagaaguccucgcauacgucguccaacucccccucuauggggucaucgacaccccaugcuggaaacuccacaccucuccccuaugcaccaccaacaccaaagaaggcuccaacaucugccuaacccgaaccgaccgcggaugguacugcgacaacgccggcuccgucuccuucuucccccaggccgaaacauguaaagucugcuccaaccguguguucugcgacaccaugaacucacuaacccuccccuccgaagucaaccucugcaacgucgacaucuucaacccgaaauacgacugcaaaauaaugaccagcaaaacagacguauccucuagcgucauuaccagccuaggugcaaucguguccugcuacggcaaaacaaaaugcaccgccuccaacaaaaauaaaggaaucauaaaaaccuucuccaacggcugcgacuacgucagcaacaaaggagucgacaccgucuccguaggaaauacucuauacuaugucaacaaacaagaggguaaaucccucuacgucaaaggcgaacccaucaucaacuucuacgacccccucgucuuccccucugacgaguucgacgccagcauaucacaaguaaacgaaaagaucaaccaaucccucgcauucauucgcaaauccgacgaacuccuacacaacgucaacgccggaaaauccaccaccaacaucaugaucacuacuaucauuaucgucaucaucgucauccuccucucccucaucgcagucggccuucuacucuacugcaaggcacgcucuacacccguaacccugucuaaagaccaacucuccggcaucaacaacaucgcuuucuccaacuaaggacuaguaauaaggaaacuguaugaaugucugugggcaggaagugaagagauccuucuguaaagguuuuuggaauuaugucugcugaauaauaaacuuuuuugaaauaauaaaucugguagaaaaaugagaucuaaaaaaaaaaaaaaaaaaaaaaaaaaaaaaaaaaaaaaaaaaaaaaaaaaaaaaaaaaaaaaaaugcaucccccccccccccccccccccccccccccccaaaggcucuuuucagagccaccagaauu

SEQ ID NO: 7075 - RNA, 2199 nt, Artificial Sequence
  mRNA product Design g-3 comprising derived and/or modified sequence from HRSV(A2)__F_DSCav1_mut7 (opt1)
gggagaguccgcucagccagguugcagaagcggcuuagcguguguccuaaucuucucucugcguguagguaggccugugccgcaaacaagcuuaccauggagcugcucauccugaaggccaacgccaucaccaccauccugacggcggugaccuucugcuucgccagcggccagaacaucaccgaggaguucuaccaguccacgugcagcgccgucuccaagggguaccucagcgcccugcggaccggcugguacaccuccgugaucaccaucgagcugagcaacaucaaggagaacaagugcaacgggaccgacgccaaggugaagcucaucaagcaggagcuggacaaguacaagaacgcggucacggagcugcagaugcugaugugcuccaccccggcaaccggcuccggcuccgccaucgcgagcggcgucgccgugugcaaggugcugcaccucgagggggaggucaacaagaucaagagcgcccugcuguccaccaacaaggccguggugagccucuccaacggcgucagcgugcugaccuucaaggugcuggaccucaagaacuacaucgacaagcagcugcugcccauccugaacaagcagagcugcuccaucagcaacaucgagacggugauggaguuccagcagaagaacaaccggcuccuggagaucacccgcgaguucagcgugaacgccggggucaccacccccguguccacguacaugcugaccaacagcgagcuccugucccugaucaacgacaugccgaucaccaacgaccagaagaagcucaugagcaacaacgugcagaucguccggcagcaguccuacagcaucaugugcaucaucaaggaggaggugcuggcguacgugguccagcugccccucuacggcgugaucgacacccccugcuggaagcugcacacgagcccccugugcaccaccaacaccaaggagggguccaacaucugccucacgcgcaccgaccggggcugguacugcgacaacgccggcagcgucuccuucuucccgcaggccgagaccugcaaggugugcagcaaccgcguguucugcgacaccaugaacucccugacgcugcccagcgagguaaaccucugcaacgucgacaucuucaaccccaaguacgacugcaagaucaugaccuccaagaccgacgugagcuccagcgugaucaccucccugggggccaucgucagcugcuacggcaagacgaagugcaccgccagcaacaagaacaaggggaucaucaagaccuucuccaacggcugcgacuacgugagcaacaagggcguggacaccguguccgucgggaacacccuguacuacgugaacaagcaggagggcaagagccucuacgugaagggggagcccaucaucaacuucuacgacccgcuggucuuccccuccgacgaguucgacgcgagcaucucccaggugaacgagaagaucaaccagagccuggccuucauccgcaaguccgacgagcugcuccacaacgugaacgccggcaagagcacgaccaacaucaugaucaccaccaucaucaucgucaucaucgugauccugcugucccucaucgccguggggcugcugcucuacugcaaggcccggagcacgcccgucacccuguccaaggaccagcugagcggcaucaacaacaucgcguucuccaacugaggacuagugaagggaacacccaaauuuaauucagccuuaagcacaauuaauuaagagugaaacguaauuguacaagcaguuggucacccaccauagggcaugaucaacaccgcaaccuuuccuuuuucccccagugauucugaaaaaccccucuucccuucagcuugcuuagauguuccaaauuuaguaagcuuaaggcggccuacagaagaaaaagaaaaaaaaggccacaaaaguucccucucacuuucaguaaauaaaauaaaagcagcaacagaaauaaagaaauaaaugaaauucaaaaugaaauaaauauuguguugugcagcauuaaaaaaucaauaaaaauuaaaaaugagcaagaucuaaaaaaaaaaaaaaaaaaaaaaaaaaaaaaaaaaaaaaaaaaaaaaaaaaaaaaaaaaaaaaaaugcaucccccccccccccccccccccccccccccccaaaggcucuuuucagagccaccagaauu

SEQ ID NO: 7076 - RNA, 2199 nt, Artificial Sequence
  mRNA product Design g-3 comprising derived and/or modified sequence from HRSV(A2)__F_DSCav1_mut7 (opt1)
gggagaguccgcucagccagguugcagaagcggcuuagcguguguccuaaucuucucucugcguguagguaggccugugccgcaaacaagcuuaccauggagcugcucauccugaaggccaacgccaucaccaccauccugacggcggugaccuucugcuucgccagcggccagaacaucaccgaggaguucuaccaguccacgugcagcgccgucuccaagggguaccucagcgcccugcgcaccggcugguacaccuccgugaucaccaucgagcugagcaacaucaaggagaacaagugcaacgggaccgacgccaaggugaagcucaucaagcaggagcuggacaaguacaagaacgcggucacggagcugcagaugcucaugugcuccacccccgccaccggcagcggguccgccaucgccagcggcguggcggugugcaagguccugcaccuggagggcgaggugaacaagaucaaguccgcccuccugagcaccaacaaggccguggucucccugagcaacgggguguccgugcucacguucaagguccuggaccugaagaacuacaucgacaagcagcuccugccgauccugaacaagcagagcugcuccaucagcaacaucgagaccgugauggaguuccagcagaagaacaaccggcuccuggagaucacccgcgaguucuccgugaacgccggcgucaccacgcccgugagcaccuacaugcugaccaacagcgagcuccugucccugaucaacgacaugcccaucaccaacgaccagaagaagcucaugagcaacaacgugcagaucguccggcagcaguccuacagcaucaugugcaucaucaaggaggaggugcuggccuacgugguccagcugccccucuacggggugaucgacacgccgugcuggaagcugcacaccagcccccugugcaccaccaacacgaaggagggcagcaacaucugccucacccgcaccgaccgggggugguacugcgacaacgcgggcuccgugagcuucuucccccaggccgagaccugcaaggucugcuccaaccgcguguucugcgacacgaugaacagccugacccugcccuccgaggucaaccucugcaacguggacaucuucaacccgaaguacgacugcaagaucaugaccagcaagaccgacguguccagcuccgucaucacgagccugggcgccaucguguccugcuacgggaagaccaagugcaccgccagcaacaagaacaagggcaucaucaagaccuucuccaacgggugcgacuacgugagcaacaagggcgucgacacggugagcgugggcaacacccuguacuacgucaacaagcaggaggggaagucccucuacgugaagggcgagcccaucaucaacuucuacgacccccugguguuccccagcgacgaguucgacgccuccaucagccaggucaacgagaagaucaaccagucccuggcguucauccggaaguccgacgagcuccugcacaacgugaacgccgggaaguccaccaccaacaucaugaucaccacgaucaucaucgugaucaucgucauccugcucagccugaucgccgugggccugcuccuguacugcaaggcccgcuccaccccggugacccugagcaaggaccagcuguccgggaucaacaacaucgccuucagcaacugaggacuagugaagggaacacccaaauuuaauucagccuuaagcacaauuaauuaagagugaaacguaauuguacaagcaguuggucacccaccauagggcaugaucaacaccgcaaccuuuccuuuuucccccagugauucugaaaaaccccucuucccuucagcuugcuuagauguuccaaauuuaguaagcuuaaggcggccuacagaagaaaaagaaaaaaaaggccacaaaaguucccucucacuuucaguaaauaaaauaaaagcagcaacagaaauaaagaaauaaaugaaauucaaaaugaaauaaauauuguguugugcagcauuaaaaaaucaauaaaaauuaaaaaugagcaagaucuaaaaaaaaaaaaaaaaaaaaaaaaaaaaaaaaaaaaaaaaaaaaaaaaaaaaaaaaaaaaaaaaugcaucccccccccccccccccccccccccccccccaaaggcucuuuucagagccaccagaauu

SEQ ID NO: 7077 - RNA, 2199 nt, Artificial Sequence
  mRNA product Design g-3 comprising derived and/or modified sequence from HRSV(A2)__F_DSCav1_mut7 (opt2)
gggagaguccgcucagccagguugcagaagcggcuuagcguguguccuaaucuucucucugcguguagguaggccugugccgcaaacaagcuuaccauggagcuccucauccucaaggccaacgccaucaccaccauccucaccgccgucaccuucugcuucgccuccggccagaacaucaccgaggaguucuaccaguccaccugcuccgccgucuccaagggcuaccucuccgcccuccgcaccggcugguacaccuccgucaucaccaucgagcucuccaacaucaaggagaacaagugcaacggcaccgacgccaaggucaagcucaucaagcaggagcucgacaaguacaagaacgccgucaccgagcuccagaugcucaugugcuccacccccgccaccggcuccggcuccgccaucgccuccggcgucgccgucugcaagguccuccaccucgagggcgaggucaacaagaucaaguccgcccuccucuccaccaacaaggccgucgucucccucuccaacggcgucuccguccucaccuucaagguccucgaccucaagaacuacaucgacaagcagcuccuccccauccucaacaagcaguccugcuccaucuccaacaucgagaccgucauggaguuccagcagaagaacaaccgccuccucgagaucacccgcgaguucuccgucaacgccggcgucaccacccccgucuccaccuacaugcucaccaacuccgagcuccucucccucaucaacgacaugcccaucaccaacgaccagaagaagcucauguccaacaacguccagaucguccgccagcaguccuacuccaucaugugcaucaucaaggaggagguccucgccuacgucguccagcucccccucuacggcgucaucgacacccccugcuggaagcuccacaccuccccccucugcaccaccaacaccaaggagggcuccaacaucugccucacccgcaccgaccgcggcugguacugcgacaacgccggcuccgucuccuucuucccccaggccgagaccugcaaggucugcuccaaccgcgucuucugcgacaccaugaacucccucacccuccccuccgaggucaaccucugcaacgucgacaucuucaaccccaaguacgacugcaagaucaugaccuccaagaccgacgucuccuccuccgucaucaccucccucggcgccaucgucuccugcuacggcaagaccaagugcaccgccuccaacaagaacaagggcaucaucaagaccuucuccaacggcugcgacuacgucuccaacaagggcgucgacaccgucuccgucggcaacacccucuacuacgucaacaagcaggagggcaagucccucuacgucaagggcgagcccaucaucaacuucuacgacccccucgucuuccccuccgacgaguucgacgccuccaucucccaggucaacgagaagaucaaccagucccucgccuucauccgcaaguccgacgagcuccuccacaacgucaacgccggcaaguccaccaccaacaucaugaucaccaccaucaucaucgucaucaucgucauccuccucucccucaucgccgucggccuccuccucuacugcaaggcccgcuccacccccgucacccucuccaaggaccagcucuccggcaucaacaacaucgccuucuccaacugaggacuagugaagggaacacccaaauuuaauucagccuuaagcacaauuaauuaagagugaaacguaauuguacaagcaguuggucacccaccauagggcaugaucaacaccgcaaccuuuccuuuuucccccagugauucugaaaaaccccucuucccuucagcuugcuuagauguuccaaauuuaguaagcuuaaggcggccuacagaagaaaaagaaaaaaaaggccacaaaaguucccucucacuuucaguaaauaaaauaaaagcagcaacagaaauaaagaaauaaaugaaauucaaaaugaaauaaauauuguguugugcagcauuaaaaaaucaauaaaaauuaaaaaugagcaagaucuaaaaaaaaaaaaaaaaaaaaaaaaaaaaaaaaaaaaaaaaaaaaaaaaaaaaaaaaaaaaaaaaugcaucccccccccccccccccccccccccccccccaaaggcucuuuucagagccaccagaauu

SEQ ID NO: 7078 - RNA, 2199 nt, Artificial Sequence
  mRNA product Design g-3 comprising derived and/or modified sequence from HRSV(A2)__F_DSCav1_mut7 (opt3)
gggagaguccgcucagccagguugcagaagcggcuuagcguguguccuaaucuucucucugcguguagguaggccugugccgcaaacaagcuuaccauggagcugcucauccuuaaggccaacgcuauuaccacaauacugacugcagugacguucugcuuugccagcggccagaauaucaccgaagaguucuaccaauccacauguucugcggucucaaaaggguauuugagugcuuuaagaacuggaugguacaccagcguuauuacaaucgaacuguccaacauuaaggagaauaaaugcaacgguaccgacgccaaggugaaacuaaucaagcaggaacucgauaaguauaaaaaugcaguaacugagcugcagaugcuuauguguucuacacccgccaccggcucggggucagcuauagcaagcggaguggccgucugcaaggugcugcacuuggagggcgaaguuaacaaaaucaagagugcucuccuguccacgaauaaagccguggucucucugagcaacgguguguccguacucacuuuuaagguuuuagaccugaagaauuacauugauaaacagcuuuugccuauccugaacaagcaaucauguaguauuagcaauaucgagaccgugauggaguuccagcagaaaaacaauaggcuacucgaaauaacacgggaguuuucugucaacgcgggggugacuaccccaguguccacauauaugcugaccaauucagaacuucugagcuugauuaacgacaugccgaucacgaacgaucagaagaaacucaugaguaauaacguccaaauuguucgccagcagucuuacuccaucaugugcaucauuaaggaggaagugcuggcauauguagugcaguuaccccuguacggagucauagacacuccuuguuggaaacuccauacaagcccacuuugcaccacuaauacaaaggagggcucgaacaucugucugacccgaacggaucguggcugguacugcgacaaugccgggucuguguccuucuuuccccaagcugaaaccuguaagguuugcucaaacagaguguucugcgauacaaugaauaguuugacucuaccuagcgaggucaaccuguguaauguggacauuuuuaacccaaaauaugauugcaagaucaugaccuccaaaacagacguaucuagcucaguuauaacuagccucggagccauuguguccuguuacgguaagaccaaaugcacagcaagcaauaagaacaagggcaucaucaaaaccuucucuaaugggugugauuaugucucaaacaagggaguggacacugucagugugggcaauacgcuguacuauguuaacaaacaggaggguaagagccuuuacgugaaaggggaacccauuaucaacuuuuaugacccucugguauucccauccgaugaguuugacgcuucuauuucgcaggucaaugaaaagauaaaccaaaguuuggccuucaucaggaaguccgaugagcuccugcacaaugugaacgcgggaaaaucaacaaccaauauuaugaucacuaccaucauuauaguuaucauugugaucuuacugagucuaauugccgucggccuccugcuuuacugcaaggcacggucuacaccggugaccuugagcaaagaccagcuguccggcaucaacaauauagcuuucucaaacugaggacuagugaagggaacacccaaauuuaauucagccuuaagcacaauuaauuaagagugaaacguaauuguacaagcaguuggucacccaccauagggcaugaucaacaccgcaaccuuuccuuuuucccccagugauucugaaaaaccccucuucccuucagcuugcuuagauguuccaaauuuaguaagcuuaaggcggccuacagaagaaaaagaaaaaaaaggccacaaaaguucccucucacuuucaguaaauaaaauaaaagcagcaacagaaauaaagaaauaaaugaaauucaaaaugaaauaaauauuguguugugcagcauuaaaaaaucaauaaaaauuaaaaaugagcaagaucuaaaaaaaaaaaaaaaaaaaaaaaaaaaaaaaaaaaaaaaaaaaaaaaaaaaaaaaaaaaaaaaaugcaucccccccccccccccccccccccccccccccaaaggcucuuuucagagccaccagaauu

SEQ ID NO: 7079 - RNA, 2199 nt, Artificial Sequence
  mRNA product Design g-3 comprising derived and/or modified sequence from HRSV(A2)__F_DSCav1_mut7 (opt4)
gggagaguccgcucagccagguugcagaagcggcuuagcguguguccuaaucuucucucugcguguagguaggccugugccgcaaacaagcuuaccauggagcugcugauccugaaggccaacgccaucaccaccauccugaccgccgugaccuucugcuucgccagcggccagaacaucaccgaggaguucuaccagagcaccugcagcgccgugagcaagggcuaccugagcgcccugagaaccggcugguacaccagcgugaucaccaucgagcugagcaacaucaaggagaacaagugcaacggcaccgacgccaaggugaagcugaucaagcaggagcuggacaaguacaagaacgccgugaccgagcugcagaugcugaugugcagcacccccgccaccggcagcggcagcgccaucgccagcggcguggccgugugcaaggugcugcaccuggagggcgaggugaacaagaucaagagcgcccugcugagcaccaacaaggccguggugagccugagcaacggcgugagcgugcugaccuucaaggugcuggaccugaagaacuacaucgacaagcagcugcugcccauccugaacaagcagagcugcagcaucagcaacaucgagaccgugauggaguuccagcagaagaacaacagacugcuggagaucaccagagaguucagcgugaacgccggcgugaccacccccgugagcaccuacaugcugaccaacagcgagcugcugagccugaucaacgacaugcccaucaccaacgaccagaagaagcugaugagcaacaacgugcagaucgugagacagcagagcuacagcaucaugugcaucaucaaggaggaggugcuggccuacguggugcagcugccccuguacggcgugaucgacacccccugcuggaagcugcacaccagcccccugugcaccaccaacaccaaggagggcagcaacaucugccugaccagaaccgacagaggcugguacugcgacaacgccggcagcgugagcuucuucccccaggccgagaccugcaaggugugcagcaacagaguguucugcgacaccaugaacagccugacccugcccagcgaggugaaccugugcaacguggacaucuucaaccccaaguacgacugcaagaucaugaccagcaagaccgacgugagcagcagcgugaucaccagccugggcgccaucgugagcugcuacggcaagaccaagugcaccgccagcaacaagaacaagggcaucaucaagaccuucagcaacggcugcgacuacgugagcaacaagggcguggacaccgugagcgugggcaacacccuguacuacgugaacaagcaggagggcaagagccuguacgugaagggcgagcccaucaucaacuucuacgacccccugguguuccccagcgacgaguucgacgccagcaucagccaggugaacgagaagaucaaccagagccuggccuucaucagaaagagcgacgagcugcugcacaacgugaacgccggcaagagcaccaccaacaucaugaucaccaccaucaucaucgugaucaucgugauccugcugagccugaucgccgugggccugcugcuguacugcaaggccagaagcacccccgugacccugagcaaggaccagcugagcggcaucaacaacaucgccuucagcaacugaggacuagugaagggaacacccaaauuuaauucagccuuaagcacaauuaauuaagagugaaacguaauuguacaagcaguuggucacccaccauagggcaugaucaacaccgcaaccuuuccuuuuucccccagugauucugaaaaaccccucuucccuucagcuugcuuagauguuccaaauuuaguaagcuuaaggcggccuacagaagaaaaagaaaaaaaaggccacaaaaguucccucucacuuucaguaaauaaaauaaaagcagcaacagaaauaaagaaauaaaugaaauucaaaaugaaauaaauauuguguugugcagcauuaaaaaaucaauaaaaauuaaaaaugagcaagaucuaaaaaaaaaaaaaaaaaaaaaaaaaaaaaaaaaaaaaaaaaaaaaaaaaaaaaaaaaaaaaaaaugcaucccccccccccccccccccccccccccccccaaaggcucuuuucagagccaccagaauu

SEQ ID NO: 7080 - RNA, 2199 nt, Artificial Sequence
  mRNA product Design g-3 comprising derived and/or modified sequence from HRSV(A2)__F_DSCav1_mut7 (opt5)
gggagaguccgcucagccagguugcagaagcggcuuagcguguguccuaaucuucucucugcguguagguaggccugugccgcaaacaagcuuaccauggagcugcucauccugaaggccaacgcuauuaccacaauccuuacggccgugaccuucugcuuugcgagcggccagaauauuacagaagaguucuaccaauccaccuguucugcugucagcaaaggguaucuguccgcccucagaacaggaugguacaccucuguuaucacaauugaacugagcaacaucaaggagaauaaaugcaacggcaccgacgccaaggugaaacuuaucaagcaggaacuggauaaguauaaaaaugcugugacggagcuccagaugcugauguguuccacccccgccacagggucuggaagcgcuauugccuccggcgucgcggugugcaagguucugcaccucgagggggaagugaacaaaaucaagagcgcccugcuuucuaccaauaaagcugucgugucccugagcaacggaguuucugugcucacauuuaagguccuggaccuuaagaauuacauugauaaacagcugcucccuauccugaacaagcaauccuguagcauuucuaauaucgagaccgugauggaguuccagcagaaaaacaaucggcugcucgaaauuacgcgcgaguuuuccgugaacgccggcgucacaaccccgguuagcacauauaugcugaccaauuccgaacuucugucucucaucaacgacaugcccaucaccaacgaucagaagaaacugaugagcaauaacgugcaaauugugagacagcaguccuacagcaucaugugcauuaucaaggaggaaguccuugcuuaugugguucagcugccucucuacggcgugauugacacacccuguuggaaacugcauacgucuccucugugcaccacaaauaccaaggagggguccaacaucugucucacacggaccgaucgcggaugguacugcgacaaugccggcagcgucucuuucuuuccccaagcggaaacguguaaggugugcagcaacagaguuuucugcgauacaaugaacucccugacccuuccuucugaggugaaucuguguaaugucgacaucuuuaacccgaaauaugauugcaagauuaugaccagcaaaacagacguguccagcucugucaucaccucccucggggccauugugagcuguuacggaaagacaaaaugcacggcuucuaauaagaacaagggcaucauuaaaaccuucuccaaugggugugauuauguuagcaacaagggaguggacacagucuccgugggcaauacccuguacuauguuaacaaacaggagggcaagucucuuuacgugaaaggggaacccaucaucaacuuuuaugacccucuggucuuccccagcgaugaguuugacgccuccauuucucaggugaaugaaaagaucaaccaaagccucgcuuucauucggaaguccgaugagcugcugcacaaugugaacgccggaaaaagcacaaccaauaucaugauuacgaccaucauuaucguuaucauugucauccuccugucucuuauugccgugggccugcuccuguacugcaaggcucgcuccacaccugugacccugagcaaagaccagcuuucugggaucaacaauauugcguucuccaacugaggacuagugaagggaacacccaaauuuaauucagccuuaagcacaauuaauuaagagugaaacguaauuguacaagcaguuggucacccaccauagggcaugaucaacaccgcaaccuuuccuuuuucccccagugauucugaaaaaccccucuucccuucagcuugcuuagauguuccaaauuuaguaagcuuaaggcggccuacagaagaaaaagaaaaaaaaggccacaaaaguucccucucacuuucaguaaauaaaauaaaagcagcaacagaaauaaagaaauaaaugaaauucaaaaugaaauaaauauuguguugugcagcauuaaaaaaucaauaaaaauuaaaaaugagcaagaucuaaaaaaaaaaaaaaaaaaaaaaaaaaaaaaaaaaaaaaaaaaaaaaaaaaaaaaaaaaaaaaaaugcaucccccccccccccccccccccccccccccccaaaggcucuuuucagagccaccagaauu

SEQ ID NO: 7081 - RNA, 2199 nt, Artificial Sequence
  mRNA product Design g-3 comprising derived and/or modified sequence from HRSV(A2)__F_DSCav1_mut7 (opt6)
gggagaguccgcucagccagguugcagaagcggcuuagcguguguccuaaucuucucucugcguguagguaggccugugccgcaaacaagcuuaccauggaauuacucauacucaaagcaaaugcaauuaccacuauacucacagcuguaacuuuuuguuucgccucaggacaaaacaucacagaagaauuuuaucaauccacaugcucugccguaucaaaaggcuaccuaucugcccuaagaacagguugguacacaucuguaauaacaaucgaauuauccaacaucaaagaaaacaaaugcaacggcacagacgcaaaagucaaacucaucaaacaagaauuagauaaauauaaaaacgcaguaacagaacuacaaaugcuaaugugcucuacacccgccacaggaucaggauccgcaaucgcuucuggaguagccguuugcaaaguauuacaccuagaaggagaaguaaauaaaauaaaauccgcacuacuaucaacuaauaaagcaguaguaucacuuucuaaugguguaucaguauuaacauucaaaguccucgaccuaaaaaauuacaucgacaaacaacuauuacccauccuuaauaaacaaucaugcuccauaucaaacauagaaacugucauggaauuucaacaaaaaaacaauagacuucuagaaaucacaagagaauuuucuguaaaugcaggaguaacuacaccaguaucaacauauauguuaaccaacuccgaacuacuaucacucauaaacgacaugccaauaacaaacgaccaaaaaaaacuaaugucaaauaacguucaaauaguaagacaacaaucauacucaaucaugugcauaauaaaagaagaaguuuuagcauacgucguacaacuuccccuauacggaguaauagacaccccuugcuggaaacuccacaccucaccacuaugcacuacaaacacaaaagaagguuccaacaucugcuuaacaagaaccgaucgaggaugguacugcgacaacgcugguuccguaucuuucuucccacaagcagaaacaugcaaaguaugcuccaauagaguauucugcgacaccaugaacucacuaacucuaccauccgaaguaaaccuaugcaacgucgacauauuuaauccaaaauaugacugcaaaauaaugacuucaaaaacagacguauccucaucaguaauaacauccuuaggagcaauaguaucauguuacggcaagacaaaauguacagccucaaacaaaaacaaagguaucauuaaaaccuucuccaacggcugcgacuacguaucaaauaaaggugucgauacaguaucaguaggaaacacacucuauuacguuaauaaacaagaaggaaagucauuauacguaaaaggagaaccaauaaucaauuucuacgauccccuagucuuucccucagaugaauuugacgcaagcaucucucaagucaacgaaaaaauaaaccaaucccuagccuucauaagaaaaucagaugaacuacuucauaacgucaacgccggaaaaucaacaaccaacauaaugaucacuacaaucauaauuguaauuauaguaauacuacuaucgcuaauugccguuggacuacuacuauauuguaaagcaagaucaacacccguuacucuauccaaagaucaauuaucaggaaucaacaacauagccuucucaaauuaaggacuagugaagggaacacccaaauuuaauucagccuuaagcacaauuaauuaagagugaaacguaauuguacaagcaguuggucacccaccauagggcaugaucaacaccgcaaccuuuccuuuuucccccagugauucugaaaaaccccucuucccuucagcuugcuuagauguuccaaauuuaguaagcuuaaggcggccuacagaagaaaaagaaaaaaaaggccacaaaaguucccucucacuuucaguaaauaaaauaaaagcagcaacagaaauaaagaaauaaaugaaauucaaaaugaaauaaauauuguguugugcagcauuaaaaaaucaauaaaaauuaaaaaugagcaagaucuaaaaaaaaaaaaaaaaaaaaaaaaaaaaaaaaaaaaaaaaaaaaaaaaaaaaaaaaaaaaaaaaugcaucccccccccccccccccccccccccccccccaaaggcucuuuucagagccaccagaauu

SEQ ID NO: 7082 - RNA, 2199 nt, Artificial Sequence
  mRNA product Design g-3 comprising derived and/or modified sequence from HRSV(A2)__F_DSCav1_mut7 (opt11)
gggagaguccgcucagccagguugcagaagcggcuuagcguguguccuaaucuucucucugcguguagguaggccugugccgcaaacaagcuuaccauggaacuacucauacuuaaagccaacgcaauaaccacaauccucaccgccgucacauucugcuucgccucgggacaaaacauaaccgaagaauuuuaccagucuaccugcuccgccgucuccaaggguuaccucuccgcgcuccgcaccgggugguacaccagcguuaucaccaucgaacuaucuaacauaaaagaaaacaagugcaacggaaccgacgcaaaagucaaacucaucaaacaagaacuagacaaauacaagaaugccgucaccgaacuacaaaugcucaugugcuccacccccgccaccggauccggcuccgccauugccuccggcgucgccguaugcaaaguccuucacuuggaaggagaaguuaacaaaauaaaaagcgcccuccugucgaccaacaaagcgguggucagccucuccaacggcgucucuguccucaccuucaaaguccucgaccucaagaacuacauagauaaacaacuacuccccauccuaaacaaacagucaugcagcauauccaacaucgaaaccgucauggaguuccaacagaaaaacaaccgccuccuugaaaucacccgcgaguucucugucaacgccggcgucaccacccccgucuccaccuacaugcucacaaacuccgaacuccucagccucaucaacgacaugccaaucaccaacgaccaaaagaaacucauguccaacaacguacaaaucguucgucaacaaucauacucaaucaugugcaucauuaaagaagaaguccucgcauacgucguccaacucccccucuauggggucaucgacaccccaugcuggaaacuccacaccucuccccuaugcaccaccaacaccaaagaaggcuccaacaucugccuaacccgaaccgaccgcggaugguacugcgacaacgccggcuccgucuccuucuucccccaggccgaaacauguaaagucugcuccaaccguguguucugcgacaccaugaacucacuaacccuccccuccgaagucaaccucugcaacgucgacaucuucaacccgaaauacgacugcaaaauaaugaccagcaaaacagacguauccucuagcgucauuaccagccuaggugcaaucguguccugcuacggcaaaacaaaaugcaccgccuccaacaaaaauaaaggaaucauaaaaaccuucuccaacggcugcgacuacgucagcaacaaaggagucgacaccgucuccguaggaaauacucuauacuaugucaacaaacaagaggguaaaucccucuacgucaaaggcgaacccaucaucaacuucuacgacccccucgucuuccccucugacgaguucgacgccagcauaucacaaguaaacgaaaagaucaaccaaucccucgcauucauucgcaaauccgacgaacuccuacacaacgucaacgccggaaaauccaccaccaacaucaugaucacuacuaucauuaucgucaucaucgucauccuccucucccucaucgcagucggccuucuacucuacugcaaggcacgcucuacacccguaacccugucuaaagaccaacucuccggcaucaacaacaucgcuuucuccaacuaaggacuagugaagggaacacccaaauuuaauucagccuuaagcacaauuaauuaagagugaaacguaauuguacaagcaguuggucacccaccauagggcaugaucaacaccgcaaccuuuccuuuuucccccagugauucugaaaaaccccucuucccuucagcuugcuuagauguuccaaauuuaguaagcuuaaggcggccuacagaagaaaaagaaaaaaaaggccacaaaaguucccucucacuuucaguaaauaaaauaaaagcagcaacagaaauaaagaaauaaaugaaauucaaaaugaaauaaauauuguguugugcagcauuaaaaaaucaauaaaaauuaaaaaugagcaagaucuaaaaaaaaaaaaaaaaaaaaaaaaaaaaaaaaaaaaaaaaaaaaaaaaaaaaaaaaaaaaaaaaugcaucccccccccccccccccccccccccccccccaaaggcucuuuucagagccaccagaauu

SEQ ID NO: 7083 - RNA, 1994 nt, Artificial Sequence
  mRNA product Design g-4 comprising derived and/or modified sequence from HRSV(A2)__F_DSCav1_mut7 (opt1)
gggagacuccugucgggcggaaguaggaggaguagaguuuaaaaacaguacucuuuuuccgguucgggacguaguugaagcaacgacaagccggauaaccgcucuugagacaggaagcuuaccauggagcugcucauccugaaggccaacgccaucaccaccauccugacggcggugaccuucugcuucgccagcggccagaacaucaccgaggaguucuaccaguccacgugcagcgccgucuccaagggguaccucagcgcccugcggaccggcugguacaccuccgugaucaccaucgagcugagcaacaucaaggagaacaagugcaacgggaccgacgccaaggugaagcucaucaagcaggagcuggacaaguacaagaacgcggucacggagcugcagaugcugaugugcuccaccccggcaaccggcuccggcuccgccaucgcgagcggcgucgccgugugcaaggugcugcaccucgagggggaggucaacaagaucaagagcgcccugcuguccaccaacaaggccguggugagccucuccaacggcgucagcgugcugaccuucaaggugcuggaccucaagaacuacaucgacaagcagcugcugcccauccugaacaagcagagcugcuccaucagcaacaucgagacggugauggaguuccagcagaagaacaaccggcuccuggagaucacccgcgaguucagcgugaacgccggggucaccacccccguguccacguacaugcugaccaacagcgagcuccugucccugaucaacgacaugccgaucaccaacgaccagaagaagcucaugagcaacaacgugcagaucguccggcagcaguccuacagcaucaugugcaucaucaaggaggaggugcuggcguacgugguccagcugccccucuacggcgugaucgacacccccugcuggaagcugcacacgagcccccugugcaccaccaacaccaaggagggguccaacaucugccucacgcgcaccgaccggggcugguacugcgacaacgccggcagcgucuccuucuucccgcaggccgagaccugcaaggugugcagcaaccgcguguucugcgacaccaugaacucccugacgcugcccagcgagguaaaccucugcaacgucgacaucuucaaccccaaguacgacugcaagaucaugaccuccaagaccgacgugagcuccagcgugaucaccucccugggggccaucgucagcugcuacggcaagacgaagugcaccgccagcaacaagaacaaggggaucaucaagaccuucuccaacggcugcgacuacgugagcaacaagggcguggacaccguguccgucgggaacacccuguacuacgugaacaagcaggagggcaagagccucuacgugaagggggagcccaucaucaacuucuacgacccgcuggucuuccccuccgacgaguucgacgcgagcaucucccaggugaacgagaagaucaaccagagccuggccuucauccgcaaguccgacgagcugcuccacaacgugaacgccggcaagagcacgaccaacaucaugaucaccaccaucaucaucgucaucaucgugauccugcugucccucaucgccguggggcugcugcucuacugcaaggcccggagcacgcccgucacccuguccaaggaccagcugagcggcaucaacaacaucgcguucuccaacugaggacuaguaauaaggaaacuguaugaaugucugugggcaggaagugaagagauccuucuguaaagguuuuuggaauuaugucugcugaauaauaaacuuuuuugaaauaauaaaucugguagaaaaaugagaucuaaaaaaaaaaaaaaaaaaaaaaaaaaaaaaaaaaaaaaaaaaaaaaaaaaaaaaaaaaaaaaaaugcaucccccccccccccccccccccccccccccccaaaggcucuuuucagagccaccagaauu

SEQ ID NO: 7084 - RNA, 1994 nt, Artificial Sequence
  mRNA product Design g-4 comprising derived and/or modified sequence from HRSV(A2)__F_DSCav1_mut7 (opt1)
gggagacuccugucgggcggaaguaggaggaguagaguuuaaaaacaguacucuuuuuccgguucgggacguaguugaagcaacgacaagccggauaaccgcucuugagacaggaagcuuaccauggagcugcucauccugaaggccaacgccaucaccaccauccugacggcggugaccuucugcuucgccagcggccagaacaucaccgaggaguucuaccaguccacgugcagcgccgucuccaagggguaccucagcgcccugcgcaccggcugguacaccuccgugaucaccaucgagcugagcaacaucaaggagaacaagugcaacgggaccgacgccaaggugaagcucaucaagcaggagcuggacaaguacaagaacgcggucacggagcugcagaugcucaugugcuccacccccgccaccggcagcggguccgccaucgccagcggcguggcggugugcaagguccugcaccuggagggcgaggugaacaagaucaaguccgcccuccugagcaccaacaaggccguggucucccugagcaacgggguguccgugcucacguucaagguccuggaccugaagaacuacaucgacaagcagcuccugccgauccugaacaagcagagcugcuccaucagcaacaucgagaccgugauggaguuccagcagaagaacaaccggcuccuggagaucacccgcgaguucuccgugaacgccggcgucaccacgcccgugagcaccuacaugcugaccaacagcgagcuccugucccugaucaacgacaugcccaucaccaacgaccagaagaagcucaugagcaacaacgugcagaucguccggcagcaguccuacagcaucaugugcaucaucaaggaggaggugcuggccuacgugguccagcugccccucuacggggugaucgacacgccgugcuggaagcugcacaccagcccccugugcaccaccaacacgaaggagggcagcaacaucugccucacccgcaccgaccgggggugguacugcgacaacgcgggcuccgugagcuucuucccccaggccgagaccugcaaggucugcuccaaccgcguguucugcgacacgaugaacagccugacccugcccuccgaggucaaccucugcaacguggacaucuucaacccgaaguacgacugcaagaucaugaccagcaagaccgacguguccagcuccgucaucacgagccugggcgccaucguguccugcuacgggaagaccaagugcaccgccagcaacaagaacaagggcaucaucaagaccuucuccaacgggugcgacuacgugagcaacaagggcgucgacacggugagcgugggcaacacccuguacuacgucaacaagcaggaggggaagucccucuacgugaagggcgagcccaucaucaacuucuacgacccccugguguuccccagcgacgaguucgacgccuccaucagccaggucaacgagaagaucaaccagucccuggcguucauccggaaguccgacgagcuccugcacaacgugaacgccgggaaguccaccaccaacaucaugaucaccacgaucaucaucgugaucaucgucauccugcucagccugaucgccgugggccugcuccuguacugcaaggcccgcuccaccccggugacccugagcaaggaccagcuguccgggaucaacaacaucgccuucagcaacugaggacuaguaauaaggaaacuguaugaaugucugugggcaggaagugaagagauccuucuguaaagguuuuuggaauuaugucugcugaauaauaaacuuuuuugaaauaauaaaucugguagaaaaaugagaucuaaaaaaaaaaaaaaaaaaaaaaaaaaaaaaaaaaaaaaaaaaaaaaaaaaaaaaaaaaaaaaaaugcaucccccccccccccccccccccccccccccccaaaggcucuuuucagagccaccagaauu

SEQ ID NO: 7085 - RNA, 1994 nt, Artificial Sequence
  mRNA product Design g-4 comprising derived and/or modified sequence from HRSV(A2)__F_DSCav1_mut7 (opt2)
gggagacuccugucgggcggaaguaggaggaguagaguuuaaaaacaguacucuuuuuccgguucgggacguaguugaagcaacgacaagccggauaaccgcucuugagacaggaagcuuaccauggagcuccucauccucaaggccaacgccaucaccaccauccucaccgccgucaccuucugcuucgccuccggccagaacaucaccgaggaguucuaccaguccaccugcuccgccgucuccaagggcuaccucuccgcccuccgcaccggcugguacaccuccgucaucaccaucgagcucuccaacaucaaggagaacaagugcaacggcaccgacgccaaggucaagcucaucaagcaggagcucgacaaguacaagaacgccgucaccgagcuccagaugcucaugugcuccacccccgccaccggcuccggcuccgccaucgccuccggcgucgccgucugcaagguccuccaccucgagggcgaggucaacaagaucaaguccgcccuccucuccaccaacaaggccgucgucucccucuccaacggcgucuccguccucaccuucaagguccucgaccucaagaacuacaucgacaagcagcuccuccccauccucaacaagcaguccugcuccaucuccaacaucgagaccgucauggaguuccagcagaagaacaaccgccuccucgagaucacccgcgaguucuccgucaacgccggcgucaccacccccgucuccaccuacaugcucaccaacuccgagcuccucucccucaucaacgacaugcccaucaccaacgaccagaagaagcucauguccaacaacguccagaucguccgccagcaguccuacuccaucaugugcaucaucaaggaggagguccucgccuacgucguccagcucccccucuacggcgucaucgacacccccugcuggaagcuccacaccuccccccucugcaccaccaacaccaaggagggcuccaacaucugccucacccgcaccgaccgcggcugguacugcgacaacgccggcuccgucuccuucuucccccaggccgagaccugcaaggucugcuccaaccgcgucuucugcgacaccaugaacucccucacccuccccuccgaggucaaccucugcaacgucgacaucuucaaccccaaguacgacugcaagaucaugaccuccaagaccgacgucuccuccuccgucaucaccucccucggcgccaucgucuccugcuacggcaagaccaagugcaccgccuccaacaagaacaagggcaucaucaagaccuucuccaacggcugcgacuacgucuccaacaagggcgucgacaccgucuccgucggcaacacccucuacuacgucaacaagcaggagggcaagucccucuacgucaagggcgagcccaucaucaacuucuacgacccccucgucuuccccuccgacgaguucgacgccuccaucucccaggucaacgagaagaucaaccagucccucgccuucauccgcaaguccgacgagcuccuccacaacgucaacgccggcaaguccaccaccaacaucaugaucaccaccaucaucaucgucaucaucgucauccuccucucccucaucgccgucggccuccuccucuacugcaaggcccgcuccacccccgucacccucuccaaggaccagcucuccggcaucaacaacaucgccuucuccaacugaggacuaguaauaaggaaacuguaugaaugucugugggcaggaagugaagagauccuucuguaaagguuuuuggaauuaugucugcugaauaauaaacuuuuuugaaauaauaaaucugguagaaaaaugagaucuaaaaaaaaaaaaaaaaaaaaaaaaaaaaaaaaaaaaaaaaaaaaaaaaaaaaaaaaaaaaaaaaugcaucccccccccccccccccccccccccccccccaaaggcucuuuucagagccaccagaauu

SEQ ID NO: 7086 - RNA, 1994 nt, Artificial Sequence
  mRNA product Design g-4 comprising derived and/or modified sequence from HRSV(A2)__F_DSCav1_mut7 (opt3)
gggagacuccugucgggcggaaguaggaggaguagaguuuaaaaacaguacucuuuuuccgguucgggacguaguugaagcaacgacaagccggauaaccgcucuugagacaggaagcuuaccauggagcugcucauccuuaaggccaacgcuauuaccacaauacugacugcagugacguucugcuuugccagcggccagaauaucaccgaagaguucuaccaauccacauguucugcggucucaaaaggguauuugagugcuuuaagaacuggaugguacaccagcguuauuacaaucgaacuguccaacauuaaggagaauaaaugcaacgguaccgacgccaaggugaaacuaaucaagcaggaacucgauaaguauaaaaaugcaguaacugagcugcagaugcuuauguguucuacacccgccaccggcucggggucagcuauagcaagcggaguggccgucugcaaggugcugcacuuggagggcgaaguuaacaaaaucaagagugcucuccuguccacgaauaaagccguggucucucugagcaacgguguguccguacucacuuuuaagguuuuagaccugaagaauuacauugauaaacagcuuuugccuauccugaacaagcaaucauguaguauuagcaauaucgagaccgugauggaguuccagcagaaaaacaauaggcuacucgaaauaacacgggaguuuucugucaacgcgggggugacuaccccaguguccacauauaugcugaccaauucagaacuucugagcuugauuaacgacaugccgaucacgaacgaucagaagaaacucaugaguaauaacguccaaauuguucgccagcagucuuacuccaucaugugcaucauuaaggaggaagugcuggcauauguagugcaguuaccccuguacggagucauagacacuccuuguuggaaacuccauacaagcccacuuugcaccacuaauacaaaggagggcucgaacaucugucugacccgaacggaucguggcugguacugcgacaaugccgggucuguguccuucuuuccccaagcugaaaccuguaagguuugcucaaacagaguguucugcgauacaaugaauaguuugacucuaccuagcgaggucaaccuguguaauguggacauuuuuaacccaaaauaugauugcaagaucaugaccuccaaaacagacguaucuagcucaguuauaacuagccucggagccauuguguccuguuacgguaagaccaaaugcacagcaagcaauaagaacaagggcaucaucaaaaccuucucuaaugggugugauuaugucucaaacaagggaguggacacugucagugugggcaauacgcuguacuauguuaacaaacaggaggguaagagccuuuacgugaaaggggaacccauuaucaacuuuuaugacccucugguauucccauccgaugaguuugacgcuucuauuucgcaggucaaugaaaagauaaaccaaaguuuggccuucaucaggaaguccgaugagcuccugcacaaugugaacgcgggaaaaucaacaaccaauauuaugaucacuaccaucauuauaguuaucauugugaucuuacugagucuaauugccgucggccuccugcuuuacugcaaggcacggucuacaccggugaccuugagcaaagaccagcuguccggcaucaacaauauagcuuucucaaacugaggacuaguaauaaggaaacuguaugaaugucugugggcaggaagugaagagauccuucuguaaagguuuuuggaauuaugucugcugaauaauaaacuuuuuugaaauaauaaaucugguagaaaaaugagaucuaaaaaaaaaaaaaaaaaaaaaaaaaaaaaaaaaaaaaaaaaaaaaaaaaaaaaaaaaaaaaaaaugcaucccccccccccccccccccccccccccccccaaaggcucuuuucagagccaccagaauu

SEQ ID NO: 7087 - RNA, 1994 nt, Artificial Sequence
  mRNA product Design g-4 comprising derived and/or modified sequence from HRSV(A2)__F_DSCav1_mut7 (opt4)
gggagacuccugucgggcggaaguaggaggaguagaguuuaaaaacaguacucuuuuuccgguucgggacguaguugaagcaacgacaagccggauaaccgcucuugagacaggaagcuuaccauggagcugcugauccugaaggccaacgccaucaccaccauccugaccgccgugaccuucugcuucgccagcggccagaacaucaccgaggaguucuaccagagcaccugcagcgccgugagcaagggcuaccugagcgcccugagaaccggcugguacaccagcgugaucaccaucgagcugagcaacaucaaggagaacaagugcaacggcaccgacgccaaggugaagcugaucaagcaggagcuggacaaguacaagaacgccgugaccgagcugcagaugcugaugugcagcacccccgccaccggcagcggcagcgccaucgccagcggcguggccgugugcaaggugcugcaccuggagggcgaggugaacaagaucaagagcgcccugcugagcaccaacaaggccguggugagccugagcaacggcgugagcgugcugaccuucaaggugcuggaccugaagaacuacaucgacaagcagcugcugcccauccugaacaagcagagcugcagcaucagcaacaucgagaccgugauggaguuccagcagaagaacaacagacugcuggagaucaccagagaguucagcgugaacgccggcgugaccacccccgugagcaccuacaugcugaccaacagcgagcugcugagccugaucaacgacaugcccaucaccaacgaccagaagaagcugaugagcaacaacgugcagaucgugagacagcagagcuacagcaucaugugcaucaucaaggaggaggugcuggccuacguggugcagcugccccuguacggcgugaucgacacccccugcuggaagcugcacaccagcccccugugcaccaccaacaccaaggagggcagcaacaucugccugaccagaaccgacagaggcugguacugcgacaacgccggcagcgugagcuucuucccccaggccgagaccugcaaggugugcagcaacagaguguucugcgacaccaugaacagccugacccugcccagcgaggugaaccugugcaacguggacaucuucaaccccaaguacgacugcaagaucaugaccagcaagaccgacgugagcagcagcgugaucaccagccugggcgccaucgugagcugcuacggcaagaccaagugcaccgccagcaacaagaacaagggcaucaucaagaccuucagcaacggcugcgacuacgugagcaacaagggcguggacaccgugagcgugggcaacacccuguacuacgugaacaagcaggagggcaagagccuguacgugaagggcgagcccaucaucaacuucuacgacccccugguguuccccagcgacgaguucgacgccagcaucagccaggugaacgagaagaucaaccagagccuggccuucaucagaaagagcgacgagcugcugcacaacgugaacgccggcaagagcaccaccaacaucaugaucaccaccaucaucaucgugaucaucgugauccugcugagccugaucgccgugggccugcugcuguacugcaaggccagaagcacccccgugacccugagcaaggaccagcugagcggcaucaacaacaucgccuucagcaacugaggacuaguaauaaggaaacuguaugaaugucugugggcaggaagugaagagauccuucuguaaagguuuuuggaauuaugucugcugaauaauaaacuuuuuugaaauaauaaaucugguagaaaaaugagaucuaaaaaaaaaaaaaaaaaaaaaaaaaaaaaaaaaaaaaaaaaaaaaaaaaaaaaaaaaaaaaaaaugcaucccccccccccccccccccccccccccccccaaaggcucuuuucagagccaccagaauu

SEQ ID NO: 7088 - RNA, 1994 nt, Artificial Sequence
  mRNA product Design g-4 comprising derived and/or modified sequence from HRSV(A2)__F_DSCav1_mut7 (opt5)
gggagacuccugucgggcggaaguaggaggaguagaguuuaaaaacaguacucuuuuuccgguucgggacguaguugaagcaacgacaagccggauaaccgcucuugagacaggaagcuuaccauggagcugcucauccugaaggccaacgcuauuaccacaauccuuacggccgugaccuucugcuuugcgagcggccagaauauuacagaagaguucuaccaauccaccuguucugcugucagcaaaggguaucuguccgcccucagaacaggaugguacaccucuguuaucacaauugaacugagcaacaucaaggagaauaaaugcaacggcaccgacgccaaggugaaacuuaucaagcaggaacuggauaaguauaaaaaugcugugacggagcuccagaugcugauguguuccacccccgccacagggucuggaagcgcuauugccuccggcgucgcggugugcaagguucugcaccucgagggggaagugaacaaaaucaagagcgcccugcuuucuaccaauaaagcugucgugucccugagcaacggaguuucugugcucacauuuaagguccuggaccuuaagaauuacauugauaaacagcugcucccuauccugaacaagcaauccuguagcauuucuaauaucgagaccgugauggaguuccagcagaaaaacaaucggcugcucgaaauuacgcgcgaguuuuccgugaacgccggcgucacaaccccgguuagcacauauaugcugaccaauuccgaacuucugucucucaucaacgacaugcccaucaccaacgaucagaagaaacugaugagcaauaacgugcaaauugugagacagcaguccuacagcaucaugugcauuaucaaggaggaaguccuugcuuaugugguucagcugccucucuacggcgugauugacacacccuguuggaaacugcauacgucuccucugugcaccacaaauaccaaggagggguccaacaucugucucacacggaccgaucgcggaugguacugcgacaaugccggcagcgucucuuucuuuccccaagcggaaacguguaaggugugcagcaacagaguuuucugcgauacaaugaacucccugacccuuccuucugaggugaaucuguguaaugucgacaucuuuaacccgaaauaugauugcaagauuaugaccagcaaaacagacguguccagcucugucaucaccucccucggggccauugugagcuguuacggaaagacaaaaugcacggcuucuaauaagaacaagggcaucauuaaaaccuucuccaaugggugugauuauguuagcaacaagggaguggacacagucuccgugggcaauacccuguacuauguuaacaaacaggagggcaagucucuuuacgugaaaggggaacccaucaucaacuuuuaugacccucuggucuuccccagcgaugaguuugacgccuccauuucucaggugaaugaaaagaucaaccaaagccucgcuuucauucggaaguccgaugagcugcugcacaaugugaacgccggaaaaagcacaaccaauaucaugauuacgaccaucauuaucguuaucauugucauccuccugucucuuauugccgugggccugcuccuguacugcaaggcucgcuccacaccugugacccugagcaaagaccagcuuucugggaucaacaauauugcguucuccaacugaggacuaguaauaaggaaacuguaugaaugucugugggcaggaagugaagagauccuucuguaaagguuuuuggaauuaugucugcugaauaauaaacuuuuuugaaauaauaaaucugguagaaaaaugagaucuaaaaaaaaaaaaaaaaaaaaaaaaaaaaaaaaaaaaaaaaaaaaaaaaaaaaaaaaaaaaaaaaugcaucccccccccccccccccccccccccccccccaaaggcucuuuucagagccaccagaauu

SEQ ID NO: 7089 - RNA, 1994 nt, Artificial Sequence
  mRNA product Design g-4 comprising derived and/or modified sequence from HRSV(A2)__F_DSCav1_mut7 (opt6)
gggagacuccugucgggcggaaguaggaggaguagaguuuaaaaacaguacucuuuuuccgguucgggacguaguugaagcaacgacaagccggauaaccgcucuugagacaggaagcuuaccauggaauuacucauacucaaagcaaaugcaauuaccacuauacucacagcuguaacuuuuuguuucgccucaggacaaaacaucacagaagaauuuuaucaauccacaugcucugccguaucaaaaggcuaccuaucugcccuaagaacagguugguacacaucuguaauaacaaucgaauuauccaacaucaaagaaaacaaaugcaacggcacagacgcaaaagucaaacucaucaaacaagaauuagauaaauauaaaaacgcaguaacagaacuacaaaugcuaaugugcucuacacccgccacaggaucaggauccgcaaucgcuucuggaguagccguuugcaaaguauuacaccuagaaggagaaguaaauaaaauaaaauccgcacuacuaucaacuaauaaagcaguaguaucacuuucuaaugguguaucaguauuaacauucaaaguccucgaccuaaaaaauuacaucgacaaacaacuauuacccauccuuaauaaacaaucaugcuccauaucaaacauagaaacugucauggaauuucaacaaaaaaacaauagacuucuagaaaucacaagagaauuuucuguaaaugcaggaguaacuacaccaguaucaacauauauguuaaccaacuccgaacuacuaucacucauaaacgacaugccaauaacaaacgaccaaaaaaaacuaaugucaaauaacguucaaauaguaagacaacaaucauacucaaucaugugcauaauaaaagaagaaguuuuagcauacgucguacaacuuccccuauacggaguaauagacaccccuugcuggaaacuccacaccucaccacuaugcacuacaaacacaaaagaagguuccaacaucugcuuaacaagaaccgaucgaggaugguacugcgacaacgcugguuccguaucuuucuucccacaagcagaaacaugcaaaguaugcuccaauagaguauucugcgacaccaugaacucacuaacucuaccauccgaaguaaaccuaugcaacgucgacauauuuaauccaaaauaugacugcaaaauaaugacuucaaaaacagacguauccucaucaguaauaacauccuuaggagcaauaguaucauguuacggcaagacaaaauguacagccucaaacaaaaacaaagguaucauuaaaaccuucuccaacggcugcgacuacguaucaaauaaaggugucgauacaguaucaguaggaaacacacucuauuacguuaauaaacaagaaggaaagucauuauacguaaaaggagaaccaauaaucaauuucuacgauccccuagucuuucccucagaugaauuugacgcaagcaucucucaagucaacgaaaaaauaaaccaaucccuagccuucauaagaaaaucagaugaacuacuucauaacgucaacgccggaaaaucaacaaccaacauaaugaucacuacaaucauaauuguaauuauaguaauacuacuaucgcuaauugccguuggacuacuacuauauuguaaagcaagaucaacacccguuacucuauccaaagaucaauuaucaggaaucaacaacauagccuucucaaauuaaggacuaguaauaaggaaacuguaugaaugucugugggcaggaagugaagagauccuucuguaaagguuuuuggaauuaugucugcugaauaauaaacuuuuuugaaauaauaaaucugguagaaaaaugagaucuaaaaaaaaaaaaaaaaaaaaaaaaaaaaaaaaaaaaaaaaaaaaaaaaaaaaaaaaaaaaaaaaugcaucccccccccccccccccccccccccccccccaaaggcucuuuucagagccaccagaauu

SEQ ID NO: 7090 - RNA, 1994 nt, Artificial Sequence
  mRNA product Design g-4 comprising derived and/or modified sequence from HRSV(A2)__F_DSCav1_mut7 (opt11)
gggagacuccugucgggcggaaguaggaggaguagaguuuaaaaacaguacucuuuuuccgguucgggacguaguugaagcaacgacaagccggauaaccgcucuugagacaggaagcuuaccauggaacuacucauacuuaaagccaacgcaauaaccacaauccucaccgccgucacauucugcuucgccucgggacaaaacauaaccgaagaauuuuaccagucuaccugcuccgccgucuccaaggguuaccucuccgcgcuccgcaccgggugguacaccagcguuaucaccaucgaacuaucuaacauaaaagaaaacaagugcaacggaaccgacgcaaaagucaaacucaucaaacaagaacuagacaaauacaagaaugccgucaccgaacuacaaaugcucaugugcuccacccccgccaccggauccggcuccgccauugccuccggcgucgccguaugcaaaguccuucacuuggaaggagaaguuaacaaaauaaaaagcgcccuccugucgaccaacaaagcgguggucagccucuccaacggcgucucuguccucaccuucaaaguccucgaccucaagaacuacauagauaaacaacuacuccccauccuaaacaaacagucaugcagcauauccaacaucgaaaccgucauggaguuccaacagaaaaacaaccgccuccuugaaaucacccgcgaguucucugucaacgccggcgucaccacccccgucuccaccuacaugcucacaaacuccgaacuccucagccucaucaacgacaugccaaucaccaacgaccaaaagaaacucauguccaacaacguacaaaucguucgucaacaaucauacucaaucaugugcaucauuaaagaagaaguccucgcauacgucguccaacucccccucuauggggucaucgacaccccaugcuggaaacuccacaccucuccccuaugcaccaccaacaccaaagaaggcuccaacaucugccuaacccgaaccgaccgcggaugguacugcgacaacgccggcuccgucuccuucuucccccaggccgaaacauguaaagucugcuccaaccguguguucugcgacaccaugaacucacuaacccuccccuccgaagucaaccucugcaacgucgacaucuucaacccgaaauacgacugcaaaauaaugaccagcaaaacagacguauccucuagcgucauuaccagccuaggugcaaucguguccugcuacggcaaaacaaaaugcaccgccuccaacaaaaauaaaggaaucauaaaaaccuucuccaacggcugcgacuacgucagcaacaaaggagucgacaccgucuccguaggaaauacucuauacuaugucaacaaacaagaggguaaaucccucuacgucaaaggcgaacccaucaucaacuucuacgacccccucgucuuccccucugacgaguucgacgccagcauaucacaaguaaacgaaaagaucaaccaaucccucgcauucauucgcaaauccgacgaacuccuacacaacgucaacgccggaaaauccaccaccaacaucaugaucacuacuaucauuaucgucaucaucgucauccuccucucccucaucgcagucggccuucuacucuacugcaaggcacgcucuacacccguaacccugucuaaagaccaacucuccggcaucaacaacaucgcuuucuccaacuaaggacuaguaauaaggaaacuguaugaaugucugugggcaggaagugaagagauccuucuguaaagguuuuuggaauuaugucugcugaauaauaaacuuuuuugaaauaauaaaucugguagaaaaaugagaucuaaaaaaaaaaaaaaaaaaaaaaaaaaaaaaaaaaaaaaaaaaaaaaaaaaaaaaaaaaaaaaaaugcaucccccccccccccccccccccccccccccccaaaggcucuuuucagagccaccagaauu

SEQ ID NO: 7091 - RNA, 1970 nt, Artificial Sequence
  mRNA product Design g-5 comprising derived and/or modified sequence from HRSV(A2)__F_DSCav1_mut7 (opt1)
gggagacccgugacccggaaguuguacggcuacgcgacuuucccucccacaaacccucgcgcccuuccuuuccuacuugggcccggcagaaagcuuaccauggagcugcucauccugaaggccaacgccaucaccaccauccugacggcggugaccuucugcuucgccagcggccagaacaucaccgaggaguucuaccaguccacgugcagcgccgucuccaagggguaccucagcgcccugcggaccggcugguacaccuccgugaucaccaucgagcugagcaacaucaaggagaacaagugcaacgggaccgacgccaaggugaagcucaucaagcaggagcuggacaaguacaagaacgcggucacggagcugcagaugcugaugugcuccaccccggcaaccggcuccggcuccgccaucgcgagcggcgucgccgugugcaaggugcugcaccucgagggggaggucaacaagaucaagagcgcccugcuguccaccaacaaggccguggugagccucuccaacggcgucagcgugcugaccuucaaggugcuggaccucaagaacuacaucgacaagcagcugcugcccauccugaacaagcagagcugcuccaucagcaacaucgagacggugauggaguuccagcagaagaacaaccggcuccuggagaucacccgcgaguucagcgugaacgccggggucaccacccccguguccacguacaugcugaccaacagcgagcuccugucccugaucaacgacaugccgaucaccaacgaccagaagaagcucaugagcaacaacgugcagaucguccggcagcaguccuacagcaucaugugcaucaucaaggaggaggugcuggcguacgugguccagcugccccucuacggcgugaucgacacccccugcuggaagcugcacacgagcccccugugcaccaccaacaccaaggagggguccaacaucugccucacgcgcaccgaccggggcugguacugcgacaacgccggcagcgucuccuucuucccgcaggccgagaccugcaaggugugcagcaaccgcguguucugcgacaccaugaacucccugacgcugcccagcgagguaaaccucugcaacgucgacaucuucaaccccaaguacgacugcaagaucaugaccuccaagaccgacgugagcuccagcgugaucaccucccugggggccaucgucagcugcuacggcaagacgaagugcaccgccagcaacaagaacaaggggaucaucaagaccuucuccaacggcugcgacuacgugagcaacaagggcguggacaccguguccgucgggaacacccuguacuacgugaacaagcaggagggcaagagccucuacgugaagggggagcccaucaucaacuucuacgacccgcuggucuuccccuccgacgaguucgacgcgagcaucucccaggugaacgagaagaucaaccagagccuggccuucauccgcaaguccgacgagcugcuccacaacgugaacgccggcaagagcacgaccaacaucaugaucaccaccaucaucaucgucaucaucgugauccugcugucccucaucgccguggggcugcugcucuacugcaaggcccggagcacgcccgucacccuguccaaggaccagcugagcggcaucaacaacaucgcguucuccaacugaggacuaguaauaaggaaacuguaugaaugucugugggcaggaagugaagagauccuucuguaaagguuuuuggaauuaugucugcugaauaauaaacuuuuuugaaauaauaaaucugguagaaaaaugagaucuaaaaaaaaaaaaaaaaaaaaaaaaaaaaaaaaaaaaaaaaaaaaaaaaaaaaaaaaaaaaaaaaugcaucccccccccccccccccccccccccccccccaaaggcucuuuucagagccaccagaauu

SEQ ID NO: 7092 - RNA, 1970 nt, Artificial Sequence
  mRNA product Design g-5 comprising derived and/or modified sequence from HRSV(A2)__F_DSCav1_mut7 (opt1)
gggagacccgugacccggaaguuguacggcuacgcgacuuucccucccacaaacccucgcgcccuuccuuuccuacuugggcccggcagaaagcuuaccauggagcugcucauccugaaggccaacgccaucaccaccauccugacggcggugaccuucugcuucgccagcggccagaacaucaccgaggaguucuaccaguccacgugcagcgccgucuccaagggguaccucagcgcccugcgcaccggcugguacaccuccgugaucaccaucgagcugagcaacaucaaggagaacaagugcaacgggaccgacgccaaggugaagcucaucaagcaggagcuggacaaguacaagaacgcggucacggagcugcagaugcucaugugcuccacccccgccaccggcagcggguccgccaucgccagcggcguggcggugugcaagguccugcaccuggagggcgaggugaacaagaucaaguccgcccuccugagcaccaacaaggccguggucucccugagcaacgggguguccgugcucacguucaagguccuggaccugaagaacuacaucgacaagcagcuccugccgauccugaacaagcagagcugcuccaucagcaacaucgagaccgugauggaguuccagcagaagaacaaccggcuccuggagaucacccgcgaguucuccgugaacgccggcgucaccacgcccgugagcaccuacaugcugaccaacagcgagcuccugucccugaucaacgacaugcccaucaccaacgaccagaagaagcucaugagcaacaacgugcagaucguccggcagcaguccuacagcaucaugugcaucaucaaggaggaggugcuggccuacgugguccagcugccccucuacggggugaucgacacgccgugcuggaagcugcacaccagcccccugugcaccaccaacacgaaggagggcagcaacaucugccucacccgcaccgaccgggggugguacugcgacaacgcgggcuccgugagcuucuucccccaggccgagaccugcaaggucugcuccaaccgcguguucugcgacacgaugaacagccugacccugcccuccgaggucaaccucugcaacguggacaucuucaacccgaaguacgacugcaagaucaugaccagcaagaccgacguguccagcuccgucaucacgagccugggcgccaucguguccugcuacgggaagaccaagugcaccgccagcaacaagaacaagggcaucaucaagaccuucuccaacgggugcgacuacgugagcaacaagggcgucgacacggugagcgugggcaacacccuguacuacgucaacaagcaggaggggaagucccucuacgugaagggcgagcccaucaucaacuucuacgacccccugguguuccccagcgacgaguucgacgccuccaucagccaggucaacgagaagaucaaccagucccuggcguucauccggaaguccgacgagcuccugcacaacgugaacgccgggaaguccaccaccaacaucaugaucaccacgaucaucaucgugaucaucgucauccugcucagccugaucgccgugggccugcuccuguacugcaaggcccgcuccaccccggugacccugagcaaggaccagcuguccgggaucaacaacaucgccuucagcaacugaggacuaguaauaaggaaacuguaugaaugucugugggcaggaagugaagagauccuucuguaaagguuuuuggaauuaugucugcugaauaauaaacuuuuuugaaauaauaaaucugguagaaaaaugagaucuaaaaaaaaaaaaaaaaaaaaaaaaaaaaaaaaaaaaaaaaaaaaaaaaaaaaaaaaaaaaaaaaugcaucccccccccccccccccccccccccccccccaaaggcucuuuucagagccaccagaauu

SEQ ID NO: 7093 - RNA, 1970 nt, Artificial Sequence
  mRNA product Design g-5 comprising derived and/or modified sequence from HRSV(A2)__F_DSCav1_mut7 (opt2)
gggagacccgugacccggaaguuguacggcuacgcgacuuucccucccacaaacccucgcgcccuuccuuuccuacuugggcccggcagaaagcuuaccauggagcuccucauccucaaggccaacgccaucaccaccauccucaccgccgucaccuucugcuucgccuccggccagaacaucaccgaggaguucuaccaguccaccugcuccgccgucuccaagggcuaccucuccgcccuccgcaccggcugguacaccuccgucaucaccaucgagcucuccaacaucaaggagaacaagugcaacggcaccgacgccaaggucaagcucaucaagcaggagcucgacaaguacaagaacgccgucaccgagcuccagaugcucaugugcuccacccccgccaccggcuccggcuccgccaucgccuccggcgucgccgucugcaagguccuccaccucgagggcgaggucaacaagaucaaguccgcccuccucuccaccaacaaggccgucgucucccucuccaacggcgucuccguccucaccuucaagguccucgaccucaagaacuacaucgacaagcagcuccuccccauccucaacaagcaguccugcuccaucuccaacaucgagaccgucauggaguuccagcagaagaacaaccgccuccucgagaucacccgcgaguucuccgucaacgccggcgucaccacccccgucuccaccuacaugcucaccaacuccgagcuccucucccucaucaacgacaugcccaucaccaacgaccagaagaagcucauguccaacaacguccagaucguccgccagcaguccuacuccaucaugugcaucaucaaggaggagguccucgccuacgucguccagcucccccucuacggcgucaucgacacccccugcuggaagcuccacaccuccccccucugcaccaccaacaccaaggagggcuccaacaucugccucacccgcaccgaccgcggcugguacugcgacaacgccggcuccgucuccuucuucccccaggccgagaccugcaaggucugcuccaaccgcgucuucugcgacaccaugaacucccucacccuccccuccgaggucaaccucugcaacgucgacaucuucaaccccaaguacgacugcaagaucaugaccuccaagaccgacgucuccuccuccgucaucaccucccucggcgccaucgucuccugcuacggcaagaccaagugcaccgccuccaacaagaacaagggcaucaucaagaccuucuccaacggcugcgacuacgucuccaacaagggcgucgacaccgucuccgucggcaacacccucuacuacgucaacaagcaggagggcaagucccucuacgucaagggcgagcccaucaucaacuucuacgacccccucgucuuccccuccgacgaguucgacgccuccaucucccaggucaacgagaagaucaaccagucccucgccuucauccgcaaguccgacgagcuccuccacaacgucaacgccggcaaguccaccaccaacaucaugaucaccaccaucaucaucgucaucaucgucauccuccucucccucaucgccgucggccuccuccucuacugcaaggcccgcuccacccccgucacccucuccaaggaccagcucuccggcaucaacaacaucgccuucuccaacugaggacuaguaauaaggaaacuguaugaaugucugugggcaggaagugaagagauccuucuguaaagguuuuuggaauuaugucugcugaauaauaaacuuuuuugaaauaauaaaucugguagaaaaaugagaucuaaaaaaaaaaaaaaaaaaaaaaaaaaaaaaaaaaaaaaaaaaaaaaaaaaaaaaaaaaaaaaaaugcaucccccccccccccccccccccccccccccccaaaggcucuuuucagagccaccagaauu

SEQ ID NO: 7094 - RNA, 1970 nt, Artificial Sequence
  mRNA product Design g-5 comprising derived and/or modified sequence from HRSV(A2)__F_DSCav1_mut7 (opt3)
gggagacccgugacccggaaguuguacggcuacgcgacuuucccucccacaaacccucgcgcccuuccuuuccuacuugggcccggcagaaagcuuaccauggagcugcucauccuuaaggccaacgcuauuaccacaauacugacugcagugacguucugcuuugccagcggccagaauaucaccgaagaguucuaccaauccacauguucugcggucucaaaaggguauuugagugcuuuaagaacuggaugguacaccagcguuauuacaaucgaacuguccaacauuaaggagaauaaaugcaacgguaccgacgccaaggugaaacuaaucaagcaggaacucgauaaguauaaaaaugcaguaacugagcugcagaugcuuauguguucuacacccgccaccggcucggggucagcuauagcaagcggaguggccgucugcaaggugcugcacuuggagggcgaaguuaacaaaaucaagagugcucuccuguccacgaauaaagccguggucucucugagcaacgguguguccguacucacuuuuaagguuuuagaccugaagaauuacauugauaaacagcuuuugccuauccugaacaagcaaucauguaguauuagcaauaucgagaccgugauggaguuccagcagaaaaacaauaggcuacucgaaauaacacgggaguuuucugucaacgcgggggugacuaccccaguguccacauauaugcugaccaauucagaacuucugagcuugauuaacgacaugccgaucacgaacgaucagaagaaacucaugaguaauaacguccaaauuguucgccagcagucuuacuccaucaugugcaucauuaaggaggaagugcuggcauauguagugcaguuaccccuguacggagucauagacacuccuuguuggaaacuccauacaagcccacuuugcaccacuaauacaaaggagggcucgaacaucugucugacccgaacggaucguggcugguacugcgacaaugccgggucuguguccuucuuuccccaagcugaaaccuguaagguuugcucaaacagaguguucugcgauacaaugaauaguuugacucuaccuagcgaggucaaccuguguaauguggacauuuuuaacccaaaauaugauugcaagaucaugaccuccaaaacagacguaucuagcucaguuauaacuagccucggagccauuguguccuguuacgguaagaccaaaugcacagcaagcaauaagaacaagggcaucaucaaaaccuucucuaaugggugugauuaugucucaaacaagggaguggacacugucagugugggcaauacgcuguacuauguuaacaaacaggaggguaagagccuuuacgugaaaggggaacccauuaucaacuuuuaugacccucugguauucccauccgaugaguuugacgcuucuauuucgcaggucaaugaaaagauaaaccaaaguuuggccuucaucaggaaguccgaugagcuccugcacaaugugaacgcgggaaaaucaacaaccaauauuaugaucacuaccaucauuauaguuaucauugugaucuuacugagucuaauugccgucggccuccugcuuuacugcaaggcacggucuacaccggugaccuugagcaaagaccagcuguccggcaucaacaauauagcuuucucaaacugaggacuaguaauaaggaaacuguaugaaugucugugggcaggaagugaagagauccuucuguaaagguuuuuggaauuaugucugcugaauaauaaacuuuuuugaaauaauaaaucugguagaaaaaugagaucuaaaaaaaaaaaaaaaaaaaaaaaaaaaaaaaaaaaaaaaaaaaaaaaaaaaaaaaaaaaaaaaaugcaucccccccccccccccccccccccccccccccaaaggcucuuuucagagccaccagaauu

SEQ ID NO: 7095 - RNA, 1970 nt, Artificial Sequence
  mRNA product Design g-5 comprising derived and/or modified sequence from HRSV(A2)__F_DSCav1_mut7 (opt4)
gggagacccgugacccggaaguuguacggcuacgcgacuuucccucccacaaacccucgcgcccuuccuuuccuacuugggcccggcagaaagcuuaccauggagcugcugauccugaaggccaacgccaucaccaccauccugaccgccgugaccuucugcuucgccagcggccagaacaucaccgaggaguucuaccagagcaccugcagcgccgugagcaagggcuaccugagcgcccugagaaccggcugguacaccagcgugaucaccaucgagcugagcaacaucaaggagaacaagugcaacggcaccgacgccaaggugaagcugaucaagcaggagcuggacaaguacaagaacgccgugaccgagcugcagaugcugaugugcagcacccccgccaccggcagcggcagcgccaucgccagcggcguggccgugugcaaggugcugcaccuggagggcgaggugaacaagaucaagagcgcccugcugagcaccaacaaggccguggugagccugagcaacggcgugagcgugcugaccuucaaggugcuggaccugaagaacuacaucgacaagcagcugcugcccauccugaacaagcagagcugcagcaucagcaacaucgagaccgugauggaguuccagcagaagaacaacagacugcuggagaucaccagagaguucagcgugaacgccggcgugaccacccccgugagcaccuacaugcugaccaacagcgagcugcugagccugaucaacgacaugcccaucaccaacgaccagaagaagcugaugagcaacaacgugcagaucgugagacagcagagcuacagcaucaugugcaucaucaaggaggaggugcuggccuacguggugcagcugccccuguacggcgugaucgacacccccugcuggaagcugcacaccagcccccugugcaccaccaacaccaaggagggcagcaacaucugccugaccagaaccgacagaggcugguacugcgacaacgccggcagcgugagcuucuucccccaggccgagaccugcaaggugugcagcaacagaguguucugcgacaccaugaacagccugacccugcccagcgaggugaaccugugcaacguggacaucuucaaccccaaguacgacugcaagaucaugaccagcaagaccgacgugagcagcagcgugaucaccagccugggcgccaucgugagcugcuacggcaagaccaagugcaccgccagcaacaagaacaagggcaucaucaagaccuucagcaacggcugcgacuacgugagcaacaagggcguggacaccgugagcgugggcaacacccuguacuacgugaacaagcaggagggcaagagccuguacgugaagggcgagcccaucaucaacuucuacgacccccugguguuccccagcgacgaguucgacgccagcaucagccaggugaacgagaagaucaaccagagccuggccuucaucagaaagagcgacgagcugcugcacaacgugaacgccggcaagagcaccaccaacaucaugaucaccaccaucaucaucgugaucaucgugauccugcugagccugaucgccgugggccugcugcuguacugcaaggccagaagcacccccgugacccugagcaaggaccagcugagcggcaucaacaacaucgccuucagcaacugaggacuaguaauaaggaaacuguaugaaugucugugggcaggaagugaagagauccuucuguaaagguuuuuggaauuaugucugcugaauaauaaacuuuuuugaaauaauaaaucugguagaaaaaugagaucuaaaaaaaaaaaaaaaaaaaaaaaaaaaaaaaaaaaaaaaaaaaaaaaaaaaaaaaaaaaaaaaaugcaucccccccccccccccccccccccccccccccaaaggcucuuuucagagccaccagaauu

SEQ ID NO: 7096 - RNA, 1970 nt, Artificial Sequence
  mRNA product Design g-5 comprising derived and/or modified sequence from HRSV(A2)__F_DSCav1_mut7 (opt5)
gggagacccgugacccggaaguuguacggcuacgcgacuuucccucccacaaacccucgcgcccuuccuuuccuacuugggcccggcagaaagcuuaccauggagcugcucauccugaaggccaacgcuauuaccacaauccuuacggccgugaccuucugcuuugcgagcggccagaauauuacagaagaguucuaccaauccaccuguucugcugucagcaaaggguaucuguccgcccucagaacaggaugguacaccucuguuaucacaauugaacugagcaacaucaaggagaauaaaugcaacggcaccgacgccaaggugaaacuuaucaagcaggaacuggauaaguauaaaaaugcugugacggagcuccagaugcugauguguuccacccccgccacagggucuggaagcgcuauugccuccggcgucgcggugugcaagguucugcaccucgagggggaagugaacaaaaucaagagcgcccugcuuucuaccaauaaagcugucgugucccugagcaacggaguuucugugcucacauuuaagguccuggaccuuaagaauuacauugauaaacagcugcucccuauccugaacaagcaauccuguagcauuucuaauaucgagaccgugauggaguuccagcagaaaaacaaucggcugcucgaaauuacgcgcgaguuuuccgugaacgccggcgucacaaccccgguuagcacauauaugcugaccaauuccgaacuucugucucucaucaacgacaugcccaucaccaacgaucagaagaaacugaugagcaauaacgugcaaauugugagacagcaguccuacagcaucaugugcauuaucaaggaggaaguccuugcuuaugugguucagcugccucucuacggcgugauugacacacccuguuggaaacugcauacgucuccucugugcaccacaaauaccaaggagggguccaacaucugucucacacggaccgaucgcggaugguacugcgacaaugccggcagcgucucuuucuuuccccaagcggaaacguguaaggugugcagcaacagaguuuucugcgauacaaugaacucccugacccuuccuucugaggugaaucuguguaaugucgacaucuuuaacccgaaauaugauugcaagauuaugaccagcaaaacagacguguccagcucugucaucaccucccucggggccauugugagcuguuacggaaagacaaaaugcacggcuucuaauaagaacaagggcaucauuaaaaccuucuccaaugggugugauuauguuagcaacaagggaguggacacagucuccgugggcaauacccuguacuauguuaacaaacaggagggcaagucucuuuacgugaaaggggaacccaucaucaacuuuuaugacccucuggucuuccccagcgaugaguuugacgccuccauuucucaggugaaugaaaagaucaaccaaagccucgcuuucauucggaaguccgaugagcugcugcacaaugugaacgccggaaaaagcacaaccaauaucaugauuacgaccaucauuaucguuaucauugucauccuccugucucuuauugccgugggccugcuccuguacugcaaggcucgcuccacaccugugacccugagcaaagaccagcuuucugggaucaacaauauugcguucuccaacugaggacuaguaauaaggaaacuguaugaaugucugugggcaggaagugaagagauccuucuguaaagguuuuuggaauuaugucugcugaauaauaaacuuuuuugaaauaauaaaucugguagaaaaaugagaucuaaaaaaaaaaaaaaaaaaaaaaaaaaaaaaaaaaaaaaaaaaaaaaaaaaaaaaaaaaaaaaaaugcaucccccccccccccccccccccccccccccccaaaggcucuuuucagagccaccagaauu

SEQ ID NO: 7097 - RNA, 1970 nt, Artificial Sequence
  mRNA product Design g-5 comprising derived and/or modified sequence from HRSV(A2)__F_DSCav1_mut7 (opt6)
gggagacccgugacccggaaguuguacggcuacgcgacuuucccucccacaaacccucgcgcccuuccuuuccuacuugggcccggcagaaagcuuaccauggaauuacucauacucaaagcaaaugcaauuaccacuauacucacagcuguaacuuuuuguuucgccucaggacaaaacaucacagaagaauuuuaucaauccacaugcucugccguaucaaaaggcuaccuaucugcccuaagaacagguugguacacaucuguaauaacaaucgaauuauccaacaucaaagaaaacaaaugcaacggcacagacgcaaaagucaaacucaucaaacaagaauuagauaaauauaaaaacgcaguaacagaacuacaaaugcuaaugugcucuacacccgccacaggaucaggauccgcaaucgcuucuggaguagccguuugcaaaguauuacaccuagaaggagaaguaaauaaaauaaaauccgcacuacuaucaacuaauaaagcaguaguaucacuuucuaaugguguaucaguauuaacauucaaaguccucgaccuaaaaaauuacaucgacaaacaacuauuacccauccuuaauaaacaaucaugcuccauaucaaacauagaaacugucauggaauuucaacaaaaaaacaauagacuucuagaaaucacaagagaauuuucuguaaaugcaggaguaacuacaccaguaucaacauauauguuaaccaacuccgaacuacuaucacucauaaacgacaugccaauaacaaacgaccaaaaaaaacuaaugucaaauaacguucaaauaguaagacaacaaucauacucaaucaugugcauaauaaaagaagaaguuuuagcauacgucguacaacuuccccuauacggaguaauagacaccccuugcuggaaacuccacaccucaccacuaugcacuacaaacacaaaagaagguuccaacaucugcuuaacaagaaccgaucgaggaugguacugcgacaacgcugguuccguaucuuucuucccacaagcagaaacaugcaaaguaugcuccaauagaguauucugcgacaccaugaacucacuaacucuaccauccgaaguaaaccuaugcaacgucgacauauuuaauccaaaauaugacugcaaaauaaugacuucaaaaacagacguauccucaucaguaauaacauccuuaggagcaauaguaucauguuacggcaagacaaaauguacagccucaaacaaaaacaaagguaucauuaaaaccuucuccaacggcugcgacuacguaucaaauaaaggugucgauacaguaucaguaggaaacacacucuauuacguuaauaaacaagaaggaaagucauuauacguaaaaggagaaccaauaaucaauuucuacgauccccuagucuuucccucagaugaauuugacgcaagcaucucucaagucaacgaaaaaauaaaccaaucccuagccuucauaagaaaaucagaugaacuacuucauaacgucaacgccggaaaaucaacaaccaacauaaugaucacuacaaucauaauuguaauuauaguaauacuacuaucgcuaauugccguuggacuacuacuauauuguaaagcaagaucaacacccguuacucuauccaaagaucaauuaucaggaaucaacaacauagccuucucaaauuaaggacuaguaauaaggaaacuguaugaaugucugugggcaggaagugaagagauccuucuguaaagguuuuuggaauuaugucugcugaauaauaaacuuuuuugaaauaauaaaucugguagaaaaaugagaucuaaaaaaaaaaaaaaaaaaaaaaaaaaaaaaaaaaaaaaaaaaaaaaaaaaaaaaaaaaaaaaaaugcaucccccccccccccccccccccccccccccccaaaggcucuuuucagagccaccagaauu

SEQ ID NO: 7098 - RNA, 1970 nt, Artificial Sequence
  mRNA product Design g-5 comprising derived and/or modified sequence from HRSV(A2)__F_DSCav1_mut7 (opt11)
gggagacccgugacccggaaguuguacggcuacgcgacuuucccucccacaaacccucgcgcccuuccuuuccuacuugggcccggcagaaagcuuaccauggaacuacucauacuuaaagccaacgcaauaaccacaauccucaccgccgucacauucugcuucgccucgggacaaaacauaaccgaagaauuuuaccagucuaccugcuccgccgucuccaaggguuaccucuccgcgcuccgcaccgggugguacaccagcguuaucaccaucgaacuaucuaacauaaaagaaaacaagugcaacggaaccgacgcaaaagucaaacucaucaaacaagaacuagacaaauacaagaaugccgucaccgaacuacaaaugcucaugugcuccacccccgccaccggauccggcuccgccauugccuccggcgucgccguaugcaaaguccuucacuuggaaggagaaguuaacaaaauaaaaagcgcccuccugucgaccaacaaagcgguggucagccucuccaacggcgucucuguccucaccuucaaaguccucgaccucaagaacuacauagauaaacaacuacuccccauccuaaacaaacagucaugcagcauauccaacaucgaaaccgucauggaguuccaacagaaaaacaaccgccuccuugaaaucacccgcgaguucucugucaacgccggcgucaccacccccgucuccaccuacaugcucacaaacuccgaacuccucagccucaucaacgacaugccaaucaccaacgaccaaaagaaacucauguccaacaacguacaaaucguucgucaacaaucauacucaaucaugugcaucauuaaagaagaaguccucgcauacgucguccaacucccccucuauggggucaucgacaccccaugcuggaaacuccacaccucuccccuaugcaccaccaacaccaaagaaggcuccaacaucugccuaacccgaaccgaccgcggaugguacugcgacaacgccggcuccgucuccuucuucccccaggccgaaacauguaaagucugcuccaaccguguguucugcgacaccaugaacucacuaacccuccccuccgaagucaaccucugcaacgucgacaucuucaacccgaaauacgacugcaaaauaaugaccagcaaaacagacguauccucuagcgucauuaccagccuaggugcaaucguguccugcuacggcaaaacaaaaugcaccgccuccaacaaaaauaaaggaaucauaaaaaccuucuccaacggcugcgacuacgucagcaacaaaggagucgacaccgucuccguaggaaauacucuauacuaugucaacaaacaagaggguaaaucccucuacgucaaaggcgaacccaucaucaacuucuacgacccccucgucuuccccucugacgaguucgacgccagcauaucacaaguaaacgaaaagaucaaccaaucccucgcauucauucgcaaauccgacgaacuccuacacaacgucaacgccggaaaauccaccaccaacaucaugaucacuacuaucauuaucgucaucaucgucauccuccucucccucaucgcagucggccuucuacucuacugcaaggcacgcucuacacccguaacccugucuaaagaccaacucuccggcaucaacaacaucgcuuucuccaacuaaggacuaguaauaaggaaacuguaugaaugucugugggcaggaagugaagagauccuucuguaaagguuuuuggaauuaugucugcugaauaauaaacuuuuuugaaauaauaaaucugguagaaaaaugagaucuaaaaaaaaaaaaaaaaaaaaaaaaaaaaaaaaaaaaaaaaaaaaaaaaaaaaaaaaaaaaaaaaugcaucccccccccccccccccccccccccccccccaaaggcucuuuucagagccaccagaauu

SEQ ID NO: 7099 - RNA, 1986 nt, Artificial Sequence
  mRNA product Design h-1 comprising derived and/or modified sequence from HRSV(A2)__F_DSCav1_mut7 (opt1)
gggagacccgugacccggaaguuguacggcuacgcgacuuucccucccacaaacccucgcgcccuuccuuuccuacuugggcccggcagaaagcuuaccauggagcugcucauccugaaggccaacgccaucaccaccauccugacggcggugaccuucugcuucgccagcggccagaacaucaccgaggaguucuaccaguccacgugcagcgccgucuccaagggguaccucagcgcccugcggaccggcugguacaccuccgugaucaccaucgagcugagcaacaucaaggagaacaagugcaacgggaccgacgccaaggugaagcucaucaagcaggagcuggacaaguacaagaacgcggucacggagcugcagaugcugaugugcuccaccccggcaaccggcuccggcuccgccaucgcgagcggcgucgccgugugcaaggugcugcaccucgagggggaggucaacaagaucaagagcgcccugcuguccaccaacaaggccguggugagccucuccaacggcgucagcgugcugaccuucaaggugcuggaccucaagaacuacaucgacaagcagcugcugcccauccugaacaagcagagcugcuccaucagcaacaucgagacggugauggaguuccagcagaagaacaaccggcuccuggagaucacccgcgaguucagcgugaacgccggggucaccacccccguguccacguacaugcugaccaacagcgagcuccugucccugaucaacgacaugccgaucaccaacgaccagaagaagcucaugagcaacaacgugcagaucguccggcagcaguccuacagcaucaugugcaucaucaaggaggaggugcuggcguacgugguccagcugccccucuacggcgugaucgacacccccugcuggaagcugcacacgagcccccugugcaccaccaacaccaaggagggguccaacaucugccucacgcgcaccgaccggggcugguacugcgacaacgccggcagcgucuccuucuucccgcaggccgagaccugcaaggugugcagcaaccgcguguucugcgacaccaugaacucccugacgcugcccagcgagguaaaccucugcaacgucgacaucuucaaccccaaguacgacugcaagaucaugaccuccaagaccgacgugagcuccagcgugaucaccucccugggggccaucgucagcugcuacggcaagacgaagugcaccgccagcaacaagaacaaggggaucaucaagaccuucuccaacggcugcgacuacgugagcaacaagggcguggacaccguguccgucgggaacacccuguacuacgugaacaagcaggagggcaagagccucuacgugaagggggagcccaucaucaacuucuacgacccgcuggucuuccccuccgacgaguucgacgcgagcaucucccaggugaacgagaagaucaaccagagccuggccuucauccgcaaguccgacgagcugcuccacaacgugaacgccggcaagagcacgaccaacaucaugaucaccaccaucaucaucgucaucaucgugauccugcugucccucaucgccguggggcugcugcucuacugcaaggcccggagcacgcccgucacccuguccaaggaccagcugagcggcaucaacaacaucgcguucuccaacugaggacuaguacuggcugcaucucccuuuccucuguccuccauccuucucccaggauggugaagggggaccugguacccagugauccccaccccaggauccuaaaucaugacuuaccugcuaauaaaaacucauuggaaaagugagaagaucuaaaaaaaaaaaaaaaaaaaaaaaaaaaaaaaaaaaaaaaaaaaaaaaaaaaaaaaaaaaaaaaaugcaucccccccccccccccccccccccccccccccaaaggcucuuuucagagccaccagaauu

SEQ ID NO: 7100 - RNA, 1986 nt, Artificial Sequence
  mRNA product Design h-1 comprising derived and/or modified sequence from HRSV(A2)__F_DSCav1_mut7 (opt1)
gggagacccgugacccggaaguuguacggcuacgcgacuuucccucccacaaacccucgcgcccuuccuuuccuacuugggcccggcagaaagcuuaccauggagcugcucauccugaaggccaacgccaucaccaccauccugacggcggugaccuucugcuucgccagcggccagaacaucaccgaggaguucuaccaguccacgugcagcgccgucuccaagggguaccucagcgcccugcgcaccggcugguacaccuccgugaucaccaucgagcugagcaacaucaaggagaacaagugcaacgggaccgacgccaaggugaagcucaucaagcaggagcuggacaaguacaagaacgcggucacggagcugcagaugcucaugugcuccacccccgccaccggcagcggguccgccaucgccagcggcguggcggugugcaagguccugcaccuggagggcgaggugaacaagaucaaguccgcccuccugagcaccaacaaggccguggucucccugagcaacgggguguccgugcucacguucaagguccuggaccugaagaacuacaucgacaagcagcuccugccgauccugaacaagcagagcugcuccaucagcaacaucgagaccgugauggaguuccagcagaagaacaaccggcuccuggagaucacccgcgaguucuccgugaacgccggcgucaccacgcccgugagcaccuacaugcugaccaacagcgagcuccugucccugaucaacgacaugcccaucaccaacgaccagaagaagcucaugagcaacaacgugcagaucguccggcagcaguccuacagcaucaugugcaucaucaaggaggaggugcuggccuacgugguccagcugccccucuacggggugaucgacacgccgugcuggaagcugcacaccagcccccugugcaccaccaacacgaaggagggcagcaacaucugccucacccgcaccgaccgggggugguacugcgacaacgcgggcuccgugagcuucuucccccaggccgagaccugcaaggucugcuccaaccgcguguucugcgacacgaugaacagccugacccugcccuccgaggucaaccucugcaacguggacaucuucaacccgaaguacgacugcaagaucaugaccagcaagaccgacguguccagcuccgucaucacgagccugggcgccaucguguccugcuacgggaagaccaagugcaccgccagcaacaagaacaagggcaucaucaagaccuucuccaacgggugcgacuacgugagcaacaagggcgucgacacggugagcgugggcaacacccuguacuacgucaacaagcaggaggggaagucccucuacgugaagggcgagcccaucaucaacuucuacgacccccugguguuccccagcgacgaguucgacgccuccaucagccaggucaacgagaagaucaaccagucccuggcguucauccggaaguccgacgagcuccugcacaacgugaacgccgggaaguccaccaccaacaucaugaucaccacgaucaucaucgugaucaucgucauccugcucagccugaucgccgugggccugcuccuguacugcaaggcccgcuccaccccggugacccugagcaaggaccagcuguccgggaucaacaacaucgccuucagcaacugaggacuaguacuggcugcaucucccuuuccucuguccuccauccuucucccaggauggugaagggggaccugguacccagugauccccaccccaggauccuaaaucaugacuuaccugcuaauaaaaacucauuggaaaagugagaagaucuaaaaaaaaaaaaaaaaaaaaaaaaaaaaaaaaaaaaaaaaaaaaaaaaaaaaaaaaaaaaaaaaugcaucccccccccccccccccccccccccccccccaaaggcucuuuucagagccaccagaauu

SEQ ID NO: 7101 - RNA, 1986 nt, Artificial Sequence
  mRNA product Design h-1 comprising derived and/or modified sequence from HRSV(A2)__F_DSCav1_mut7 (opt2)
gggagacccgugacccggaaguuguacggcuacgcgacuuucccucccacaaacccucgcgcccuuccuuuccuacuugggcccggcagaaagcuuaccauggagcuccucauccucaaggccaacgccaucaccaccauccucaccgccgucaccuucugcuucgccuccggccagaacaucaccgaggaguucuaccaguccaccugcuccgccgucuccaagggcuaccucuccgcccuccgcaccggcugguacaccuccgucaucaccaucgagcucuccaacaucaaggagaacaagugcaacggcaccgacgccaaggucaagcucaucaagcaggagcucgacaaguacaagaacgccgucaccgagcuccagaugcucaugugcuccacccccgccaccggcuccggcuccgccaucgccuccggcgucgccgucugcaagguccuccaccucgagggcgaggucaacaagaucaaguccgcccuccucuccaccaacaaggccgucgucucccucuccaacggcgucuccguccucaccuucaagguccucgaccucaagaacuacaucgacaagcagcuccuccccauccucaacaagcaguccugcuccaucuccaacaucgagaccgucauggaguuccagcagaagaacaaccgccuccucgagaucacccgcgaguucuccgucaacgccggcgucaccacccccgucuccaccuacaugcucaccaacuccgagcuccucucccucaucaacgacaugcccaucaccaacgaccagaagaagcucauguccaacaacguccagaucguccgccagcaguccuacuccaucaugugcaucaucaaggaggagguccucgccuacgucguccagcucccccucuacggcgucaucgacacccccugcuggaagcuccacaccuccccccucugcaccaccaacaccaaggagggcuccaacaucugccucacccgcaccgaccgcggcugguacugcgacaacgccggcuccgucuccuucuucccccaggccgagaccugcaaggucugcuccaaccgcgucuucugcgacaccaugaacucccucacccuccccuccgaggucaaccucugcaacgucgacaucuucaaccccaaguacgacugcaagaucaugaccuccaagaccgacgucuccuccuccgucaucaccucccucggcgccaucgucuccugcuacggcaagaccaagugcaccgccuccaacaagaacaagggcaucaucaagaccuucuccaacggcugcgacuacgucuccaacaagggcgucgacaccgucuccgucggcaacacccucuacuacgucaacaagcaggagggcaagucccucuacgucaagggcgagcccaucaucaacuucuacgacccccucgucuuccccuccgacgaguucgacgccuccaucucccaggucaacgagaagaucaaccagucccucgccuucauccgcaaguccgacgagcuccuccacaacgucaacgccggcaaguccaccaccaacaucaugaucaccaccaucaucaucgucaucaucgucauccuccucucccucaucgccgucggccuccuccucuacugcaaggcccgcuccacccccgucacccucuccaaggaccagcucuccggcaucaacaacaucgccuucuccaacugaggacuaguacuggcugcaucucccuuuccucuguccuccauccuucucccaggauggugaagggggaccugguacccagugauccccaccccaggauccuaaaucaugacuuaccugcuaauaaaaacucauuggaaaagugagaagaucuaaaaaaaaaaaaaaaaaaaaaaaaaaaaaaaaaaaaaaaaaaaaaaaaaaaaaaaaaaaaaaaaugcaucccccccccccccccccccccccccccccccaaaggcucuuuucagagccaccagaauu

SEQ ID NO: 7102 - RNA, 1986 nt, Artificial Sequence
  mRNA product Design h-1 comprising derived and/or modified sequence from HRSV(A2)__F_DSCav1_mut7 (opt3)
gggagacccgugacccggaaguuguacggcuacgcgacuuucccucccacaaacccucgcgcccuuccuuuccuacuugggcccggcagaaagcuuaccauggagcugcucauccuuaaggccaacgcuauuaccacaauacugacugcagugacguucugcuuugccagcggccagaauaucaccgaagaguucuaccaauccacauguucugcggucucaaaaggguauuugagugcuuuaagaacuggaugguacaccagcguuauuacaaucgaacuguccaacauuaaggagaauaaaugcaacgguaccgacgccaaggugaaacuaaucaagcaggaacucgauaaguauaaaaaugcaguaacugagcugcagaugcuuauguguucuacacccgccaccggcucggggucagcuauagcaagcggaguggccgucugcaaggugcugcacuuggagggcgaaguuaacaaaaucaagagugcucuccuguccacgaauaaagccguggucucucugagcaacgguguguccguacucacuuuuaagguuuuagaccugaagaauuacauugauaaacagcuuuugccuauccugaacaagcaaucauguaguauuagcaauaucgagaccgugauggaguuccagcagaaaaacaauaggcuacucgaaauaacacgggaguuuucugucaacgcgggggugacuaccccaguguccacauauaugcugaccaauucagaacuucugagcuugauuaacgacaugccgaucacgaacgaucagaagaaacucaugaguaauaacguccaaauuguucgccagcagucuuacuccaucaugugcaucauuaaggaggaagugcuggcauauguagugcaguuaccccuguacggagucauagacacuccuuguuggaaacuccauacaagcccacuuugcaccacuaauacaaaggagggcucgaacaucugucugacccgaacggaucguggcugguacugcgacaaugccgggucuguguccuucuuuccccaagcugaaaccuguaagguuugcucaaacagaguguucugcgauacaaugaauaguuugacucuaccuagcgaggucaaccuguguaauguggacauuuuuaacccaaaauaugauugcaagaucaugaccuccaaaacagacguaucuagcucaguuauaacuagccucggagccauuguguccuguuacgguaagaccaaaugcacagcaagcaauaagaacaagggcaucaucaaaaccuucucuaaugggugugauuaugucucaaacaagggaguggacacugucagugugggcaauacgcuguacuauguuaacaaacaggaggguaagagccuuuacgugaaaggggaacccauuaucaacuuuuaugacccucugguauucccauccgaugaguuugacgcuucuauuucgcaggucaaugaaaagauaaaccaaaguuuggccuucaucaggaaguccgaugagcuccugcacaaugugaacgcgggaaaaucaacaaccaauauuaugaucacuaccaucauuauaguuaucauugugaucuuacugagucuaauugccgucggccuccugcuuuacugcaaggcacggucuacaccggugaccuugagcaaagaccagcuguccggcaucaacaauauagcuuucucaaacugaggacuaguacuggcugcaucucccuuuccucuguccuccauccuucucccaggauggugaagggggaccugguacccagugauccccaccccaggauccuaaaucaugacuuaccugcuaauaaaaacucauuggaaaagugagaagaucuaaaaaaaaaaaaaaaaaaaaaaaaaaaaaaaaaaaaaaaaaaaaaaaaaaaaaaaaaaaaaaaaugcaucccccccccccccccccccccccccccccccaaaggcucuuuucagagccaccagaauu

SEQ ID NO: 7103 - RNA, 1986 nt, Artificial Sequence
  mRNA product Design h-1 comprising derived and/or modified sequence from HRSV(A2)__F_DSCav1_mut7 (opt4)
gggagacccgugacccggaaguuguacggcuacgcgacuuucccucccacaaacccucgcgcccuuccuuuccuacuugggcccggcagaaagcuuaccauggagcugcugauccugaaggccaacgccaucaccaccauccugaccgccgugaccuucugcuucgccagcggccagaacaucaccgaggaguucuaccagagcaccugcagcgccgugagcaagggcuaccugagcgcccugagaaccggcugguacaccagcgugaucaccaucgagcugagcaacaucaaggagaacaagugcaacggcaccgacgccaaggugaagcugaucaagcaggagcuggacaaguacaagaacgccgugaccgagcugcagaugcugaugugcagcacccccgccaccggcagcggcagcgccaucgccagcggcguggccgugugcaaggugcugcaccuggagggcgaggugaacaagaucaagagcgcccugcugagcaccaacaaggccguggugagccugagcaacggcgugagcgugcugaccuucaaggugcuggaccugaagaacuacaucgacaagcagcugcugcccauccugaacaagcagagcugcagcaucagcaacaucgagaccgugauggaguuccagcagaagaacaacagacugcuggagaucaccagagaguucagcgugaacgccggcgugaccacccccgugagcaccuacaugcugaccaacagcgagcugcugagccugaucaacgacaugcccaucaccaacgaccagaagaagcugaugagcaacaacgugcagaucgugagacagcagagcuacagcaucaugugcaucaucaaggaggaggugcuggccuacguggugcagcugccccuguacggcgugaucgacacccccugcuggaagcugcacaccagcccccugugcaccaccaacaccaaggagggcagcaacaucugccugaccagaaccgacagaggcugguacugcgacaacgccggcagcgugagcuucuucccccaggccgagaccugcaaggugugcagcaacagaguguucugcgacaccaugaacagccugacccugcccagcgaggugaaccugugcaacguggacaucuucaaccccaaguacgacugcaagaucaugaccagcaagaccgacgugagcagcagcgugaucaccagccugggcgccaucgugagcugcuacggcaagaccaagugcaccgccagcaacaagaacaagggcaucaucaagaccuucagcaacggcugcgacuacgugagcaacaagggcguggacaccgugagcgugggcaacacccuguacuacgugaacaagcaggagggcaagagccuguacgugaagggcgagcccaucaucaacuucuacgacccccugguguuccccagcgacgaguucgacgccagcaucagccaggugaacgagaagaucaaccagagccuggccuucaucagaaagagcgacgagcugcugcacaacgugaacgccggcaagagcaccaccaacaucaugaucaccaccaucaucaucgugaucaucgugauccugcugagccugaucgccgugggccugcugcuguacugcaaggccagaagcacccccgugacccugagcaaggaccagcugagcggcaucaacaacaucgccuucagcaacugaggacuaguacuggcugcaucucccuuuccucuguccuccauccuucucccaggauggugaagggggaccugguacccagugauccccaccccaggauccuaaaucaugacuuaccugcuaauaaaaacucauuggaaaagugagaagaucuaaaaaaaaaaaaaaaaaaaaaaaaaaaaaaaaaaaaaaaaaaaaaaaaaaaaaaaaaaaaaaaaugcaucccccccccccccccccccccccccccccccaaaggcucuuuucagagccaccagaauu

SEQ ID NO: 7104 - RNA, 1986 nt, Artificial Sequence
  mRNA product Design h-1 comprising derived and/or modified sequence from HRSV(A2)__F_DSCav1_mut7 (opt5)
gggagacccgugacccggaaguuguacggcuacgcgacuuucccucccacaaacccucgcgcccuuccuuuccuacuugggcccggcagaaagcuuaccauggagcugcucauccugaaggccaacgcuauuaccacaauccuuacggccgugaccuucugcuuugcgagcggccagaauauuacagaagaguucuaccaauccaccuguucugcugucagcaaaggguaucuguccgcccucagaacaggaugguacaccucuguuaucacaauugaacugagcaacaucaaggagaauaaaugcaacggcaccgacgccaaggugaaacuuaucaagcaggaacuggauaaguauaaaaaugcugugacggagcuccagaugcugauguguuccacccccgccacagggucuggaagcgcuauugccuccggcgucgcggugugcaagguucugcaccucgagggggaagugaacaaaaucaagagcgcccugcuuucuaccaauaaagcugucgugucccugagcaacggaguuucugugcucacauuuaagguccuggaccuuaagaauuacauugauaaacagcugcucccuauccugaacaagcaauccuguagcauuucuaauaucgagaccgugauggaguuccagcagaaaaacaaucggcugcucgaaauuacgcgcgaguuuuccgugaacgccggcgucacaaccccgguuagcacauauaugcugaccaauuccgaacuucugucucucaucaacgacaugcccaucaccaacgaucagaagaaacugaugagcaauaacgugcaaauugugagacagcaguccuacagcaucaugugcauuaucaaggaggaaguccuugcuuaugugguucagcugccucucuacggcgugauugacacacccuguuggaaacugcauacgucuccucugugcaccacaaauaccaaggagggguccaacaucugucucacacggaccgaucgcggaugguacugcgacaaugccggcagcgucucuuucuuuccccaagcggaaacguguaaggugugcagcaacagaguuuucugcgauacaaugaacucccugacccuuccuucugaggugaaucuguguaaugucgacaucuuuaacccgaaauaugauugcaagauuaugaccagcaaaacagacguguccagcucugucaucaccucccucggggccauugugagcuguuacggaaagacaaaaugcacggcuucuaauaagaacaagggcaucauuaaaaccuucuccaaugggugugauuauguuagcaacaagggaguggacacagucuccgugggcaauacccuguacuauguuaacaaacaggagggcaagucucuuuacgugaaaggggaacccaucaucaacuuuuaugacccucuggucuuccccagcgaugaguuugacgccuccauuucucaggugaaugaaaagaucaaccaaagccucgcuuucauucggaaguccgaugagcugcugcacaaugugaacgccggaaaaagcacaaccaauaucaugauuacgaccaucauuaucguuaucauugucauccuccugucucuuauugccgugggccugcuccuguacugcaaggcucgcuccacaccugugacccugagcaaagaccagcuuucugggaucaacaauauugcguucuccaacugaggacuaguacuggcugcaucucccuuuccucuguccuccauccuucucccaggauggugaagggggaccugguacccagugauccccaccccaggauccuaaaucaugacuuaccugcuaauaaaaacucauuggaaaagugagaagaucuaaaaaaaaaaaaaaaaaaaaaaaaaaaaaaaaaaaaaaaaaaaaaaaaaaaaaaaaaaaaaaaaugcaucccccccccccccccccccccccccccccccaaaggcucuuuucagagccaccagaauu

SEQ ID NO: 7105 - RNA, 1986 nt, Artificial Sequence
  mRNA product Design h-1 comprising derived and/or modified sequence from HRSV(A2)__F_DSCav1_mut7 (opt6)
gggagacccgugacccggaaguuguacggcuacgcgacuuucccucccacaaacccucgcgcccuuccuuuccuacuugggcccggcagaaagcuuaccauggaauuacucauacucaaagcaaaugcaauuaccacuauacucacagcuguaacuuuuuguuucgccucaggacaaaacaucacagaagaauuuuaucaauccacaugcucugccguaucaaaaggcuaccuaucugcccuaagaacagguugguacacaucuguaauaacaaucgaauuauccaacaucaaagaaaacaaaugcaacggcacagacgcaaaagucaaacucaucaaacaagaauuagauaaauauaaaaacgcaguaacagaacuacaaaugcuaaugugcucuacacccgccacaggaucaggauccgcaaucgcuucuggaguagccguuugcaaaguauuacaccuagaaggagaaguaaauaaaauaaaauccgcacuacuaucaacuaauaaagcaguaguaucacuuucuaaugguguaucaguauuaacauucaaaguccucgaccuaaaaaauuacaucgacaaacaacuauuacccauccuuaauaaacaaucaugcuccauaucaaacauagaaacugucauggaauuucaacaaaaaaacaauagacuucuagaaaucacaagagaauuuucuguaaaugcaggaguaacuacaccaguaucaacauauauguuaaccaacuccgaacuacuaucacucauaaacgacaugccaauaacaaacgaccaaaaaaaacuaaugucaaauaacguucaaauaguaagacaacaaucauacucaaucaugugcauaauaaaagaagaaguuuuagcauacgucguacaacuuccccuauacggaguaauagacaccccuugcuggaaacuccacaccucaccacuaugcacuacaaacacaaaagaagguuccaacaucugcuuaacaagaaccgaucgaggaugguacugcgacaacgcugguuccguaucuuucuucccacaagcagaaacaugcaaaguaugcuccaauagaguauucugcgacaccaugaacucacuaacucuaccauccgaaguaaaccuaugcaacgucgacauauuuaauccaaaauaugacugcaaaauaaugacuucaaaaacagacguauccucaucaguaauaacauccuuaggagcaauaguaucauguuacggcaagacaaaauguacagccucaaacaaaaacaaagguaucauuaaaaccuucuccaacggcugcgacuacguaucaaauaaaggugucgauacaguaucaguaggaaacacacucuauuacguuaauaaacaagaaggaaagucauuauacguaaaaggagaaccaauaaucaauuucuacgauccccuagucuuucccucagaugaauuugacgcaagcaucucucaagucaacgaaaaaauaaaccaaucccuagccuucauaagaaaaucagaugaacuacuucauaacgucaacgccggaaaaucaacaaccaacauaaugaucacuacaaucauaauuguaauuauaguaauacuacuaucgcuaauugccguuggacuacuacuauauuguaaagcaagaucaacacccguuacucuauccaaagaucaauuaucaggaaucaacaacauagccuucucaaauuaaggacuaguacuggcugcaucucccuuuccucuguccuccauccuucucccaggauggugaagggggaccugguacccagugauccccaccccaggauccuaaaucaugacuuaccugcuaauaaaaacucauuggaaaagugagaagaucuaaaaaaaaaaaaaaaaaaaaaaaaaaaaaaaaaaaaaaaaaaaaaaaaaaaaaaaaaaaaaaaaugcaucccccccccccccccccccccccccccccccaaaggcucuuuucagagccaccagaauu

SEQ ID NO: 7106 - RNA, 1986 nt, Artificial Sequence
  mRNA product Design h-1 comprising derived and/or modified sequence from HRSV(A2)__F_DSCav1_mut7 (opt11)
gggagacccgugacccggaaguuguacggcuacgcgacuuucccucccacaaacccucgcgcccuuccuuuccuacuugggcccggcagaaagcuuaccauggaacuacucauacuuaaagccaacgcaauaaccacaauccucaccgccgucacauucugcuucgccucgggacaaaacauaaccgaagaauuuuaccagucuaccugcuccgccgucuccaaggguuaccucuccgcgcuccgcaccgggugguacaccagcguuaucaccaucgaacuaucuaacauaaaagaaaacaagugcaacggaaccgacgcaaaagucaaacucaucaaacaagaacuagacaaauacaagaaugccgucaccgaacuacaaaugcucaugugcuccacccccgccaccggauccggcuccgccauugccuccggcgucgccguaugcaaaguccuucacuuggaaggagaaguuaacaaaauaaaaagcgcccuccugucgaccaacaaagcgguggucagccucuccaacggcgucucuguccucaccuucaaaguccucgaccucaagaacuacauagauaaacaacuacuccccauccuaaacaaacagucaugcagcauauccaacaucgaaaccgucauggaguuccaacagaaaaacaaccgccuccuugaaaucacccgcgaguucucugucaacgccggcgucaccacccccgucuccaccuacaugcucacaaacuccgaacuccucagccucaucaacgacaugccaaucaccaacgaccaaaagaaacucauguccaacaacguacaaaucguucgucaacaaucauacucaaucaugugcaucauuaaagaagaaguccucgcauacgucguccaacucccccucuauggggucaucgacaccccaugcuggaaacuccacaccucuccccuaugcaccaccaacaccaaagaaggcuccaacaucugccuaacccgaaccgaccgcggaugguacugcgacaacgccggcuccgucuccuucuucccccaggccgaaacauguaaagucugcuccaaccguguguucugcgacaccaugaacucacuaacccuccccuccgaagucaaccucugcaacgucgacaucuucaacccgaaauacgacugcaaaauaaugaccagcaaaacagacguauccucuagcgucauuaccagccuaggugcaaucguguccugcuacggcaaaacaaaaugcaccgccuccaacaaaaauaaaggaaucauaaaaaccuucuccaacggcugcgacuacgucagcaacaaaggagucgacaccgucuccguaggaaauacucuauacuaugucaacaaacaagaggguaaaucccucuacgucaaaggcgaacccaucaucaacuucuacgacccccucgucuuccccucugacgaguucgacgccagcauaucacaaguaaacgaaaagaucaaccaaucccucgcauucauucgcaaauccgacgaacuccuacacaacgucaacgccggaaaauccaccaccaacaucaugaucacuacuaucauuaucgucaucaucgucauccuccucucccucaucgcagucggccuucuacucuacugcaaggcacgcucuacacccguaacccugucuaaagaccaacucuccggcaucaacaacaucgcuuucuccaacuaaggacuaguacuggcugcaucucccuuuccucuguccuccauccuucucccaggauggugaagggggaccugguacccagugauccccaccccaggauccuaaaucaugacuuaccugcuaauaaaaacucauuggaaaagugagaagaucuaaaaaaaaaaaaaaaaaaaaaaaaaaaaaaaaaaaaaaaaaaaaaaaaaaaaaaaaaaaaaaaaugcaucccccccccccccccccccccccccccccccaaaggcucuuuucagagccaccagaauu

SEQ ID NO: 7107 - RNA, 2202 nt, Artificial Sequence
  mRNA product Design h-2 comprising derived and/or modified sequence from HRSV(A2)__F_DSCav1_mut7 (opt1)
gggagacccgugacccggaaguuguacggcuacgcgacuuucccucccacaaacccucgcgcccuuccuuuccuacuugggcccggcagaaagcuuaccauggagcugcucauccugaaggccaacgccaucaccaccauccugacggcggugaccuucugcuucgccagcggccagaacaucaccgaggaguucuaccaguccacgugcagcgccgucuccaagggguaccucagcgcccugcggaccggcugguacaccuccgugaucaccaucgagcugagcaacaucaaggagaacaagugcaacgggaccgacgccaaggugaagcucaucaagcaggagcuggacaaguacaagaacgcggucacggagcugcagaugcugaugugcuccaccccggcaaccggcuccggcuccgccaucgcgagcggcgucgccgugugcaaggugcugcaccucgagggggaggucaacaagaucaagagcgcccugcuguccaccaacaaggccguggugagccucuccaacggcgucagcgugcugaccuucaaggugcuggaccucaagaacuacaucgacaagcagcugcugcccauccugaacaagcagagcugcuccaucagcaacaucgagacggugauggaguuccagcagaagaacaaccggcuccuggagaucacccgcgaguucagcgugaacgccggggucaccacccccguguccacguacaugcugaccaacagcgagcuccugucccugaucaacgacaugccgaucaccaacgaccagaagaagcucaugagcaacaacgugcagaucguccggcagcaguccuacagcaucaugugcaucaucaaggaggaggugcuggcguacgugguccagcugccccucuacggcgugaucgacacccccugcuggaagcugcacacgagcccccugugcaccaccaacaccaaggagggguccaacaucugccucacgcgcaccgaccggggcugguacugcgacaacgccggcagcgucuccuucuucccgcaggccgagaccugcaaggugugcagcaaccgcguguucugcgacaccaugaacucccugacgcugcccagcgagguaaaccucugcaacgucgacaucuucaaccccaaguacgacugcaagaucaugaccuccaagaccgacgugagcuccagcgugaucaccucccugggggccaucgucagcugcuacggcaagacgaagugcaccgccagcaacaagaacaaggggaucaucaagaccuucuccaacggcugcgacuacgugagcaacaagggcguggacaccguguccgucgggaacacccuguacuacgugaacaagcaggagggcaagagccucuacgugaagggggagcccaucaucaacuucuacgacccgcuggucuuccccuccgacgaguucgacgcgagcaucucccaggugaacgagaagaucaaccagagccuggccuucauccgcaaguccgacgagcugcuccacaacgugaacgccggcaagagcacgaccaacaucaugaucaccaccaucaucaucgucaucaucgugauccugcugucccucaucgccguggggcugcugcucuacugcaaggcccggagcacgcccgucacccuguccaaggaccagcugagcggcaucaacaacaucgcguucuccaacugaggacuagugaagggaacacccaaauuuaauucagccuuaagcacaauuaauuaagagugaaacguaauuguacaagcaguuggucacccaccauagggcaugaucaacaccgcaaccuuuccuuuuucccccagugauucugaaaaaccccucuucccuucagcuugcuuagauguuccaaauuuaguaagcuuaaggcggccuacagaagaaaaagaaaaaaaaggccacaaaaguucccucucacuuucaguaaauaaaauaaaagcagcaacagaaauaaagaaauaaaugaaauucaaaaugaaauaaauauuguguugugcagcauuaaaaaaucaauaaaaauuaaaaaugagcaagaucuaaaaaaaaaaaaaaaaaaaaaaaaaaaaaaaaaaaaaaaaaaaaaaaaaaaaaaaaaaaaaaaaugcaucccccccccccccccccccccccccccccccaaaggcucuuuucagagccaccagaauu

SEQ ID NO: 7108 - RNA, 2202 nt, Artificial Sequence
  mRNA product Design h-2 comprising derived and/or modified sequence from HRSV(A2)__F_DSCav1_mut7 (opt1)
gggagacccgugacccggaaguuguacggcuacgcgacuuucccucccacaaacccucgcgcccuuccuuuccuacuugggcccggcagaaagcuuaccauggagcugcucauccugaaggccaacgccaucaccaccauccugacggcggugaccuucugcuucgccagcggccagaacaucaccgaggaguucuaccaguccacgugcagcgccgucuccaagggguaccucagcgcccugcgcaccggcugguacaccuccgugaucaccaucgagcugagcaacaucaaggagaacaagugcaacgggaccgacgccaaggugaagcucaucaagcaggagcuggacaaguacaagaacgcggucacggagcugcagaugcucaugugcuccacccccgccaccggcagcggguccgccaucgccagcggcguggcggugugcaagguccugcaccuggagggcgaggugaacaagaucaaguccgcccuccugagcaccaacaaggccguggucucccugagcaacgggguguccgugcucacguucaagguccuggaccugaagaacuacaucgacaagcagcuccugccgauccugaacaagcagagcugcuccaucagcaacaucgagaccgugauggaguuccagcagaagaacaaccggcuccuggagaucacccgcgaguucuccgugaacgccggcgucaccacgcccgugagcaccuacaugcugaccaacagcgagcuccugucccugaucaacgacaugcccaucaccaacgaccagaagaagcucaugagcaacaacgugcagaucguccggcagcaguccuacagcaucaugugcaucaucaaggaggaggugcuggccuacgugguccagcugccccucuacggggugaucgacacgccgugcuggaagcugcacaccagcccccugugcaccaccaacacgaaggagggcagcaacaucugccucacccgcaccgaccgggggugguacugcgacaacgcgggcuccgugagcuucuucccccaggccgagaccugcaaggucugcuccaaccgcguguucugcgacacgaugaacagccugacccugcccuccgaggucaaccucugcaacguggacaucuucaacccgaaguacgacugcaagaucaugaccagcaagaccgacguguccagcuccgucaucacgagccugggcgccaucguguccugcuacgggaagaccaagugcaccgccagcaacaagaacaagggcaucaucaagaccuucuccaacgggugcgacuacgugagcaacaagggcgucgacacggugagcgugggcaacacccuguacuacgucaacaagcaggaggggaagucccucuacgugaagggcgagcccaucaucaacuucuacgacccccugguguuccccagcgacgaguucgacgccuccaucagccaggucaacgagaagaucaaccagucccuggcguucauccggaaguccgacgagcuccugcacaacgugaacgccgggaaguccaccaccaacaucaugaucaccacgaucaucaucgugaucaucgucauccugcucagccugaucgccgugggccugcuccuguacugcaaggcccgcuccaccccggugacccugagcaaggaccagcuguccgggaucaacaacaucgccuucagcaacugaggacuagugaagggaacacccaaauuuaauucagccuuaagcacaauuaauuaagagugaaacguaauuguacaagcaguuggucacccaccauagggcaugaucaacaccgcaaccuuuccuuuuucccccagugauucugaaaaaccccucuucccuucagcuugcuuagauguuccaaauuuaguaagcuuaaggcggccuacagaagaaaaagaaaaaaaaggccacaaaaguucccucucacuuucaguaaauaaaauaaaagcagcaacagaaauaaagaaauaaaugaaauucaaaaugaaauaaauauuguguugugcagcauuaaaaaaucaauaaaaauuaaaaaugagcaagaucuaaaaaaaaaaaaaaaaaaaaaaaaaaaaaaaaaaaaaaaaaaaaaaaaaaaaaaaaaaaaaaaaugcaucccccccccccccccccccccccccccccccaaaggcucuuuucagagccaccagaauu

SEQ ID NO: 7109 - RNA, 2202 nt, Artificial Sequence
  mRNA product Design h-2 comprising derived and/or modified sequence from HRSV(A2)__F_DSCav1_mut7 (opt2)
gggagacccgugacccggaaguuguacggcuacgcgacuuucccucccacaaacccucgcgcccuuccuuuccuacuugggcccggcagaaagcuuaccauggagcuccucauccucaaggccaacgccaucaccaccauccucaccgccgucaccuucugcuucgccuccggccagaacaucaccgaggaguucuaccaguccaccugcuccgccgucuccaagggcuaccucuccgcccuccgcaccggcugguacaccuccgucaucaccaucgagcucuccaacaucaaggagaacaagugcaacggcaccgacgccaaggucaagcucaucaagcaggagcucgacaaguacaagaacgccgucaccgagcuccagaugcucaugugcuccacccccgccaccggcuccggcuccgccaucgccuccggcgucgccgucugcaagguccuccaccucgagggcgaggucaacaagaucaaguccgcccuccucuccaccaacaaggccgucgucucccucuccaacggcgucuccguccucaccuucaagguccucgaccucaagaacuacaucgacaagcagcuccuccccauccucaacaagcaguccugcuccaucuccaacaucgagaccgucauggaguuccagcagaagaacaaccgccuccucgagaucacccgcgaguucuccgucaacgccggcgucaccacccccgucuccaccuacaugcucaccaacuccgagcuccucucccucaucaacgacaugcccaucaccaacgaccagaagaagcucauguccaacaacguccagaucguccgccagcaguccuacuccaucaugugcaucaucaaggaggagguccucgccuacgucguccagcucccccucuacggcgucaucgacacccccugcuggaagcuccacaccuccccccucugcaccaccaacaccaaggagggcuccaacaucugccucacccgcaccgaccgcggcugguacugcgacaacgccggcuccgucuccuucuucccccaggccgagaccugcaaggucugcuccaaccgcgucuucugcgacaccaugaacucccucacccuccccuccgaggucaaccucugcaacgucgacaucuucaaccccaaguacgacugcaagaucaugaccuccaagaccgacgucuccuccuccgucaucaccucccucggcgccaucgucuccugcuacggcaagaccaagugcaccgccuccaacaagaacaagggcaucaucaagaccuucuccaacggcugcgacuacgucuccaacaagggcgucgacaccgucuccgucggcaacacccucuacuacgucaacaagcaggagggcaagucccucuacgucaagggcgagcccaucaucaacuucuacgacccccucgucuuccccuccgacgaguucgacgccuccaucucccaggucaacgagaagaucaaccagucccucgccuucauccgcaaguccgacgagcuccuccacaacgucaacgccggcaaguccaccaccaacaucaugaucaccaccaucaucaucgucaucaucgucauccuccucucccucaucgccgucggccuccuccucuacugcaaggcccgcuccacccccgucacccucuccaaggaccagcucuccggcaucaacaacaucgccuucuccaacugaggacuagugaagggaacacccaaauuuaauucagccuuaagcacaauuaauuaagagugaaacguaauuguacaagcaguuggucacccaccauagggcaugaucaacaccgcaaccuuuccuuuuucccccagugauucugaaaaaccccucuucccuucagcuugcuuagauguuccaaauuuaguaagcuuaaggcggccuacagaagaaaaagaaaaaaaaggccacaaaaguucccucucacuuucaguaaauaaaauaaaagcagcaacagaaauaaagaaauaaaugaaauucaaaaugaaauaaauauuguguugugcagcauuaaaaaaucaauaaaaauuaaaaaugagcaagaucuaaaaaaaaaaaaaaaaaaaaaaaaaaaaaaaaaaaaaaaaaaaaaaaaaaaaaaaaaaaaaaaaugcaucccccccccccccccccccccccccccccccaaaggcucuuuucagagccaccagaauu

SEQ ID NO: 7110 - RNA, 2202 nt, Artificial Sequence
  mRNA product Design h-2 comprising derived and/or modified sequence from HRSV(A2)__F_DSCav1_mut7 (opt3)
gggagacccgugacccggaaguuguacggcuacgcgacuuucccucccacaaacccucgcgcccuuccuuuccuacuugggcccggcagaaagcuuaccauggagcugcucauccuuaaggccaacgcuauuaccacaauacugacugcagugacguucugcuuugccagcggccagaauaucaccgaagaguucuaccaauccacauguucugcggucucaaaaggguauuugagugcuuuaagaacuggaugguacaccagcguuauuacaaucgaacuguccaacauuaaggagaauaaaugcaacgguaccgacgccaaggugaaacuaaucaagcaggaacucgauaaguauaaaaaugcaguaacugagcugcagaugcuuauguguucuacacccgccaccggcucggggucagcuauagcaagcggaguggccgucugcaaggugcugcacuuggagggcgaaguuaacaaaaucaagagugcucuccuguccacgaauaaagccguggucucucugagcaacgguguguccguacucacuuuuaagguuuuagaccugaagaauuacauugauaaacagcuuuugccuauccugaacaagcaaucauguaguauuagcaauaucgagaccgugauggaguuccagcagaaaaacaauaggcuacucgaaauaacacgggaguuuucugucaacgcgggggugacuaccccaguguccacauauaugcugaccaauucagaacuucugagcuugauuaacgacaugccgaucacgaacgaucagaagaaacucaugaguaauaacguccaaauuguucgccagcagucuuacuccaucaugugcaucauuaaggaggaagugcuggcauauguagugcaguuaccccuguacggagucauagacacuccuuguuggaaacuccauacaagcccacuuugcaccacuaauacaaaggagggcucgaacaucugucugacccgaacggaucguggcugguacugcgacaaugccgggucuguguccuucuuuccccaagcugaaaccuguaagguuugcucaaacagaguguucugcgauacaaugaauaguuugacucuaccuagcgaggucaaccuguguaauguggacauuuuuaacccaaaauaugauugcaagaucaugaccuccaaaacagacguaucuagcucaguuauaacuagccucggagccauuguguccuguuacgguaagaccaaaugcacagcaagcaauaagaacaagggcaucaucaaaaccuucucuaaugggugugauuaugucucaaacaagggaguggacacugucagugugggcaauacgcuguacuauguuaacaaacaggaggguaagagccuuuacgugaaaggggaacccauuaucaacuuuuaugacccucugguauucccauccgaugaguuugacgcuucuauuucgcaggucaaugaaaagauaaaccaaaguuuggccuucaucaggaaguccgaugagcuccugcacaaugugaacgcgggaaaaucaacaaccaauauuaugaucacuaccaucauuauaguuaucauugugaucuuacugagucuaauugccgucggccuccugcuuuacugcaaggcacggucuacaccggugaccuugagcaaagaccagcuguccggcaucaacaauauagcuuucucaaacugaggacuagugaagggaacacccaaauuuaauucagccuuaagcacaauuaauuaagagugaaacguaauuguacaagcaguuggucacccaccauagggcaugaucaacaccgcaaccuuuccuuuuucccccagugauucugaaaaaccccucuucccuucagcuugcuuagauguuccaaauuuaguaagcuuaaggcggccuacagaagaaaaagaaaaaaaaggccacaaaaguucccucucacuuucaguaaauaaaauaaaagcagcaacagaaauaaagaaauaaaugaaauucaaaaugaaauaaauauuguguugugcagcauuaaaaaaucaauaaaaauuaaaaaugagcaagaucuaaaaaaaaaaaaaaaaaaaaaaaaaaaaaaaaaaaaaaaaaaaaaaaaaaaaaaaaaaaaaaaaugcaucccccccccccccccccccccccccccccccaaaggcucuuuucagagccaccagaauu

SEQ ID NO: 7111 - RNA, 2202 nt, Artificial Sequence
  mRNA product Design h-2 comprising derived and/or modified sequence from HRSV(A2)__F_DSCav1_mut7 (opt4)
gggagacccgugacccggaaguuguacggcuacgcgacuuucccucccacaaacccucgcgcccuuccuuuccuacuugggcccggcagaaagcuuaccauggagcugcugauccugaaggccaacgccaucaccaccauccugaccgccgugaccuucugcuucgccagcggccagaacaucaccgaggaguucuaccagagcaccugcagcgccgugagcaagggcuaccugagcgcccugagaaccggcugguacaccagcgugaucaccaucgagcugagcaacaucaaggagaacaagugcaacggcaccgacgccaaggugaagcugaucaagcaggagcuggacaaguacaagaacgccgugaccgagcugcagaugcugaugugcagcacccccgccaccggcagcggcagcgccaucgccagcggcguggccgugugcaaggugcugcaccuggagggcgaggugaacaagaucaagagcgcccugcugagcaccaacaaggccguggugagccugagcaacggcgugagcgugcugaccuucaaggugcuggaccugaagaacuacaucgacaagcagcugcugcccauccugaacaagcagagcugcagcaucagcaacaucgagaccgugauggaguuccagcagaagaacaacagacugcuggagaucaccagagaguucagcgugaacgccggcgugaccacccccgugagcaccuacaugcugaccaacagcgagcugcugagccugaucaacgacaugcccaucaccaacgaccagaagaagcugaugagcaacaacgugcagaucgugagacagcagagcuacagcaucaugugcaucaucaaggaggaggugcuggccuacguggugcagcugccccuguacggcgugaucgacacccccugcuggaagcugcacaccagcccccugugcaccaccaacaccaaggagggcagcaacaucugccugaccagaaccgacagaggcugguacugcgacaacgccggcagcgugagcuucuucccccaggccgagaccugcaaggugugcagcaacagaguguucugcgacaccaugaacagccugacccugcccagcgaggugaaccugugcaacguggacaucuucaaccccaaguacgacugcaagaucaugaccagcaagaccgacgugagcagcagcgugaucaccagccugggcgccaucgugagcugcuacggcaagaccaagugcaccgccagcaacaagaacaagggcaucaucaagaccuucagcaacggcugcgacuacgugagcaacaagggcguggacaccgugagcgugggcaacacccuguacuacgugaacaagcaggagggcaagagccuguacgugaagggcgagcccaucaucaacuucuacgacccccugguguuccccagcgacgaguucgacgccagcaucagccaggugaacgagaagaucaaccagagccuggccuucaucagaaagagcgacgagcugcugcacaacgugaacgccggcaagagcaccaccaacaucaugaucaccaccaucaucaucgugaucaucgugauccugcugagccugaucgccgugggccugcugcuguacugcaaggccagaagcacccccgugacccugagcaaggaccagcugagcggcaucaacaacaucgccuucagcaacugaggacuagugaagggaacacccaaauuuaauucagccuuaagcacaauuaauuaagagugaaacguaauuguacaagcaguuggucacccaccauagggcaugaucaacaccgcaaccuuuccuuuuucccccagugauucugaaaaaccccucuucccuucagcuugcuuagauguuccaaauuuaguaagcuuaaggcggccuacagaagaaaaagaaaaaaaaggccacaaaaguucccucucacuuucaguaaauaaaauaaaagcagcaacagaaauaaagaaauaaaugaaauucaaaaugaaauaaauauuguguugugcagcauuaaaaaaucaauaaaaauuaaaaaugagcaagaucuaaaaaaaaaaaaaaaaaaaaaaaaaaaaaaaaaaaaaaaaaaaaaaaaaaaaaaaaaaaaaaaaugcaucccccccccccccccccccccccccccccccaaaggcucuuuucagagccaccagaauu

SEQ ID NO: 7112 - RNA, 2202 nt, Artificial Sequence
  mRNA product Design h-2 comprising derived and/or modified sequence from HRSV(A2)__F_DSCav1_mut7 (opt5)
gggagacccgugacccggaaguuguacggcuacgcgacuuucccucccacaaacccucgcgcccuuccuuuccuacuugggcccggcagaaagcuuaccauggagcugcucauccugaaggccaacgcuauuaccacaauccuuacggccgugaccuucugcuuugcgagcggccagaauauuacagaagaguucuaccaauccaccuguucugcugucagcaaaggguaucuguccgcccucagaacaggaugguacaccucuguuaucacaauugaacugagcaacaucaaggagaauaaaugcaacggcaccgacgccaaggugaaacuuaucaagcaggaacuggauaaguauaaaaaugcugugacggagcuccagaugcugauguguuccacccccgccacagggucuggaagcgcuauugccuccggcgucgcggugugcaagguucugcaccucgagggggaagugaacaaaaucaagagcgcccugcuuucuaccaauaaagcugucgugucccugagcaacggaguuucugugcucacauuuaagguccuggaccuuaagaauuacauugauaaacagcugcucccuauccugaacaagcaauccuguagcauuucuaauaucgagaccgugauggaguuccagcagaaaaacaaucggcugcucgaaauuacgcgcgaguuuuccgugaacgccggcgucacaaccccgguuagcacauauaugcugaccaauuccgaacuucugucucucaucaacgacaugcccaucaccaacgaucagaagaaacugaugagcaauaacgugcaaauugugagacagcaguccuacagcaucaugugcauuaucaaggaggaaguccuugcuuaugugguucagcugccucucuacggcgugauugacacacccuguuggaaacugcauacgucuccucugugcaccacaaauaccaaggagggguccaacaucugucucacacggaccgaucgcggaugguacugcgacaaugccggcagcgucucuuucuuuccccaagcggaaacguguaaggugugcagcaacagaguuuucugcgauacaaugaacucccugacccuuccuucugaggugaaucuguguaaugucgacaucuuuaacccgaaauaugauugcaagauuaugaccagcaaaacagacguguccagcucugucaucaccucccucggggccauugugagcuguuacggaaagacaaaaugcacggcuucuaauaagaacaagggcaucauuaaaaccuucuccaaugggugugauuauguuagcaacaagggaguggacacagucuccgugggcaauacccuguacuauguuaacaaacaggagggcaagucucuuuacgugaaaggggaacccaucaucaacuuuuaugacccucuggucuuccccagcgaugaguuugacgccuccauuucucaggugaaugaaaagaucaaccaaagccucgcuuucauucggaaguccgaugagcugcugcacaaugugaacgccggaaaaagcacaaccaauaucaugauuacgaccaucauuaucguuaucauugucauccuccugucucuuauugccgugggccugcuccuguacugcaaggcucgcuccacaccugugacccugagcaaagaccagcuuucugggaucaacaauauugcguucuccaacugaggacuagugaagggaacacccaaauuuaauucagccuuaagcacaauuaauuaagagugaaacguaauuguacaagcaguuggucacccaccauagggcaugaucaacaccgcaaccuuuccuuuuucccccagugauucugaaaaaccccucuucccuucagcuugcuuagauguuccaaauuuaguaagcuuaaggcggccuacagaagaaaaagaaaaaaaaggccacaaaaguucccucucacuuucaguaaauaaaauaaaagcagcaacagaaauaaagaaauaaaugaaauucaaaaugaaauaaauauuguguugugcagcauuaaaaaaucaauaaaaauuaaaaaugagcaagaucuaaaaaaaaaaaaaaaaaaaaaaaaaaaaaaaaaaaaaaaaaaaaaaaaaaaaaaaaaaaaaaaaugcaucccccccccccccccccccccccccccccccaaaggcucuuuucagagccaccagaauu

SEQ ID NO: 7113 - RNA, 2202 nt, Artificial Sequence
  mRNA product Design h-2 comprising derived and/or modified sequence from HRSV(A2)__F_DSCav1_mut7 (opt6)
gggagacccgugacccggaaguuguacggcuacgcgacuuucccucccacaaacccucgcgcccuuccuuuccuacuugggcccggcagaaagcuuaccauggaauuacucauacucaaagcaaaugcaauuaccacuauacucacagcuguaacuuuuuguuucgccucaggacaaaacaucacagaagaauuuuaucaauccacaugcucugccguaucaaaaggcuaccuaucugcccuaagaacagguugguacacaucuguaauaacaaucgaauuauccaacaucaaagaaaacaaaugcaacggcacagacgcaaaagucaaacucaucaaacaagaauuagauaaauauaaaaacgcaguaacagaacuacaaaugcuaaugugcucuacacccgccacaggaucaggauccgcaaucgcuucuggaguagccguuugcaaaguauuacaccuagaaggagaaguaaauaaaauaaaauccgcacuacuaucaacuaauaaagcaguaguaucacuuucuaaugguguaucaguauuaacauucaaaguccucgaccuaaaaaauuacaucgacaaacaacuauuacccauccuuaauaaacaaucaugcuccauaucaaacauagaaacugucauggaauuucaacaaaaaaacaauagacuucuagaaaucacaagagaauuuucuguaaaugcaggaguaacuacaccaguaucaacauauauguuaaccaacuccgaacuacuaucacucauaaacgacaugccaauaacaaacgaccaaaaaaaacuaaugucaaauaacguucaaauaguaagacaacaaucauacucaaucaugugcauaauaaaagaagaaguuuuagcauacgucguacaacuuccccuauacggaguaauagacaccccuugcuggaaacuccacaccucaccacuaugcacuacaaacacaaaagaagguuccaacaucugcuuaacaagaaccgaucgaggaugguacugcgacaacgcugguuccguaucuuucuucccacaagcagaaacaugcaaaguaugcuccaauagaguauucugcgacaccaugaacucacuaacucuaccauccgaaguaaaccuaugcaacgucgacauauuuaauccaaaauaugacugcaaaauaaugacuucaaaaacagacguauccucaucaguaauaacauccuuaggagcaauaguaucauguuacggcaagacaaaauguacagccucaaacaaaaacaaagguaucauuaaaaccuucuccaacggcugcgacuacguaucaaauaaaggugucgauacaguaucaguaggaaacacacucuauuacguuaauaaacaagaaggaaagucauuauacguaaaaggagaaccaauaaucaauuucuacgauccccuagucuuucccucagaugaauuugacgcaagcaucucucaagucaacgaaaaaauaaaccaaucccuagccuucauaagaaaaucagaugaacuacuucauaacgucaacgccggaaaaucaacaaccaacauaaugaucacuacaaucauaauuguaauuauaguaauacuacuaucgcuaauugccguuggacuacuacuauauuguaaagcaagaucaacacccguuacucuauccaaagaucaauuaucaggaaucaacaacauagccuucucaaauuaaggacuagugaagggaacacccaaauuuaauucagccuuaagcacaauuaauuaagagugaaacguaauuguacaagcaguuggucacccaccauagggcaugaucaacaccgcaaccuuuccuuuuucccccagugauucugaaaaaccccucuucccuucagcuugcuuagauguuccaaauuuaguaagcuuaaggcggccuacagaagaaaaagaaaaaaaaggccacaaaaguucccucucacuuucaguaaauaaaauaaaagcagcaacagaaauaaagaaauaaaugaaauucaaaaugaaauaaauauuguguugugcagcauuaaaaaaucaauaaaaauuaaaaaugagcaagaucuaaaaaaaaaaaaaaaaaaaaaaaaaaaaaaaaaaaaaaaaaaaaaaaaaaaaaaaaaaaaaaaaugcaucccccccccccccccccccccccccccccccaaaggcucuuuucagagccaccagaauu

SEQ ID NO: 7114 - RNA, 2202 nt, Artificial Sequence
  mRNA product Design h-2 comprising derived and/or modified sequence from HRSV(A2)__F_DSCav1_mut7 (opt11)
gggagacccgugacccggaaguuguacggcuacgcgacuuucccucccacaaacccucgcgcccuuccuuuccuacuugggcccggcagaaagcuuaccauggaacuacucauacuuaaagccaacgcaauaaccacaauccucaccgccgucacauucugcuucgccucgggacaaaacauaaccgaagaauuuuaccagucuaccugcuccgccgucuccaaggguuaccucuccgcgcuccgcaccgggugguacaccagcguuaucaccaucgaacuaucuaacauaaaagaaaacaagugcaacggaaccgacgcaaaagucaaacucaucaaacaagaacuagacaaauacaagaaugccgucaccgaacuacaaaugcucaugugcuccacccccgccaccggauccggcuccgccauugccuccggcgucgccguaugcaaaguccuucacuuggaaggagaaguuaacaaaauaaaaagcgcccuccugucgaccaacaaagcgguggucagccucuccaacggcgucucuguccucaccuucaaaguccucgaccucaagaacuacauagauaaacaacuacuccccauccuaaacaaacagucaugcagcauauccaacaucgaaaccgucauggaguuccaacagaaaaacaaccgccuccuugaaaucacccgcgaguucucugucaacgccggcgucaccacccccgucuccaccuacaugcucacaaacuccgaacuccucagccucaucaacgacaugccaaucaccaacgaccaaaagaaacucauguccaacaacguacaaaucguucgucaacaaucauacucaaucaugugcaucauuaaagaagaaguccucgcauacgucguccaacucccccucuauggggucaucgacaccccaugcuggaaacuccacaccucuccccuaugcaccaccaacaccaaagaaggcuccaacaucugccuaacccgaaccgaccgcggaugguacugcgacaacgccggcuccgucuccuucuucccccaggccgaaacauguaaagucugcuccaaccguguguucugcgacaccaugaacucacuaacccuccccuccgaagucaaccucugcaacgucgacaucuucaacccgaaauacgacugcaaaauaaugaccagcaaaacagacguauccucuagcgucauuaccagccuaggugcaaucguguccugcuacggcaaaacaaaaugcaccgccuccaacaaaaauaaaggaaucauaaaaaccuucuccaacggcugcgacuacgucagcaacaaaggagucgacaccgucuccguaggaaauacucuauacuaugucaacaaacaagaggguaaaucccucuacgucaaaggcgaacccaucaucaacuucuacgacccccucgucuuccccucugacgaguucgacgccagcauaucacaaguaaacgaaaagaucaaccaaucccucgcauucauucgcaaauccgacgaacuccuacacaacgucaacgccggaaaauccaccaccaacaucaugaucacuacuaucauuaucgucaucaucgucauccuccucucccucaucgcagucggccuucuacucuacugcaaggcacgcucuacacccguaacccugucuaaagaccaacucuccggcaucaacaacaucgcuuucuccaacuaaggacuagugaagggaacacccaaauuuaauucagccuuaagcacaauuaauuaagagugaaacguaauuguacaagcaguuggucacccaccauagggcaugaucaacaccgcaaccuuuccuuuuucccccagugauucugaaaaaccccucuucccuucagcuugcuuagauguuccaaauuuaguaagcuuaaggcggccuacagaagaaaaagaaaaaaaaggccacaaaaguucccucucacuuucaguaaauaaaauaaaagcagcaacagaaauaaagaaauaaaugaaauucaaaaugaaauaaauauuguguugugcagcauuaaaaaaucaauaaaaauuaaaaaugagcaagaucuaaaaaaaaaaaaaaaaaaaaaaaaaaaaaaaaaaaaaaaaaaaaaaaaaaaaaaaaaaaaaaaaugcaucccccccccccccccccccccccccccccccaaaggcucuuuucagagccaccagaauu

SEQ ID NO: 7115 - RNA, 1982 nt, Artificial Sequence
  mRNA product Design h-3 comprising derived and/or modified sequence from HRSV(A2)__F_DSCav1_mut7 (opt1)
gggagacccgugacccggaaguuguacggcuacgcgacuuucccucccacaaacccucgcgcccuuccuuuccuacuugggcccggcagaaagcuuaccauggagcugcucauccugaaggccaacgccaucaccaccauccugacggcggugaccuucugcuucgccagcggccagaacaucaccgaggaguucuaccaguccacgugcagcgccgucuccaagggguaccucagcgcccugcggaccggcugguacaccuccgugaucaccaucgagcugagcaacaucaaggagaacaagugcaacgggaccgacgccaaggugaagcucaucaagcaggagcuggacaaguacaagaacgcggucacggagcugcagaugcugaugugcuccaccccggcaaccggcuccggcuccgccaucgcgagcggcgucgccgugugcaaggugcugcaccucgagggggaggucaacaagaucaagagcgcccugcuguccaccaacaaggccguggugagccucuccaacggcgucagcgugcugaccuucaaggugcuggaccucaagaacuacaucgacaagcagcugcugcccauccugaacaagcagagcugcuccaucagcaacaucgagacggugauggaguuccagcagaagaacaaccggcuccuggagaucacccgcgaguucagcgugaacgccggggucaccacccccguguccacguacaugcugaccaacagcgagcuccugucccugaucaacgacaugccgaucaccaacgaccagaagaagcucaugagcaacaacgugcagaucguccggcagcaguccuacagcaucaugugcaucaucaaggaggaggugcuggcguacgugguccagcugccccucuacggcgugaucgacacccccugcuggaagcugcacacgagcccccugugcaccaccaacaccaaggagggguccaacaucugccucacgcgcaccgaccggggcugguacugcgacaacgccggcagcgucuccuucuucccgcaggccgagaccugcaaggugugcagcaaccgcguguucugcgacaccaugaacucccugacgcugcccagcgagguaaaccucugcaacgucgacaucuucaaccccaaguacgacugcaagaucaugaccuccaagaccgacgugagcuccagcgugaucaccucccugggggccaucgucagcugcuacggcaagacgaagugcaccgccagcaacaagaacaaggggaucaucaagaccuucuccaacggcugcgacuacgugagcaacaagggcguggacaccguguccgucgggaacacccuguacuacgugaacaagcaggagggcaagagccucuacgugaagggggagcccaucaucaacuucuacgacccgcuggucuuccccuccgacgaguucgacgcgagcaucucccaggugaacgagaagaucaaccagagccuggccuucauccgcaaguccgacgagcugcuccacaacgugaacgccggcaagagcacgaccaacaucaugaucaccaccaucaucaucgucaucaucgugauccugcugucccucaucgccguggggcugcugcucuacugcaaggcccggagcacgcccgucacccuguccaaggaccagcugagcggcaucaacaacaucgcguucuccaacugaggacuaguggaagcauuuuccuggcugauuaaaagaaauuacucagcuauggucaucuguuccuguuagaaggcuaugcagcauauuauauacuaugcgcauguuaugaaaugcauaauaaaaaauuuuaaaaaaucuaaaagaucuaaaaaaaaaaaaaaaaaaaaaaaaaaaaaaaaaaaaaaaaaaaaaaaaaaaaaaaaaaaaaaaaugcaucccccccccccccccccccccccccccccccaaaggcucuuuucagagccaccagaauu

SEQ ID NO: 7116 - RNA, 1982 nt, Artificial Sequence
  mRNA product Design h-3 comprising derived and/or modified sequence from HRSV(A2)__F_DSCav1_mut7 (opt1)
gggagacccgugacccggaaguuguacggcuacgcgacuuucccucccacaaacccucgcgcccuuccuuuccuacuugggcccggcagaaagcuuaccauggagcugcucauccugaaggccaacgccaucaccaccauccugacggcggugaccuucugcuucgccagcggccagaacaucaccgaggaguucuaccaguccacgugcagcgccgucuccaagggguaccucagcgcccugcgcaccggcugguacaccuccgugaucaccaucgagcugagcaacaucaaggagaacaagugcaacgggaccgacgccaaggugaagcucaucaagcaggagcuggacaaguacaagaacgcggucacggagcugcagaugcucaugugcuccacccccgccaccggcagcggguccgccaucgccagcggcguggcggugugcaagguccugcaccuggagggcgaggugaacaagaucaaguccgcccuccugagcaccaacaaggccguggucucccugagcaacgggguguccgugcucacguucaagguccuggaccugaagaacuacaucgacaagcagcuccugccgauccugaacaagcagagcugcuccaucagcaacaucgagaccgugauggaguuccagcagaagaacaaccggcuccuggagaucacccgcgaguucuccgugaacgccggcgucaccacgcccgugagcaccuacaugcugaccaacagcgagcuccugucccugaucaacgacaugcccaucaccaacgaccagaagaagcucaugagcaacaacgugcagaucguccggcagcaguccuacagcaucaugugcaucaucaaggaggaggugcuggccuacgugguccagcugccccucuacggggugaucgacacgccgugcuggaagcugcacaccagcccccugugcaccaccaacacgaaggagggcagcaacaucugccucacccgcaccgaccgggggugguacugcgacaacgcgggcuccgugagcuucuucccccaggccgagaccugcaaggucugcuccaaccgcguguucugcgacacgaugaacagccugacccugcccuccgaggucaaccucugcaacguggacaucuucaacccgaaguacgacugcaagaucaugaccagcaagaccgacguguccagcuccgucaucacgagccugggcgccaucguguccugcuacgggaagaccaagugcaccgccagcaacaagaacaagggcaucaucaagaccuucuccaacgggugcgacuacgugagcaacaagggcgucgacacggugagcgugggcaacacccuguacuacgucaacaagcaggaggggaagucccucuacgugaagggcgagcccaucaucaacuucuacgacccccugguguuccccagcgacgaguucgacgccuccaucagccaggucaacgagaagaucaaccagucccuggcguucauccggaaguccgacgagcuccugcacaacgugaacgccgggaaguccaccaccaacaucaugaucaccacgaucaucaucgugaucaucgucauccugcucagccugaucgccgugggccugcuccuguacugcaaggcccgcuccaccccggugacccugagcaaggaccagcuguccgggaucaacaacaucgccuucagcaacugaggacuaguggaagcauuuuccuggcugauuaaaagaaauuacucagcuauggucaucuguuccuguuagaaggcuaugcagcauauuauauacuaugcgcauguuaugaaaugcauaauaaaaaauuuuaaaaaaucuaaaagaucuaaaaaaaaaaaaaaaaaaaaaaaaaaaaaaaaaaaaaaaaaaaaaaaaaaaaaaaaaaaaaaaaugcaucccccccccccccccccccccccccccccccaaaggcucuuuucagagccaccagaauu

SEQ ID NO: 7117 - RNA, 1982 nt, Artificial Sequence
  mRNA product Design h-3 comprising derived and/or modified sequence from HRSV(A2)__F_DSCav1_mut7 (opt2)
gggagacccgugacccggaaguuguacggcuacgcgacuuucccucccacaaacccucgcgcccuuccuuuccuacuugggcccggcagaaagcuuaccauggagcuccucauccucaaggccaacgccaucaccaccauccucaccgccgucaccuucugcuucgccuccggccagaacaucaccgaggaguucuaccaguccaccugcuccgccgucuccaagggcuaccucuccgcccuccgcaccggcugguacaccuccgucaucaccaucgagcucuccaacaucaaggagaacaagugcaacggcaccgacgccaaggucaagcucaucaagcaggagcucgacaaguacaagaacgccgucaccgagcuccagaugcucaugugcuccacccccgccaccggcuccggcuccgccaucgccuccggcgucgccgucugcaagguccuccaccucgagggcgaggucaacaagaucaaguccgcccuccucuccaccaacaaggccgucgucucccucuccaacggcgucuccguccucaccuucaagguccucgaccucaagaacuacaucgacaagcagcuccuccccauccucaacaagcaguccugcuccaucuccaacaucgagaccgucauggaguuccagcagaagaacaaccgccuccucgagaucacccgcgaguucuccgucaacgccggcgucaccacccccgucuccaccuacaugcucaccaacuccgagcuccucucccucaucaacgacaugcccaucaccaacgaccagaagaagcucauguccaacaacguccagaucguccgccagcaguccuacuccaucaugugcaucaucaaggaggagguccucgccuacgucguccagcucccccucuacggcgucaucgacacccccugcuggaagcuccacaccuccccccucugcaccaccaacaccaaggagggcuccaacaucugccucacccgcaccgaccgcggcugguacugcgacaacgccggcuccgucuccuucuucccccaggccgagaccugcaaggucugcuccaaccgcgucuucugcgacaccaugaacucccucacccuccccuccgaggucaaccucugcaacgucgacaucuucaaccccaaguacgacugcaagaucaugaccuccaagaccgacgucuccuccuccgucaucaccucccucggcgccaucgucuccugcuacggcaagaccaagugcaccgccuccaacaagaacaagggcaucaucaagaccuucuccaacggcugcgacuacgucuccaacaagggcgucgacaccgucuccgucggcaacacccucuacuacgucaacaagcaggagggcaagucccucuacgucaagggcgagcccaucaucaacuucuacgacccccucgucuuccccuccgacgaguucgacgccuccaucucccaggucaacgagaagaucaaccagucccucgccuucauccgcaaguccgacgagcuccuccacaacgucaacgccggcaaguccaccaccaacaucaugaucaccaccaucaucaucgucaucaucgucauccuccucucccucaucgccgucggccuccuccucuacugcaaggcccgcuccacccccgucacccucuccaaggaccagcucuccggcaucaacaacaucgccuucuccaacugaggacuaguggaagcauuuuccuggcugauuaaaagaaauuacucagcuauggucaucuguuccuguuagaaggcuaugcagcauauuauauacuaugcgcauguuaugaaaugcauaauaaaaaauuuuaaaaaaucuaaaagaucuaaaaaaaaaaaaaaaaaaaaaaaaaaaaaaaaaaaaaaaaaaaaaaaaaaaaaaaaaaaaaaaaugcaucccccccccccccccccccccccccccccccaaaggcucuuuucagagccaccagaauu

SEQ ID NO: 7118 - RNA, 1982 nt, Artificial Sequence
  mRNA product Design h-3 comprising derived and/or modified sequence from HRSV(A2)__F_DSCav1_mut7 (opt3)
gggagacccgugacccggaaguuguacggcuacgcgacuuucccucccacaaacccucgcgcccuuccuuuccuacuugggcccggcagaaagcuuaccauggagcugcucauccuuaaggccaacgcuauuaccacaauacugacugcagugacguucugcuuugccagcggccagaauaucaccgaagaguucuaccaauccacauguucugcggucucaaaaggguauuugagugcuuuaagaacuggaugguacaccagcguuauuacaaucgaacuguccaacauuaaggagaauaaaugcaacgguaccgacgccaaggugaaacuaaucaagcaggaacucgauaaguauaaaaaugcaguaacugagcugcagaugcuuauguguucuacacccgccaccggcucggggucagcuauagcaagcggaguggccgucugcaaggugcugcacuuggagggcgaaguuaacaaaaucaagagugcucuccuguccacgaauaaagccguggucucucugagcaacgguguguccguacucacuuuuaagguuuuagaccugaagaauuacauugauaaacagcuuuugccuauccugaacaagcaaucauguaguauuagcaauaucgagaccgugauggaguuccagcagaaaaacaauaggcuacucgaaauaacacgggaguuuucugucaacgcgggggugacuaccccaguguccacauauaugcugaccaauucagaacuucugagcuugauuaacgacaugccgaucacgaacgaucagaagaaacucaugaguaauaacguccaaauuguucgccagcagucuuacuccaucaugugcaucauuaaggaggaagugcuggcauauguagugcaguuaccccuguacggagucauagacacuccuuguuggaaacuccauacaagcccacuuugcaccacuaauacaaaggagggcucgaacaucugucugacccgaacggaucguggcugguacugcgacaaugccgggucuguguccuucuuuccccaagcugaaaccuguaagguuugcucaaacagaguguucugcgauacaaugaauaguuugacucuaccuagcgaggucaaccuguguaauguggacauuuuuaacccaaaauaugauugcaagaucaugaccuccaaaacagacguaucuagcucaguuauaacuagccucggagccauuguguccuguuacgguaagaccaaaugcacagcaagcaauaagaacaagggcaucaucaaaaccuucucuaaugggugugauuaugucucaaacaagggaguggacacugucagugugggcaauacgcuguacuauguuaacaaacaggaggguaagagccuuuacgugaaaggggaacccauuaucaacuuuuaugacccucugguauucccauccgaugaguuugacgcuucuauuucgcaggucaaugaaaagauaaaccaaaguuuggccuucaucaggaaguccgaugagcuccugcacaaugugaacgcgggaaaaucaacaaccaauauuaugaucacuaccaucauuauaguuaucauugugaucuuacugagucuaauugccgucggccuccugcuuuacugcaaggcacggucuacaccggugaccuugagcaaagaccagcuguccggcaucaacaauauagcuuucucaaacugaggacuaguggaagcauuuuccuggcugauuaaaagaaauuacucagcuauggucaucuguuccuguuagaaggcuaugcagcauauuauauacuaugcgcauguuaugaaaugcauaauaaaaaauuuuaaaaaaucuaaaagaucuaaaaaaaaaaaaaaaaaaaaaaaaaaaaaaaaaaaaaaaaaaaaaaaaaaaaaaaaaaaaaaaaugcaucccccccccccccccccccccccccccccccaaaggcucuuuucagagccaccagaauu

SEQ ID NO: 7119 - RNA, 1982 nt, Artificial Sequence
  mRNA product Design h-3 comprising derived and/or modified sequence from HRSV(A2)__F_DSCav1_mut7 (opt4)
gggagacccgugacccggaaguuguacggcuacgcgacuuucccucccacaaacccucgcgcccuuccuuuccuacuugggcccggcagaaagcuuaccauggagcugcugauccugaaggccaacgccaucaccaccauccugaccgccgugaccuucugcuucgccagcggccagaacaucaccgaggaguucuaccagagcaccugcagcgccgugagcaagggcuaccugagcgcccugagaaccggcugguacaccagcgugaucaccaucgagcugagcaacaucaaggagaacaagugcaacggcaccgacgccaaggugaagcugaucaagcaggagcuggacaaguacaagaacgccgugaccgagcugcagaugcugaugugcagcacccccgccaccggcagcggcagcgccaucgccagcggcguggccgugugcaaggugcugcaccuggagggcgaggugaacaagaucaagagcgcccugcugagcaccaacaaggccguggugagccugagcaacggcgugagcgugcugaccuucaaggugcuggaccugaagaacuacaucgacaagcagcugcugcccauccugaacaagcagagcugcagcaucagcaacaucgagaccgugauggaguuccagcagaagaacaacagacugcuggagaucaccagagaguucagcgugaacgccggcgugaccacccccgugagcaccuacaugcugaccaacagcgagcugcugagccugaucaacgacaugcccaucaccaacgaccagaagaagcugaugagcaacaacgugcagaucgugagacagcagagcuacagcaucaugugcaucaucaaggaggaggugcuggccuacguggugcagcugccccuguacggcgugaucgacacccccugcuggaagcugcacaccagcccccugugcaccaccaacaccaaggagggcagcaacaucugccugaccagaaccgacagaggcugguacugcgacaacgccggcagcgugagcuucuucccccaggccgagaccugcaaggugugcagcaacagaguguucugcgacaccaugaacagccugacccugcccagcgaggugaaccugugcaacguggacaucuucaaccccaaguacgacugcaagaucaugaccagcaagaccgacgugagcagcagcgugaucaccagccugggcgccaucgugagcugcuacggcaagaccaagugcaccgccagcaacaagaacaagggcaucaucaagaccuucagcaacggcugcgacuacgugagcaacaagggcguggacaccgugagcgugggcaacacccuguacuacgugaacaagcaggagggcaagagccuguacgugaagggcgagcccaucaucaacuucuacgacccccugguguuccccagcgacgaguucgacgccagcaucagccaggugaacgagaagaucaaccagagccuggccuucaucagaaagagcgacgagcugcugcacaacgugaacgccggcaagagcaccaccaacaucaugaucaccaccaucaucaucgugaucaucgugauccugcugagccugaucgccgugggccugcugcuguacugcaaggccagaagcacccccgugacccugagcaaggaccagcugagcggcaucaacaacaucgccuucagcaacugaggacuaguggaagcauuuuccuggcugauuaaaagaaauuacucagcuauggucaucuguuccuguuagaaggcuaugcagcauauuauauacuaugcgcauguuaugaaaugcauaauaaaaaauuuuaaaaaaucuaaaagaucuaaaaaaaaaaaaaaaaaaaaaaaaaaaaaaaaaaaaaaaaaaaaaaaaaaaaaaaaaaaaaaaaugcaucccccccccccccccccccccccccccccccaaaggcucuuuucagagccaccagaauu

SEQ ID NO: 7120 - RNA, 1982 nt, Artificial Sequence
  mRNA product Design h-3 comprising derived and/or modified sequence from HRSV(A2)__F_DSCav1_mut7 (opt5)
gggagacccgugacccggaaguuguacggcuacgcgacuuucccucccacaaacccucgcgcccuuccuuuccuacuugggcccggcagaaagcuuaccauggagcugcucauccugaaggccaacgcuauuaccacaauccuuacggccgugaccuucugcuuugcgagcggccagaauauuacagaagaguucuaccaauccaccuguucugcugucagcaaaggguaucuguccgcccucagaacaggaugguacaccucuguuaucacaauugaacugagcaacaucaaggagaauaaaugcaacggcaccgacgccaaggugaaacuuaucaagcaggaacuggauaaguauaaaaaugcugugacggagcuccagaugcugauguguuccacccccgccacagggucuggaagcgcuauugccuccggcgucgcggugugcaagguucugcaccucgagggggaagugaacaaaaucaagagcgcccugcuuucuaccaauaaagcugucgugucccugagcaacggaguuucugugcucacauuuaagguccuggaccuuaagaauuacauugauaaacagcugcucccuauccugaacaagcaauccuguagcauuucuaauaucgagaccgugauggaguuccagcagaaaaacaaucggcugcucgaaauuacgcgcgaguuuuccgugaacgccggcgucacaaccccgguuagcacauauaugcugaccaauuccgaacuucugucucucaucaacgacaugcccaucaccaacgaucagaagaaacugaugagcaauaacgugcaaauugugagacagcaguccuacagcaucaugugcauuaucaaggaggaaguccuugcuuaugugguucagcugccucucuacggcgugauugacacacccuguuggaaacugcauacgucuccucugugcaccacaaauaccaaggagggguccaacaucugucucacacggaccgaucgcggaugguacugcgacaaugccggcagcgucucuuucuuuccccaagcggaaacguguaaggugugcagcaacagaguuuucugcgauacaaugaacucccugacccuuccuucugaggugaaucuguguaaugucgacaucuuuaacccgaaauaugauugcaagauuaugaccagcaaaacagacguguccagcucugucaucaccucccucggggccauugugagcuguuacggaaagacaaaaugcacggcuucuaauaagaacaagggcaucauuaaaaccuucuccaaugggugugauuauguuagcaacaagggaguggacacagucuccgugggcaauacccuguacuauguuaacaaacaggagggcaagucucuuuacgugaaaggggaacccaucaucaacuuuuaugacccucuggucuuccccagcgaugaguuugacgccuccauuucucaggugaaugaaaagaucaaccaaagccucgcuuucauucggaaguccgaugagcugcugcacaaugugaacgccggaaaaagcacaaccaauaucaugauuacgaccaucauuaucguuaucauugucauccuccugucucuuauugccgugggccugcuccuguacugcaaggcucgcuccacaccugugacccugagcaaagaccagcuuucugggaucaacaauauugcguucuccaacugaggacuaguggaagcauuuuccuggcugauuaaaagaaauuacucagcuauggucaucuguuccuguuagaaggcuaugcagcauauuauauacuaugcgcauguuaugaaaugcauaauaaaaaauuuuaaaaaaucuaaaagaucuaaaaaaaaaaaaaaaaaaaaaaaaaaaaaaaaaaaaaaaaaaaaaaaaaaaaaaaaaaaaaaaaugcaucccccccccccccccccccccccccccccccaaaggcucuuuucagagccaccagaauu

SEQ ID NO: 7121 - RNA, 1982 nt, Artificial Sequence
  mRNA product Design h-3 comprising derived and/or modified sequence from HRSV(A2)__F_DSCav1_mut7 (opt6)
gggagacccgugacccggaaguuguacggcuacgcgacuuucccucccacaaacccucgcgcccuuccuuuccuacuugggcccggcagaaagcuuaccauggaauuacucauacucaaagcaaaugcaauuaccacuauacucacagcuguaacuuuuuguuucgccucaggacaaaacaucacagaagaauuuuaucaauccacaugcucugccguaucaaaaggcuaccuaucugcccuaagaacagguugguacacaucuguaauaacaaucgaauuauccaacaucaaagaaaacaaaugcaacggcacagacgcaaaagucaaacucaucaaacaagaauuagauaaauauaaaaacgcaguaacagaacuacaaaugcuaaugugcucuacacccgccacaggaucaggauccgcaaucgcuucuggaguagccguuugcaaaguauuacaccuagaaggagaaguaaauaaaauaaaauccgcacuacuaucaacuaauaaagcaguaguaucacuuucuaaugguguaucaguauuaacauucaaaguccucgaccuaaaaaauuacaucgacaaacaacuauuacccauccuuaauaaacaaucaugcuccauaucaaacauagaaacugucauggaauuucaacaaaaaaacaauagacuucuagaaaucacaagagaauuuucuguaaaugcaggaguaacuacaccaguaucaacauauauguuaaccaacuccgaacuacuaucacucauaaacgacaugccaauaacaaacgaccaaaaaaaacuaaugucaaauaacguucaaauaguaagacaacaaucauacucaaucaugugcauaauaaaagaagaaguuuuagcauacgucguacaacuuccccuauacggaguaauagacaccccuugcuggaaacuccacaccucaccacuaugcacuacaaacacaaaagaagguuccaacaucugcuuaacaagaaccgaucgaggaugguacugcgacaacgcugguuccguaucuuucuucccacaagcagaaacaugcaaaguaugcuccaauagaguauucugcgacaccaugaacucacuaacucuaccauccgaaguaaaccuaugcaacgucgacauauuuaauccaaaauaugacugcaaaauaaugacuucaaaaacagacguauccucaucaguaauaacauccuuaggagcaauaguaucauguuacggcaagacaaaauguacagccucaaacaaaaacaaagguaucauuaaaaccuucuccaacggcugcgacuacguaucaaauaaaggugucgauacaguaucaguaggaaacacacucuauuacguuaauaaacaagaaggaaagucauuauacguaaaaggagaaccaauaaucaauuucuacgauccccuagucuuucccucagaugaauuugacgcaagcaucucucaagucaacgaaaaaauaaaccaaucccuagccuucauaagaaaaucagaugaacuacuucauaacgucaacgccggaaaaucaacaaccaacauaaugaucacuacaaucauaauuguaauuauaguaauacuacuaucgcuaauugccguuggacuacuacuauauuguaaagcaagaucaacacccguuacucuauccaaagaucaauuaucaggaaucaacaacauagccuucucaaauuaaggacuaguggaagcauuuuccuggcugauuaaaagaaauuacucagcuauggucaucuguuccuguuagaaggcuaugcagcauauuauauacuaugcgcauguuaugaaaugcauaauaaaaaauuuuaaaaaaucuaaaagaucuaaaaaaaaaaaaaaaaaaaaaaaaaaaaaaaaaaaaaaaaaaaaaaaaaaaaaaaaaaaaaaaaugcaucccccccccccccccccccccccccccccccaaaggcucuuuucagagccaccagaauu

SEQ ID NO: 7122 - RNA, 1982 nt, Artificial Sequence
  mRNA product Design h-3 comprising derived and/or modified sequence from HRSV(A2)__F_DSCav1_mut7 (opt11)
gggagacccgugacccggaaguuguacggcuacgcgacuuucccucccacaaacccucgcgcccuuccuuuccuacuugggcccggcagaaagcuuaccauggaacuacucauacuuaaagccaacgcaauaaccacaauccucaccgccgucacauucugcuucgccucgggacaaaacauaaccgaagaauuuuaccagucuaccugcuccgccgucuccaaggguuaccucuccgcgcuccgcaccgggugguacaccagcguuaucaccaucgaacuaucuaacauaaaagaaaacaagugcaacggaaccgacgcaaaagucaaacucaucaaacaagaacuagacaaauacaagaaugccgucaccgaacuacaaaugcucaugugcuccacccccgccaccggauccggcuccgccauugccuccggcgucgccguaugcaaaguccuucacuuggaaggagaaguuaacaaaauaaaaagcgcccuccugucgaccaacaaagcgguggucagccucuccaacggcgucucuguccucaccuucaaaguccucgaccucaagaacuacauagauaaacaacuacuccccauccuaaacaaacagucaugcagcauauccaacaucgaaaccgucauggaguuccaacagaaaaacaaccgccuccuugaaaucacccgcgaguucucugucaacgccggcgucaccacccccgucuccaccuacaugcucacaaacuccgaacuccucagccucaucaacgacaugccaaucaccaacgaccaaaagaaacucauguccaacaacguacaaaucguucgucaacaaucauacucaaucaugugcaucauuaaagaagaaguccucgcauacgucguccaacucccccucuauggggucaucgacaccccaugcuggaaacuccacaccucuccccuaugcaccaccaacaccaaagaaggcuccaacaucugccuaacccgaaccgaccgcggaugguacugcgacaacgccggcuccgucuccuucuucccccaggccgaaacauguaaagucugcuccaaccguguguucugcgacaccaugaacucacuaacccuccccuccgaagucaaccucugcaacgucgacaucuucaacccgaaauacgacugcaaaauaaugaccagcaaaacagacguauccucuagcgucauuaccagccuaggugcaaucguguccugcuacggcaaaacaaaaugcaccgccuccaacaaaaauaaaggaaucauaaaaaccuucuccaacggcugcgacuacgucagcaacaaaggagucgacaccgucuccguaggaaauacucuauacuaugucaacaaacaagaggguaaaucccucuacgucaaaggcgaacccaucaucaacuucuacgacccccucgucuuccccucugacgaguucgacgccagcauaucacaaguaaacgaaaagaucaaccaaucccucgcauucauucgcaaauccgacgaacuccuacacaacgucaacgccggaaaauccaccaccaacaucaugaucacuacuaucauuaucgucaucaucgucauccuccucucccucaucgcagucggccuucuacucuacugcaaggcacgcucuacacccguaacccugucuaaagaccaacucuccggcaucaacaacaucgcuuucuccaacuaaggacuaguggaagcauuuuccuggcugauuaaaagaaauuacucagcuauggucaucuguuccuguuagaaggcuaugcagcauauuauauacuaugcgcauguuaugaaaugcauaauaaaaaauuuuaaaaaaucuaaaagaucuaaaaaaaaaaaaaaaaaaaaaaaaaaaaaaaaaaaaaaaaaaaaaaaaaaaaaaaaaaaaaaaaugcaucccccccccccccccccccccccccccccccaaaggcucuuuucagagccaccagaauu

SEQ ID NO: 7123 - RNA, 2045 nt, Artificial Sequence
  mRNA product Design h-4 comprising derived and/or modified sequence from HRSV(A2)__F_DSCav1_mut7 (opt1)
gggagagggcgcuuggcuugcaaggacccugagcugcggcauugaagcacacccaacccaacucgacugaagucagccucacugaaccggaucugagaaucuucucucucugggcuugccagggcucuccgaaccuagcuagcauccucuucaauuccaacuagaaagcuuaccauggagcugcucauccugaaggccaacgccaucaccaccauccugacggcggugaccuucugcuucgccagcggccagaacaucaccgaggaguucuaccaguccacgugcagcgccgucuccaagggguaccucagcgcccugcggaccggcugguacaccuccgugaucaccaucgagcugagcaacaucaaggagaacaagugcaacgggaccgacgccaaggugaagcucaucaagcaggagcuggacaaguacaagaacgcggucacggagcugcagaugcugaugugcuccaccccggcaaccggcuccggcuccgccaucgcgagcggcgucgccgugugcaaggugcugcaccucgagggggaggucaacaagaucaagagcgcccugcuguccaccaacaaggccguggugagccucuccaacggcgucagcgugcugaccuucaaggugcuggaccucaagaacuacaucgacaagcagcugcugcccauccugaacaagcagagcugcuccaucagcaacaucgagacggugauggaguuccagcagaagaacaaccggcuccuggagaucacccgcgaguucagcgugaacgccggggucaccacccccguguccacguacaugcugaccaacagcgagcuccugucccugaucaacgacaugccgaucaccaacgaccagaagaagcucaugagcaacaacgugcagaucguccggcagcaguccuacagcaucaugugcaucaucaaggaggaggugcuggcguacgugguccagcugccccucuacggcgugaucgacacccccugcuggaagcugcacacgagcccccugugcaccaccaacaccaaggagggguccaacaucugccucacgcgcaccgaccggggcugguacugcgacaacgccggcagcgucuccuucuucccgcaggccgagaccugcaaggugugcagcaaccgcguguucugcgacaccaugaacucccugacgcugcccagcgagguaaaccucugcaacgucgacaucuucaaccccaaguacgacugcaagaucaugaccuccaagaccgacgugagcuccagcgugaucaccucccugggggccaucgucagcugcuacggcaagacgaagugcaccgccagcaacaagaacaaggggaucaucaagaccuucuccaacggcugcgacuacgugagcaacaagggcguggacaccguguccgucgggaacacccuguacuacgugaacaagcaggagggcaagagccucuacgugaagggggagcccaucaucaacuucuacgacccgcuggucuuccccuccgacgaguucgacgcgagcaucucccaggugaacgagaagaucaaccagagccuggccuucauccgcaaguccgacgagcugcuccacaacgugaacgccggcaagagcacgaccaacaucaugaucaccaccaucaucaucgucaucaucgugauccugcugucccucaucgccguggggcugcugcucuacugcaaggcccggagcacgcccgucacccuguccaaggaccagcugagcggcaucaacaacaucgcguucuccaacugaggacuaguaauaaggaaacuguaugaaugucugugggcaggaagugaagagauccuucuguaaagguuuuuggaauuaugucugcugaauaauaaacuuuuuugaaauaauaaaucugguagaaaaaugagaucuaaaaaaaaaaaaaaaaaaaaaaaaaaaaaaaaaaaaaaaaaaaaaaaaaaaaaaaaaaaaaaaaugcaucccccccccccccccccccccccccccccccaaaggcucuuuucagagccaccagaauu

SEQ ID NO: 7124 - RNA, 2045 nt, Artificial Sequence
  mRNA product Design h-4 comprising derived and/or modified sequence from HRSV(A2)__F_DSCav1_mut7 (opt1)
gggagagggcgcuuggcuugcaaggacccugagcugcggcauugaagcacacccaacccaacucgacugaagucagccucacugaaccggaucugagaaucuucucucucugggcuugccagggcucuccgaaccuagcuagcauccucuucaauuccaacuagaaagcuuaccauggagcugcucauccugaaggccaacgccaucaccaccauccugacggcggugaccuucugcuucgccagcggccagaacaucaccgaggaguucuaccaguccacgugcagcgccgucuccaagggguaccucagcgcccugcgcaccggcugguacaccuccgugaucaccaucgagcugagcaacaucaaggagaacaagugcaacgggaccgacgccaaggugaagcucaucaagcaggagcuggacaaguacaagaacgcggucacggagcugcagaugcucaugugcuccacccccgccaccggcagcggguccgccaucgccagcggcguggcggugugcaagguccugcaccuggagggcgaggugaacaagaucaaguccgcccuccugagcaccaacaaggccguggucucccugagcaacgggguguccgugcucacguucaagguccuggaccugaagaacuacaucgacaagcagcuccugccgauccugaacaagcagagcugcuccaucagcaacaucgagaccgugauggaguuccagcagaagaacaaccggcuccuggagaucacccgcgaguucuccgugaacgccggcgucaccacgcccgugagcaccuacaugcugaccaacagcgagcuccugucccugaucaacgacaugcccaucaccaacgaccagaagaagcucaugagcaacaacgugcagaucguccggcagcaguccuacagcaucaugugcaucaucaaggaggaggugcuggccuacgugguccagcugccccucuacggggugaucgacacgccgugcuggaagcugcacaccagcccccugugcaccaccaacacgaaggagggcagcaacaucugccucacccgcaccgaccgggggugguacugcgacaacgcgggcuccgugagcuucuucccccaggccgagaccugcaaggucugcuccaaccgcguguucugcgacacgaugaacagccugacccugcccuccgaggucaaccucugcaacguggacaucuucaacccgaaguacgacugcaagaucaugaccagcaagaccgacguguccagcuccgucaucacgagccugggcgccaucguguccugcuacgggaagaccaagugcaccgccagcaacaagaacaagggcaucaucaagaccuucuccaacgggugcgacuacgugagcaacaagggcgucgacacggugagcgugggcaacacccuguacuacgucaacaagcaggaggggaagucccucuacgugaagggcgagcccaucaucaacuucuacgacccccugguguuccccagcgacgaguucgacgccuccaucagccaggucaacgagaagaucaaccagucccuggcguucauccggaaguccgacgagcuccugcacaacgugaacgccgggaaguccaccaccaacaucaugaucaccacgaucaucaucgugaucaucgucauccugcucagccugaucgccgugggccugcuccuguacugcaaggcccgcuccaccccggugacccugagcaaggaccagcuguccgggaucaacaacaucgccuucagcaacugaggacuaguaauaaggaaacuguaugaaugucugugggcaggaagugaagagauccuucuguaaagguuuuuggaauuaugucugcugaauaauaaacuuuuuugaaauaauaaaucugguagaaaaaugagaucuaaaaaaaaaaaaaaaaaaaaaaaaaaaaaaaaaaaaaaaaaaaaaaaaaaaaaaaaaaaaaaaaugcaucccccccccccccccccccccccccccccccaaaggcucuuuucagagccaccagaauu

SEQ ID NO: 7125 - RNA, 2045 nt, Artificial Sequence
  mRNA product Design h-4 comprising derived and/or modified sequence from HRSV(A2)__F_DSCav1_mut7 (opt2)
gggagagggcgcuuggcuugcaaggacccugagcugcggcauugaagcacacccaacccaacucgacugaagucagccucacugaaccggaucugagaaucuucucucucugggcuugccagggcucuccgaaccuagcuagcauccucuucaauuccaacuagaaagcuuaccauggagcuccucauccucaaggccaacgccaucaccaccauccucaccgccgucaccuucugcuucgccuccggccagaacaucaccgaggaguucuaccaguccaccugcuccgccgucuccaagggcuaccucuccgcccuccgcaccggcugguacaccuccgucaucaccaucgagcucuccaacaucaaggagaacaagugcaacggcaccgacgccaaggucaagcucaucaagcaggagcucgacaaguacaagaacgccgucaccgagcuccagaugcucaugugcuccacccccgccaccggcuccggcuccgccaucgccuccggcgucgccgucugcaagguccuccaccucgagggcgaggucaacaagaucaaguccgcccuccucuccaccaacaaggccgucgucucccucuccaacggcgucuccguccucaccuucaagguccucgaccucaagaacuacaucgacaagcagcuccuccccauccucaacaagcaguccugcuccaucuccaacaucgagaccgucauggaguuccagcagaagaacaaccgccuccucgagaucacccgcgaguucuccgucaacgccggcgucaccacccccgucuccaccuacaugcucaccaacuccgagcuccucucccucaucaacgacaugcccaucaccaacgaccagaagaagcucauguccaacaacguccagaucguccgccagcaguccuacuccaucaugugcaucaucaaggaggagguccucgccuacgucguccagcucccccucuacggcgucaucgacacccccugcuggaagcuccacaccuccccccucugcaccaccaacaccaaggagggcuccaacaucugccucacccgcaccgaccgcggcugguacugcgacaacgccggcuccgucuccuucuucccccaggccgagaccugcaaggucugcuccaaccgcgucuucugcgacaccaugaacucccucacccuccccuccgaggucaaccucugcaacgucgacaucuucaaccccaaguacgacugcaagaucaugaccuccaagaccgacgucuccuccuccgucaucaccucccucggcgccaucgucuccugcuacggcaagaccaagugcaccgccuccaacaagaacaagggcaucaucaagaccuucuccaacggcugcgacuacgucuccaacaagggcgucgacaccgucuccgucggcaacacccucuacuacgucaacaagcaggagggcaagucccucuacgucaagggcgagcccaucaucaacuucuacgacccccucgucuuccccuccgacgaguucgacgccuccaucucccaggucaacgagaagaucaaccagucccucgccuucauccgcaaguccgacgagcuccuccacaacgucaacgccggcaaguccaccaccaacaucaugaucaccaccaucaucaucgucaucaucgucauccuccucucccucaucgccgucggccuccuccucuacugcaaggcccgcuccacccccgucacccucuccaaggaccagcucuccggcaucaacaacaucgccuucuccaacugaggacuaguaauaaggaaacuguaugaaugucugugggcaggaagugaagagauccuucuguaaagguuuuuggaauuaugucugcugaauaauaaacuuuuuugaaauaauaaaucugguagaaaaaugagaucuaaaaaaaaaaaaaaaaaaaaaaaaaaaaaaaaaaaaaaaaaaaaaaaaaaaaaaaaaaaaaaaaugcaucccccccccccccccccccccccccccccccaaaggcucuuuucagagccaccagaauu

SEQ ID NO: 7126 - RNA, 2045 nt, Artificial Sequence
  mRNA product Design h-4 comprising derived and/or modified sequence from HRSV(A2)__F_DSCav1_mut7 (opt3)
gggagagggcgcuuggcuugcaaggacccugagcugcggcauugaagcacacccaacccaacucgacugaagucagccucacugaaccggaucugagaaucuucucucucugggcuugccagggcucuccgaaccuagcuagcauccucuucaauuccaacuagaaagcuuaccauggagcugcucauccuuaaggccaacgcuauuaccacaauacugacugcagugacguucugcuuugccagcggccagaauaucaccgaagaguucuaccaauccacauguucugcggucucaaaaggguauuugagugcuuuaagaacuggaugguacaccagcguuauuacaaucgaacuguccaacauuaaggagaauaaaugcaacgguaccgacgccaaggugaaacuaaucaagcaggaacucgauaaguauaaaaaugcaguaacugagcugcagaugcuuauguguucuacacccgccaccggcucggggucagcuauagcaagcggaguggccgucugcaaggugcugcacuuggagggcgaaguuaacaaaaucaagagugcucuccuguccacgaauaaagccguggucucucugagcaacgguguguccguacucacuuuuaagguuuuagaccugaagaauuacauugauaaacagcuuuugccuauccugaacaagcaaucauguaguauuagcaauaucgagaccgugauggaguuccagcagaaaaacaauaggcuacucgaaauaacacgggaguuuucugucaacgcgggggugacuaccccaguguccacauauaugcugaccaauucagaacuucugagcuugauuaacgacaugccgaucacgaacgaucagaagaaacucaugaguaauaacguccaaauuguucgccagcagucuuacuccaucaugugcaucauuaaggaggaagugcuggcauauguagugcaguuaccccuguacggagucauagacacuccuuguuggaaacuccauacaagcccacuuugcaccacuaauacaaaggagggcucgaacaucugucugacccgaacggaucguggcugguacugcgacaaugccgggucuguguccuucuuuccccaagcugaaaccuguaagguuugcucaaacagaguguucugcgauacaaugaauaguuugacucuaccuagcgaggucaaccuguguaauguggacauuuuuaacccaaaauaugauugcaagaucaugaccuccaaaacagacguaucuagcucaguuauaacuagccucggagccauuguguccuguuacgguaagaccaaaugcacagcaagcaauaagaacaagggcaucaucaaaaccuucucuaaugggugugauuaugucucaaacaagggaguggacacugucagugugggcaauacgcuguacuauguuaacaaacaggaggguaagagccuuuacgugaaaggggaacccauuaucaacuuuuaugacccucugguauucccauccgaugaguuugacgcuucuauuucgcaggucaaugaaaagauaaaccaaaguuuggccuucaucaggaaguccgaugagcuccugcacaaugugaacgcgggaaaaucaacaaccaauauuaugaucacuaccaucauuauaguuaucauugugaucuuacugagucuaauugccgucggccuccugcuuuacugcaaggcacggucuacaccggugaccuugagcaaagaccagcuguccggcaucaacaauauagcuuucucaaacugaggacuaguaauaaggaaacuguaugaaugucugugggcaggaagugaagagauccuucuguaaagguuuuuggaauuaugucugcugaauaauaaacuuuuuugaaauaauaaaucugguagaaaaaugagaucuaaaaaaaaaaaaaaaaaaaaaaaaaaaaaaaaaaaaaaaaaaaaaaaaaaaaaaaaaaaaaaaaugcaucccccccccccccccccccccccccccccccaaaggcucuuuucagagccaccagaauu

SEQ ID NO: 7127 - RNA, 2045 nt, Artificial Sequence
  mRNA product Design h-4 comprising derived and/or modified sequence from HRSV(A2)__F_DSCav1_mut7 (opt4)
gggagagggcgcuuggcuugcaaggacccugagcugcggcauugaagcacacccaacccaacucgacugaagucagccucacugaaccggaucugagaaucuucucucucugggcuugccagggcucuccgaaccuagcuagcauccucuucaauuccaacuagaaagcuuaccauggagcugcugauccugaaggccaacgccaucaccaccauccugaccgccgugaccuucugcuucgccagcggccagaacaucaccgaggaguucuaccagagcaccugcagcgccgugagcaagggcuaccugagcgcccugagaaccggcugguacaccagcgugaucaccaucgagcugagcaacaucaaggagaacaagugcaacggcaccgacgccaaggugaagcugaucaagcaggagcuggacaaguacaagaacgccgugaccgagcugcagaugcugaugugcagcacccccgccaccggcagcggcagcgccaucgccagcggcguggccgugugcaaggugcugcaccuggagggcgaggugaacaagaucaagagcgcccugcugagcaccaacaaggccguggugagccugagcaacggcgugagcgugcugaccuucaaggugcuggaccugaagaacuacaucgacaagcagcugcugcccauccugaacaagcagagcugcagcaucagcaacaucgagaccgugauggaguuccagcagaagaacaacagacugcuggagaucaccagagaguucagcgugaacgccggcgugaccacccccgugagcaccuacaugcugaccaacagcgagcugcugagccugaucaacgacaugcccaucaccaacgaccagaagaagcugaugagcaacaacgugcagaucgugagacagcagagcuacagcaucaugugcaucaucaaggaggaggugcuggccuacguggugcagcugccccuguacggcgugaucgacacccccugcuggaagcugcacaccagcccccugugcaccaccaacaccaaggagggcagcaacaucugccugaccagaaccgacagaggcugguacugcgacaacgccggcagcgugagcuucuucccccaggccgagaccugcaaggugugcagcaacagaguguucugcgacaccaugaacagccugacccugcccagcgaggugaaccugugcaacguggacaucuucaaccccaaguacgacugcaagaucaugaccagcaagaccgacgugagcagcagcgugaucaccagccugggcgccaucgugagcugcuacggcaagaccaagugcaccgccagcaacaagaacaagggcaucaucaagaccuucagcaacggcugcgacuacgugagcaacaagggcguggacaccgugagcgugggcaacacccuguacuacgugaacaagcaggagggcaagagccuguacgugaagggcgagcccaucaucaacuucuacgacccccugguguuccccagcgacgaguucgacgccagcaucagccaggugaacgagaagaucaaccagagccuggccuucaucagaaagagcgacgagcugcugcacaacgugaacgccggcaagagcaccaccaacaucaugaucaccaccaucaucaucgugaucaucgugauccugcugagccugaucgccgugggccugcugcuguacugcaaggccagaagcacccccgugacccugagcaaggaccagcugagcggcaucaacaacaucgccuucagcaacugaggacuaguaauaaggaaacuguaugaaugucugugggcaggaagugaagagauccuucuguaaagguuuuuggaauuaugucugcugaauaauaaacuuuuuugaaauaauaaaucugguagaaaaaugagaucuaaaaaaaaaaaaaaaaaaaaaaaaaaaaaaaaaaaaaaaaaaaaaaaaaaaaaaaaaaaaaaaaugcaucccccccccccccccccccccccccccccccaaaggcucuuuucagagccaccagaauu

SEQ ID NO: 7128 - RNA, 2045 nt, Artificial Sequence
  mRNA product Design h-4 comprising derived and/or modified sequence from HRSV(A2)__F_DSCav1_mut7 (opt5)
gggagagggcgcuuggcuugcaaggacccugagcugcggcauugaagcacacccaacccaacucgacugaagucagccucacugaaccggaucugagaaucuucucucucugggcuugccagggcucuccgaaccuagcuagcauccucuucaauuccaacuagaaagcuuaccauggagcugcucauccugaaggccaacgcuauuaccacaauccuuacggccgugaccuucugcuuugcgagcggccagaauauuacagaagaguucuaccaauccaccuguucugcugucagcaaaggguaucuguccgcccucagaacaggaugguacaccucuguuaucacaauugaacugagcaacaucaaggagaauaaaugcaacggcaccgacgccaaggugaaacuuaucaagcaggaacuggauaaguauaaaaaugcugugacggagcuccagaugcugauguguuccacccccgccacagggucuggaagcgcuauugccuccggcgucgcggugugcaagguucugcaccucgagggggaagugaacaaaaucaagagcgcccugcuuucuaccaauaaagcugucgugucccugagcaacggaguuucugugcucacauuuaagguccuggaccuuaagaauuacauugauaaacagcugcucccuauccugaacaagcaauccuguagcauuucuaauaucgagaccgugauggaguuccagcagaaaaacaaucggcugcucgaaauuacgcgcgaguuuuccgugaacgccggcgucacaaccccgguuagcacauauaugcugaccaauuccgaacuucugucucucaucaacgacaugcccaucaccaacgaucagaagaaacugaugagcaauaacgugcaaauugugagacagcaguccuacagcaucaugugcauuaucaaggaggaaguccuugcuuaugugguucagcugccucucuacggcgugauugacacacccuguuggaaacugcauacgucuccucugugcaccacaaauaccaaggagggguccaacaucugucucacacggaccgaucgcggaugguacugcgacaaugccggcagcgucucuuucuuuccccaagcggaaacguguaaggugugcagcaacagaguuuucugcgauacaaugaacucccugacccuuccuucugaggugaaucuguguaaugucgacaucuuuaacccgaaauaugauugcaagauuaugaccagcaaaacagacguguccagcucugucaucaccucccucggggccauugugagcuguuacggaaagacaaaaugcacggcuucuaauaagaacaagggcaucauuaaaaccuucuccaaugggugugauuauguuagcaacaagggaguggacacagucuccgugggcaauacccuguacuauguuaacaaacaggagggcaagucucuuuacgugaaaggggaacccaucaucaacuuuuaugacccucuggucuuccccagcgaugaguuugacgccuccauuucucaggugaaugaaaagaucaaccaaagccucgcuuucauucggaaguccgaugagcugcugcacaaugugaacgccggaaaaagcacaaccaauaucaugauuacgaccaucauuaucguuaucauugucauccuccugucucuuauugccgugggccugcuccuguacugcaaggcucgcuccacaccugugacccugagcaaagaccagcuuucugggaucaacaauauugcguucuccaacugaggacuaguaauaaggaaacuguaugaaugucugugggcaggaagugaagagauccuucuguaaagguuuuuggaauuaugucugcugaauaauaaacuuuuuugaaauaauaaaucugguagaaaaaugagaucuaaaaaaaaaaaaaaaaaaaaaaaaaaaaaaaaaaaaaaaaaaaaaaaaaaaaaaaaaaaaaaaaugcaucccccccccccccccccccccccccccccccaaaggcucuuuucagagccaccagaauu

SEQ ID NO: 7129 - RNA, 2045 nt, Artificial Sequence
  mRNA product Design h-4 comprising derived and/or modified sequence from HRSV(A2)__F_DSCav1_mut7 (opt6)
gggagagggcgcuuggcuugcaaggacccugagcugcggcauugaagcacacccaacccaacucgacugaagucagccucacugaaccggaucugagaaucuucucucucugggcuugccagggcucuccgaaccuagcuagcauccucuucaauuccaacuagaaagcuuaccauggaauuacucauacucaaagcaaaugcaauuaccacuauacucacagcuguaacuuuuuguuucgccucaggacaaaacaucacagaagaauuuuaucaauccacaugcucugccguaucaaaaggcuaccuaucugcccuaagaacagguugguacacaucuguaauaacaaucgaauuauccaacaucaaagaaaacaaaugcaacggcacagacgcaaaagucaaacucaucaaacaagaauuagauaaauauaaaaacgcaguaacagaacuacaaaugcuaaugugcucuacacccgccacaggaucaggauccgcaaucgcuucuggaguagccguuugcaaaguauuacaccuagaaggagaaguaaauaaaauaaaauccgcacuacuaucaacuaauaaagcaguaguaucacuuucuaaugguguaucaguauuaacauucaaaguccucgaccuaaaaaauuacaucgacaaacaacuauuacccauccuuaauaaacaaucaugcuccauaucaaacauagaaacugucauggaauuucaacaaaaaaacaauagacuucuagaaaucacaagagaauuuucuguaaaugcaggaguaacuacaccaguaucaacauauauguuaaccaacuccgaacuacuaucacucauaaacgacaugccaauaacaaacgaccaaaaaaaacuaaugucaaauaacguucaaauaguaagacaacaaucauacucaaucaugugcauaauaaaagaagaaguuuuagcauacgucguacaacuuccccuauacggaguaauagacaccccuugcuggaaacuccacaccucaccacuaugcacuacaaacacaaaagaagguuccaacaucugcuuaacaagaaccgaucgaggaugguacugcgacaacgcugguuccguaucuuucuucccacaagcagaaacaugcaaaguaugcuccaauagaguauucugcgacaccaugaacucacuaacucuaccauccgaaguaaaccuaugcaacgucgacauauuuaauccaaaauaugacugcaaaauaaugacuucaaaaacagacguauccucaucaguaauaacauccuuaggagcaauaguaucauguuacggcaagacaaaauguacagccucaaacaaaaacaaagguaucauuaaaaccuucuccaacggcugcgacuacguaucaaauaaaggugucgauacaguaucaguaggaaacacacucuauuacguuaauaaacaagaaggaaagucauuauacguaaaaggagaaccaauaaucaauuucuacgauccccuagucuuucccucagaugaauuugacgcaagcaucucucaagucaacgaaaaaauaaaccaaucccuagccuucauaagaaaaucagaugaacuacuucauaacgucaacgccggaaaaucaacaaccaacauaaugaucacuacaaucauaauuguaauuauaguaauacuacuaucgcuaauugccguuggacuacuacuauauuguaaagcaagaucaacacccguuacucuauccaaagaucaauuaucaggaaucaacaacauagccuucucaaauuaaggacuaguaauaaggaaacuguaugaaugucugugggcaggaagugaagagauccuucuguaaagguuuuuggaauuaugucugcugaauaauaaacuuuuuugaaauaauaaaucugguagaaaaaugagaucuaaaaaaaaaaaaaaaaaaaaaaaaaaaaaaaaaaaaaaaaaaaaaaaaaaaaaaaaaaaaaaaaugcaucccccccccccccccccccccccccccccccaaaggcucuuuucagagccaccagaauu

SEQ ID NO: 7130 - RNA, 2045 nt, Artificial Sequence
  mRNA product Design h-4 comprising derived and/or modified sequence from HRSV(A2)__F_DSCav1_mut7 (opt11)
gggagagggcgcuuggcuugcaaggacccugagcugcggcauugaagcacacccaacccaacucgacugaagucagccucacugaaccggaucugagaaucuucucucucugggcuugccagggcucuccgaaccuagcuagcauccucuucaauuccaacuagaaagcuuaccauggaacuacucauacuuaaagccaacgcaauaaccacaauccucaccgccgucacauucugcuucgccucgggacaaaacauaaccgaagaauuuuaccagucuaccugcuccgccgucuccaaggguuaccucuccgcgcuccgcaccgggugguacaccagcguuaucaccaucgaacuaucuaacauaaaagaaaacaagugcaacggaaccgacgcaaaagucaaacucaucaaacaagaacuagacaaauacaagaaugccgucaccgaacuacaaaugcucaugugcuccacccccgccaccggauccggcuccgccauugccuccggcgucgccguaugcaaaguccuucacuuggaaggagaaguuaacaaaauaaaaagcgcccuccugucgaccaacaaagcgguggucagccucuccaacggcgucucuguccucaccuucaaaguccucgaccucaagaacuacauagauaaacaacuacuccccauccuaaacaaacagucaugcagcauauccaacaucgaaaccgucauggaguuccaacagaaaaacaaccgccuccuugaaaucacccgcgaguucucugucaacgccggcgucaccacccccgucuccaccuacaugcucacaaacuccgaacuccucagccucaucaacgacaugccaaucaccaacgaccaaaagaaacucauguccaacaacguacaaaucguucgucaacaaucauacucaaucaugugcaucauuaaagaagaaguccucgcauacgucguccaacucccccucuauggggucaucgacaccccaugcuggaaacuccacaccucuccccuaugcaccaccaacaccaaagaaggcuccaacaucugccuaacccgaaccgaccgcggaugguacugcgacaacgccggcuccgucuccuucuucccccaggccgaaacauguaaagucugcuccaaccguguguucugcgacaccaugaacucacuaacccuccccuccgaagucaaccucugcaacgucgacaucuucaacccgaaauacgacugcaaaauaaugaccagcaaaacagacguauccucuagcgucauuaccagccuaggugcaaucguguccugcuacggcaaaacaaaaugcaccgccuccaacaaaaauaaaggaaucauaaaaaccuucuccaacggcugcgacuacgucagcaacaaaggagucgacaccgucuccguaggaaauacucuauacuaugucaacaaacaagaggguaaaucccucuacgucaaaggcgaacccaucaucaacuucuacgacccccucgucuuccccucugacgaguucgacgccagcauaucacaaguaaacgaaaagaucaaccaaucccucgcauucauucgcaaauccgacgaacuccuacacaacgucaacgccggaaaauccaccaccaacaucaugaucacuacuaucauuaucgucaucaucgucauccuccucucccucaucgcagucggccuucuacucuacugcaaggcacgcucuacacccguaacccugucuaaagaccaacucuccggcaucaacaacaucgcuuucuccaacuaaggacuaguaauaaggaaacuguaugaaugucugugggcaggaagugaagagauccuucuguaaagguuuuuggaauuaugucugcugaauaauaaacuuuuuugaaauaauaaaucugguagaaaaaugagaucuaaaaaaaaaaaaaaaaaaaaaaaaaaaaaaaaaaaaaaaaaaaaaaaaaaaaaaaaaaaaaaaaugcaucccccccccccccccccccccccccccccccaaaggcucuuuucagagccaccagaauu

SEQ ID NO: 7131 - RNA, 2061 nt, Artificial Sequence
  mRNA product Design h-5 comprising derived and/or modified sequence from HRSV(A2)__F_DSCav1_mut7 (opt1)
gggagagggcgcuuggcuugcaaggacccugagcugcggcauugaagcacacccaacccaacucgacugaagucagccucacugaaccggaucugagaaucuucucucucugggcuugccagggcucuccgaaccuagcuagcauccucuucaauuccaacuagaaagcuuaccauggagcugcucauccugaaggccaacgccaucaccaccauccugacggcggugaccuucugcuucgccagcggccagaacaucaccgaggaguucuaccaguccacgugcagcgccgucuccaagggguaccucagcgcccugcggaccggcugguacaccuccgugaucaccaucgagcugagcaacaucaaggagaacaagugcaacgggaccgacgccaaggugaagcucaucaagcaggagcuggacaaguacaagaacgcggucacggagcugcagaugcugaugugcuccaccccggcaaccggcuccggcuccgccaucgcgagcggcgucgccgugugcaaggugcugcaccucgagggggaggucaacaagaucaagagcgcccugcuguccaccaacaaggccguggugagccucuccaacggcgucagcgugcugaccuucaaggugcuggaccucaagaacuacaucgacaagcagcugcugcccauccugaacaagcagagcugcuccaucagcaacaucgagacggugauggaguuccagcagaagaacaaccggcuccuggagaucacccgcgaguucagcgugaacgccggggucaccacccccguguccacguacaugcugaccaacagcgagcuccugucccugaucaacgacaugccgaucaccaacgaccagaagaagcucaugagcaacaacgugcagaucguccggcagcaguccuacagcaucaugugcaucaucaaggaggaggugcuggcguacgugguccagcugccccucuacggcgugaucgacacccccugcuggaagcugcacacgagcccccugugcaccaccaacaccaaggagggguccaacaucugccucacgcgcaccgaccggggcugguacugcgacaacgccggcagcgucuccuucuucccgcaggccgagaccugcaaggugugcagcaaccgcguguucugcgacaccaugaacucccugacgcugcccagcgagguaaaccucugcaacgucgacaucuucaaccccaaguacgacugcaagaucaugaccuccaagaccgacgugagcuccagcgugaucaccucccugggggccaucgucagcugcuacggcaagacgaagugcaccgccagcaacaagaacaaggggaucaucaagaccuucuccaacggcugcgacuacgugagcaacaagggcguggacaccguguccgucgggaacacccuguacuacgugaacaagcaggagggcaagagccucuacgugaagggggagcccaucaucaacuucuacgacccgcuggucuuccccuccgacgaguucgacgcgagcaucucccaggugaacgagaagaucaaccagagccuggccuucauccgcaaguccgacgagcugcuccacaacgugaacgccggcaagagcacgaccaacaucaugaucaccaccaucaucaucgucaucaucgugauccugcugucccucaucgccguggggcugcugcucuacugcaaggcccggagcacgcccgucacccuguccaaggaccagcugagcggcaucaacaacaucgcguucuccaacugaggacuaguacuggcugcaucucccuuuccucuguccuccauccuucucccaggauggugaagggggaccugguacccagugauccccaccccaggauccuaaaucaugacuuaccugcuaauaaaaacucauuggaaaagugagaagaucuaaaaaaaaaaaaaaaaaaaaaaaaaaaaaaaaaaaaaaaaaaaaaaaaaaaaaaaaaaaaaaaaugcaucccccccccccccccccccccccccccccccaaaggcucuuuucagagccaccagaauu

SEQ ID NO: 7132 - RNA, 2061 nt, Artificial Sequence
  mRNA product Design h-5 comprising derived and/or modified sequence from HRSV(A2)__F_DSCav1_mut7 (opt1)
gggagagggcgcuuggcuugcaaggacccugagcugcggcauugaagcacacccaacccaacucgacugaagucagccucacugaaccggaucugagaaucuucucucucugggcuugccagggcucuccgaaccuagcuagcauccucuucaauuccaacuagaaagcuuaccauggagcugcucauccugaaggccaacgccaucaccaccauccugacggcggugaccuucugcuucgccagcggccagaacaucaccgaggaguucuaccaguccacgugcagcgccgucuccaagggguaccucagcgcccugcgcaccggcugguacaccuccgugaucaccaucgagcugagcaacaucaaggagaacaagugcaacgggaccgacgccaaggugaagcucaucaagcaggagcuggacaaguacaagaacgcggucacggagcugcagaugcucaugugcuccacccccgccaccggcagcggguccgccaucgccagcggcguggcggugugcaagguccugcaccuggagggcgaggugaacaagaucaaguccgcccuccugagcaccaacaaggccguggucucccugagcaacgggguguccgugcucacguucaagguccuggaccugaagaacuacaucgacaagcagcuccugccgauccugaacaagcagagcugcuccaucagcaacaucgagaccgugauggaguuccagcagaagaacaaccggcuccuggagaucacccgcgaguucuccgugaacgccggcgucaccacgcccgugagcaccuacaugcugaccaacagcgagcuccugucccugaucaacgacaugcccaucaccaacgaccagaagaagcucaugagcaacaacgugcagaucguccggcagcaguccuacagcaucaugugcaucaucaaggaggaggugcuggccuacgugguccagcugccccucuacggggugaucgacacgccgugcuggaagcugcacaccagcccccugugcaccaccaacacgaaggagggcagcaacaucugccucacccgcaccgaccgggggugguacugcgacaacgcgggcuccgugagcuucuucccccaggccgagaccugcaaggucugcuccaaccgcguguucugcgacacgaugaacagccugacccugcccuccgaggucaaccucugcaacguggacaucuucaacccgaaguacgacugcaagaucaugaccagcaagaccgacguguccagcuccgucaucacgagccugggcgccaucguguccugcuacgggaagaccaagugcaccgccagcaacaagaacaagggcaucaucaagaccuucuccaacgggugcgacuacgugagcaacaagggcgucgacacggugagcgugggcaacacccuguacuacgucaacaagcaggaggggaagucccucuacgugaagggcgagcccaucaucaacuucuacgacccccugguguuccccagcgacgaguucgacgccuccaucagccaggucaacgagaagaucaaccagucccuggcguucauccggaaguccgacgagcuccugcacaacgugaacgccgggaaguccaccaccaacaucaugaucaccacgaucaucaucgugaucaucgucauccugcucagccugaucgccgugggccugcuccuguacugcaaggcccgcuccaccccggugacccugagcaaggaccagcuguccgggaucaacaacaucgccuucagcaacugaggacuaguacuggcugcaucucccuuuccucuguccuccauccuucucccaggauggugaagggggaccugguacccagugauccccaccccaggauccuaaaucaugacuuaccugcuaauaaaaacucauuggaaaagugagaagaucuaaaaaaaaaaaaaaaaaaaaaaaaaaaaaaaaaaaaaaaaaaaaaaaaaaaaaaaaaaaaaaaaugcaucccccccccccccccccccccccccccccccaaaggcucuuuucagagccaccagaauu

SEQ ID NO: 7133 - RNA, 2061 nt, Artificial Sequence
  mRNA product Design h-5 comprising derived and/or modified sequence from HRSV(A2)__F_DSCav1_mut7 (opt2)
gggagagggcgcuuggcuugcaaggacccugagcugcggcauugaagcacacccaacccaacucgacugaagucagccucacugaaccggaucugagaaucuucucucucugggcuugccagggcucuccgaaccuagcuagcauccucuucaauuccaacuagaaagcuuaccauggagcuccucauccucaaggccaacgccaucaccaccauccucaccgccgucaccuucugcuucgccuccggccagaacaucaccgaggaguucuaccaguccaccugcuccgccgucuccaagggcuaccucuccgcccuccgcaccggcugguacaccuccgucaucaccaucgagcucuccaacaucaaggagaacaagugcaacggcaccgacgccaaggucaagcucaucaagcaggagcucgacaaguacaagaacgccgucaccgagcuccagaugcucaugugcuccacccccgccaccggcuccggcuccgccaucgccuccggcgucgccgucugcaagguccuccaccucgagggcgaggucaacaagaucaaguccgcccuccucuccaccaacaaggccgucgucucccucuccaacggcgucuccguccucaccuucaagguccucgaccucaagaacuacaucgacaagcagcuccuccccauccucaacaagcaguccugcuccaucuccaacaucgagaccgucauggaguuccagcagaagaacaaccgccuccucgagaucacccgcgaguucuccgucaacgccggcgucaccacccccgucuccaccuacaugcucaccaacuccgagcuccucucccucaucaacgacaugcccaucaccaacgaccagaagaagcucauguccaacaacguccagaucguccgccagcaguccuacuccaucaugugcaucaucaaggaggagguccucgccuacgucguccagcucccccucuacggcgucaucgacacccccugcuggaagcuccacaccuccccccucugcaccaccaacaccaaggagggcuccaacaucugccucacccgcaccgaccgcggcugguacugcgacaacgccggcuccgucuccuucuucccccaggccgagaccugcaaggucugcuccaaccgcgucuucugcgacaccaugaacucccucacccuccccuccgaggucaaccucugcaacgucgacaucuucaaccccaaguacgacugcaagaucaugaccuccaagaccgacgucuccuccuccgucaucaccucccucggcgccaucgucuccugcuacggcaagaccaagugcaccgccuccaacaagaacaagggcaucaucaagaccuucuccaacggcugcgacuacgucuccaacaagggcgucgacaccgucuccgucggcaacacccucuacuacgucaacaagcaggagggcaagucccucuacgucaagggcgagcccaucaucaacuucuacgacccccucgucuuccccuccgacgaguucgacgccuccaucucccaggucaacgagaagaucaaccagucccucgccuucauccgcaaguccgacgagcuccuccacaacgucaacgccggcaaguccaccaccaacaucaugaucaccaccaucaucaucgucaucaucgucauccuccucucccucaucgccgucggccuccuccucuacugcaaggcccgcuccacccccgucacccucuccaaggaccagcucuccggcaucaacaacaucgccuucuccaacugaggacuaguacuggcugcaucucccuuuccucuguccuccauccuucucccaggauggugaagggggaccugguacccagugauccccaccccaggauccuaaaucaugacuuaccugcuaauaaaaacucauuggaaaagugagaagaucuaaaaaaaaaaaaaaaaaaaaaaaaaaaaaaaaaaaaaaaaaaaaaaaaaaaaaaaaaaaaaaaaugcaucccccccccccccccccccccccccccccccaaaggcucuuuucagagccaccagaauu

SEQ ID NO: 7134 - RNA, 2061 nt, Artificial Sequence
  mRNA product Design h-5 comprising derived and/or modified sequence from HRSV(A2)__F_DSCav1_mut7 (opt3)
gggagagggcgcuuggcuugcaaggacccugagcugcggcauugaagcacacccaacccaacucgacugaagucagccucacugaaccggaucugagaaucuucucucucugggcuugccagggcucuccgaaccuagcuagcauccucuucaauuccaacuagaaagcuuaccauggagcugcucauccuuaaggccaacgcuauuaccacaauacugacugcagugacguucugcuuugccagcggccagaauaucaccgaagaguucuaccaauccacauguucugcggucucaaaaggguauuugagugcuuuaagaacuggaugguacaccagcguuauuacaaucgaacuguccaacauuaaggagaauaaaugcaacgguaccgacgccaaggugaaacuaaucaagcaggaacucgauaaguauaaaaaugcaguaacugagcugcagaugcuuauguguucuacacccgccaccggcucggggucagcuauagcaagcggaguggccgucugcaaggugcugcacuuggagggcgaaguuaacaaaaucaagagugcucuccuguccacgaauaaagccguggucucucugagcaacgguguguccguacucacuuuuaagguuuuagaccugaagaauuacauugauaaacagcuuuugccuauccugaacaagcaaucauguaguauuagcaauaucgagaccgugauggaguuccagcagaaaaacaauaggcuacucgaaauaacacgggaguuuucugucaacgcgggggugacuaccccaguguccacauauaugcugaccaauucagaacuucugagcuugauuaacgacaugccgaucacgaacgaucagaagaaacucaugaguaauaacguccaaauuguucgccagcagucuuacuccaucaugugcaucauuaaggaggaagugcuggcauauguagugcaguuaccccuguacggagucauagacacuccuuguuggaaacuccauacaagcccacuuugcaccacuaauacaaaggagggcucgaacaucugucugacccgaacggaucguggcugguacugcgacaaugccgggucuguguccuucuuuccccaagcugaaaccuguaagguuugcucaaacagaguguucugcgauacaaugaauaguuugacucuaccuagcgaggucaaccuguguaauguggacauuuuuaacccaaaauaugauugcaagaucaugaccuccaaaacagacguaucuagcucaguuauaacuagccucggagccauuguguccuguuacgguaagaccaaaugcacagcaagcaauaagaacaagggcaucaucaaaaccuucucuaaugggugugauuaugucucaaacaagggaguggacacugucagugugggcaauacgcuguacuauguuaacaaacaggaggguaagagccuuuacgugaaaggggaacccauuaucaacuuuuaugacccucugguauucccauccgaugaguuugacgcuucuauuucgcaggucaaugaaaagauaaaccaaaguuuggccuucaucaggaaguccgaugagcuccugcacaaugugaacgcgggaaaaucaacaaccaauauuaugaucacuaccaucauuauaguuaucauugugaucuuacugagucuaauugccgucggccuccugcuuuacugcaaggcacggucuacaccggugaccuugagcaaagaccagcuguccggcaucaacaauauagcuuucucaaacugaggacuaguacuggcugcaucucccuuuccucuguccuccauccuucucccaggauggugaagggggaccugguacccagugauccccaccccaggauccuaaaucaugacuuaccugcuaauaaaaacucauuggaaaagugagaagaucuaaaaaaaaaaaaaaaaaaaaaaaaaaaaaaaaaaaaaaaaaaaaaaaaaaaaaaaaaaaaaaaaugcaucccccccccccccccccccccccccccccccaaaggcucuuuucagagccaccagaauu

SEQ ID NO: 7135 - RNA, 2061 nt, Artificial Sequence
  mRNA product Design h-5 comprising derived and/or modified sequence from HRSV(A2)__F_DSCav1_mut7 (opt4)
gggagagggcgcuuggcuugcaaggacccugagcugcggcauugaagcacacccaacccaacucgacugaagucagccucacugaaccggaucugagaaucuucucucucugggcuugccagggcucuccgaaccuagcuagcauccucuucaauuccaacuagaaagcuuaccauggagcugcugauccugaaggccaacgccaucaccaccauccugaccgccgugaccuucugcuucgccagcggccagaacaucaccgaggaguucuaccagagcaccugcagcgccgugagcaagggcuaccugagcgcccugagaaccggcugguacaccagcgugaucaccaucgagcugagcaacaucaaggagaacaagugcaacggcaccgacgccaaggugaagcugaucaagcaggagcuggacaaguacaagaacgccgugaccgagcugcagaugcugaugugcagcacccccgccaccggcagcggcagcgccaucgccagcggcguggccgugugcaaggugcugcaccuggagggcgaggugaacaagaucaagagcgcccugcugagcaccaacaaggccguggugagccugagcaacggcgugagcgugcugaccuucaaggugcuggaccugaagaacuacaucgacaagcagcugcugcccauccugaacaagcagagcugcagcaucagcaacaucgagaccgugauggaguuccagcagaagaacaacagacugcuggagaucaccagagaguucagcgugaacgccggcgugaccacccccgugagcaccuacaugcugaccaacagcgagcugcugagccugaucaacgacaugcccaucaccaacgaccagaagaagcugaugagcaacaacgugcagaucgugagacagcagagcuacagcaucaugugcaucaucaaggaggaggugcuggccuacguggugcagcugccccuguacggcgugaucgacacccccugcuggaagcugcacaccagcccccugugcaccaccaacaccaaggagggcagcaacaucugccugaccagaaccgacagaggcugguacugcgacaacgccggcagcgugagcuucuucccccaggccgagaccugcaaggugugcagcaacagaguguucugcgacaccaugaacagccugacccugcccagcgaggugaaccugugcaacguggacaucuucaaccccaaguacgacugcaagaucaugaccagcaagaccgacgugagcagcagcgugaucaccagccugggcgccaucgugagcugcuacggcaagaccaagugcaccgccagcaacaagaacaagggcaucaucaagaccuucagcaacggcugcgacuacgugagcaacaagggcguggacaccgugagcgugggcaacacccuguacuacgugaacaagcaggagggcaagagccuguacgugaagggcgagcccaucaucaacuucuacgacccccugguguuccccagcgacgaguucgacgccagcaucagccaggugaacgagaagaucaaccagagccuggccuucaucagaaagagcgacgagcugcugcacaacgugaacgccggcaagagcaccaccaacaucaugaucaccaccaucaucaucgugaucaucgugauccugcugagccugaucgccgugggccugcugcuguacugcaaggccagaagcacccccgugacccugagcaaggaccagcugagcggcaucaacaacaucgccuucagcaacugaggacuaguacuggcugcaucucccuuuccucuguccuccauccuucucccaggauggugaagggggaccugguacccagugauccccaccccaggauccuaaaucaugacuuaccugcuaauaaaaacucauuggaaaagugagaagaucuaaaaaaaaaaaaaaaaaaaaaaaaaaaaaaaaaaaaaaaaaaaaaaaaaaaaaaaaaaaaaaaaugcaucccccccccccccccccccccccccccccccaaaggcucuuuucagagccaccagaauu

SEQ ID NO: 7136 - RNA, 2061 nt, Artificial Sequence
  mRNA product Design h-5 comprising derived and/or modified sequence from HRSV(A2)__F_DSCav1_mut7 (opt5)
gggagagggcgcuuggcuugcaaggacccugagcugcggcauugaagcacacccaacccaacucgacugaagucagccucacugaaccggaucugagaaucuucucucucugggcuugccagggcucuccgaaccuagcuagcauccucuucaauuccaacuagaaagcuuaccauggagcugcucauccugaaggccaacgcuauuaccacaauccuuacggccgugaccuucugcuuugcgagcggccagaauauuacagaagaguucuaccaauccaccuguucugcugucagcaaaggguaucuguccgcccucagaacaggaugguacaccucuguuaucacaauugaacugagcaacaucaaggagaauaaaugcaacggcaccgacgccaaggugaaacuuaucaagcaggaacuggauaaguauaaaaaugcugugacggagcuccagaugcugauguguuccacccccgccacagggucuggaagcgcuauugccuccggcgucgcggugugcaagguucugcaccucgagggggaagugaacaaaaucaagagcgcccugcuuucuaccaauaaagcugucgugucccugagcaacggaguuucugugcucacauuuaagguccuggaccuuaagaauuacauugauaaacagcugcucccuauccugaacaagcaauccuguagcauuucuaauaucgagaccgugauggaguuccagcagaaaaacaaucggcugcucgaaauuacgcgcgaguuuuccgugaacgccggcgucacaaccccgguuagcacauauaugcugaccaauuccgaacuucugucucucaucaacgacaugcccaucaccaacgaucagaagaaacugaugagcaauaacgugcaaauugugagacagcaguccuacagcaucaugugcauuaucaaggaggaaguccuugcuuaugugguucagcugccucucuacggcgugauugacacacccuguuggaaacugcauacgucuccucugugcaccacaaauaccaaggagggguccaacaucugucucacacggaccgaucgcggaugguacugcgacaaugccggcagcgucucuuucuuuccccaagcggaaacguguaaggugugcagcaacagaguuuucugcgauacaaugaacucccugacccuuccuucugaggugaaucuguguaaugucgacaucuuuaacccgaaauaugauugcaagauuaugaccagcaaaacagacguguccagcucugucaucaccucccucggggccauugugagcuguuacggaaagacaaaaugcacggcuucuaauaagaacaagggcaucauuaaaaccuucuccaaugggugugauuauguuagcaacaagggaguggacacagucuccgugggcaauacccuguacuauguuaacaaacaggagggcaagucucuuuacgugaaaggggaacccaucaucaacuuuuaugacccucuggucuuccccagcgaugaguuugacgccuccauuucucaggugaaugaaaagaucaaccaaagccucgcuuucauucggaaguccgaugagcugcugcacaaugugaacgccggaaaaagcacaaccaauaucaugauuacgaccaucauuaucguuaucauugucauccuccugucucuuauugccgugggccugcuccuguacugcaaggcucgcuccacaccugugacccugagcaaagaccagcuuucugggaucaacaauauugcguucuccaacugaggacuaguacuggcugcaucucccuuuccucuguccuccauccuucucccaggauggugaagggggaccugguacccagugauccccaccccaggauccuaaaucaugacuuaccugcuaauaaaaacucauuggaaaagugagaagaucuaaaaaaaaaaaaaaaaaaaaaaaaaaaaaaaaaaaaaaaaaaaaaaaaaaaaaaaaaaaaaaaaugcaucccccccccccccccccccccccccccccccaaaggcucuuuucagagccaccagaauu

SEQ ID NO: 7137 - RNA, 2061 nt, Artificial Sequence
  mRNA product Design h-5 comprising derived and/or modified sequence from HRSV(A2)__F_DSCav1_mut7 (opt6)
gggagagggcgcuuggcuugcaaggacccugagcugcggcauugaagcacacccaacccaacucgacugaagucagccucacugaaccggaucugagaaucuucucucucugggcuugccagggcucuccgaaccuagcuagcauccucuucaauuccaacuagaaagcuuaccauggaauuacucauacucaaagcaaaugcaauuaccacuauacucacagcuguaacuuuuuguuucgccucaggacaaaacaucacagaagaauuuuaucaauccacaugcucugccguaucaaaaggcuaccuaucugcccuaagaacagguugguacacaucuguaauaacaaucgaauuauccaacaucaaagaaaacaaaugcaacggcacagacgcaaaagucaaacucaucaaacaagaauuagauaaauauaaaaacgcaguaacagaacuacaaaugcuaaugugcucuacacccgccacaggaucaggauccgcaaucgcuucuggaguagccguuugcaaaguauuacaccuagaaggagaaguaaauaaaauaaaauccgcacuacuaucaacuaauaaagcaguaguaucacuuucuaaugguguaucaguauuaacauucaaaguccucgaccuaaaaaauuacaucgacaaacaacuauuacccauccuuaauaaacaaucaugcuccauaucaaacauagaaacugucauggaauuucaacaaaaaaacaauagacuucuagaaaucacaagagaauuuucuguaaaugcaggaguaacuacaccaguaucaacauauauguuaaccaacuccgaacuacuaucacucauaaacgacaugccaauaacaaacgaccaaaaaaaacuaaugucaaauaacguucaaauaguaagacaacaaucauacucaaucaugugcauaauaaaagaagaaguuuuagcauacgucguacaacuuccccuauacggaguaauagacaccccuugcuggaaacuccacaccucaccacuaugcacuacaaacacaaaagaagguuccaacaucugcuuaacaagaaccgaucgaggaugguacugcgacaacgcugguuccguaucuuucuucccacaagcagaaacaugcaaaguaugcuccaauagaguauucugcgacaccaugaacucacuaacucuaccauccgaaguaaaccuaugcaacgucgacauauuuaauccaaaauaugacugcaaaauaaugacuucaaaaacagacguauccucaucaguaauaacauccuuaggagcaauaguaucauguuacggcaagacaaaauguacagccucaaacaaaaacaaagguaucauuaaaaccuucuccaacggcugcgacuacguaucaaauaaaggugucgauacaguaucaguaggaaacacacucuauuacguuaauaaacaagaaggaaagucauuauacguaaaaggagaaccaauaaucaauuucuacgauccccuagucuuucccucagaugaauuugacgcaagcaucucucaagucaacgaaaaaauaaaccaaucccuagccuucauaagaaaaucagaugaacuacuucauaacgucaacgccggaaaaucaacaaccaacauaaugaucacuacaaucauaauuguaauuauaguaauacuacuaucgcuaauugccguuggacuacuacuauauuguaaagcaagaucaacacccguuacucuauccaaagaucaauuaucaggaaucaacaacauagccuucucaaauuaaggacuaguacuggcugcaucucccuuuccucuguccuccauccuucucccaggauggugaagggggaccugguacccagugauccccaccccaggauccuaaaucaugacuuaccugcuaauaaaaacucauuggaaaagugagaagaucuaaaaaaaaaaaaaaaaaaaaaaaaaaaaaaaaaaaaaaaaaaaaaaaaaaaaaaaaaaaaaaaaugcaucccccccccccccccccccccccccccccccaaaggcucuuuucagagccaccagaauu

SEQ ID NO: 7138 - RNA, 2061 nt, Artificial Sequence
  mRNA product Design h-5 comprising derived and/or modified sequence from HRSV(A2)__F_DSCav1_mut7 (opt11)
gggagagggcgcuuggcuugcaaggacccugagcugcggcauugaagcacacccaacccaacucgacugaagucagccucacugaaccggaucugagaaucuucucucucugggcuugccagggcucuccgaaccuagcuagcauccucuucaauuccaacuagaaagcuuaccauggaacuacucauacuuaaagccaacgcaauaaccacaauccucaccgccgucacauucugcuucgccucgggacaaaacauaaccgaagaauuuuaccagucuaccugcuccgccgucuccaaggguuaccucuccgcgcuccgcaccgggugguacaccagcguuaucaccaucgaacuaucuaacauaaaagaaaacaagugcaacggaaccgacgcaaaagucaaacucaucaaacaagaacuagacaaauacaagaaugccgucaccgaacuacaaaugcucaugugcuccacccccgccaccggauccggcuccgccauugccuccggcgucgccguaugcaaaguccuucacuuggaaggagaaguuaacaaaauaaaaagcgcccuccugucgaccaacaaagcgguggucagccucuccaacggcgucucuguccucaccuucaaaguccucgaccucaagaacuacauagauaaacaacuacuccccauccuaaacaaacagucaugcagcauauccaacaucgaaaccgucauggaguuccaacagaaaaacaaccgccuccuugaaaucacccgcgaguucucugucaacgccggcgucaccacccccgucuccaccuacaugcucacaaacuccgaacuccucagccucaucaacgacaugccaaucaccaacgaccaaaagaaacucauguccaacaacguacaaaucguucgucaacaaucauacucaaucaugugcaucauuaaagaagaaguccucgcauacgucguccaacucccccucuauggggucaucgacaccccaugcuggaaacuccacaccucuccccuaugcaccaccaacaccaaagaaggcuccaacaucugccuaacccgaaccgaccgcggaugguacugcgacaacgccggcuccgucuccuucuucccccaggccgaaacauguaaagucugcuccaaccguguguucugcgacaccaugaacucacuaacccuccccuccgaagucaaccucugcaacgucgacaucuucaacccgaaauacgacugcaaaauaaugaccagcaaaacagacguauccucuagcgucauuaccagccuaggugcaaucguguccugcuacggcaaaacaaaaugcaccgccuccaacaaaaauaaaggaaucauaaaaaccuucuccaacggcugcgacuacgucagcaacaaaggagucgacaccgucuccguaggaaauacucuauacuaugucaacaaacaagaggguaaaucccucuacgucaaaggcgaacccaucaucaacuucuacgacccccucgucuuccccucugacgaguucgacgccagcauaucacaaguaaacgaaaagaucaaccaaucccucgcauucauucgcaaauccgacgaacuccuacacaacgucaacgccggaaaauccaccaccaacaucaugaucacuacuaucauuaucgucaucaucgucauccuccucucccucaucgcagucggccuucuacucuacugcaaggcacgcucuacacccguaacccugucuaaagaccaacucuccggcaucaacaacaucgcuuucuccaacuaaggacuaguacuggcugcaucucccuuuccucuguccuccauccuucucccaggauggugaagggggaccugguacccagugauccccaccccaggauccuaaaucaugacuuaccugcuaauaaaaacucauuggaaaagugagaagaucuaaaaaaaaaaaaaaaaaaaaaaaaaaaaaaaaaaaaaaaaaaaaaaaaaaaaaaaaaaaaaaaaugcaucccccccccccccccccccccccccccccccaaaggcucuuuucagagccaccagaauu

SEQ ID NO: 7139 - RNA, 1994 nt, Artificial Sequence
  mRNA product Design i-1 comprising derived and/or modified sequence from HRSV(A2)__F_DSCav1_mut7 (opt1)
gggagagggcgcuuggcuugcaaggacccugagcugcggcauugaagcacacccaacccaacucgacugaagucagccucacugaaccggaucugagaaucuucucucucugggcuugccagggcucuccgaaccuagcuagcauccucuucaauuccaacuagaaagcuuaccauggagcugcucauccugaaggccaacgccaucaccaccauccugacggcggugaccuucugcuucgccagcggccagaacaucaccgaggaguucuaccaguccacgugcagcgccgucuccaagggguaccucagcgcccugcggaccggcugguacaccuccgugaucaccaucgagcugagcaacaucaaggagaacaagugcaacgggaccgacgccaaggugaagcucaucaagcaggagcuggacaaguacaagaacgcggucacggagcugcagaugcugaugugcuccaccccggcaaccggcuccggcuccgccaucgcgagcggcgucgccgugugcaaggugcugcaccucgagggggaggucaacaagaucaagagcgcccugcuguccaccaacaaggccguggugagccucuccaacggcgucagcgugcugaccuucaaggugcuggaccucaagaacuacaucgacaagcagcugcugcccauccugaacaagcagagcugcuccaucagcaacaucgagacggugauggaguuccagcagaagaacaaccggcuccuggagaucacccgcgaguucagcgugaacgccggggucaccacccccguguccacguacaugcugaccaacagcgagcuccugucccugaucaacgacaugccgaucaccaacgaccagaagaagcucaugagcaacaacgugcagaucguccggcagcaguccuacagcaucaugugcaucaucaaggaggaggugcuggcguacgugguccagcugccccucuacggcgugaucgacacccccugcuggaagcugcacacgagcccccugugcaccaccaacaccaaggagggguccaacaucugccucacgcgcaccgaccggggcugguacugcgacaacgccggcagcgucuccuucuucccgcaggccgagaccugcaaggugugcagcaaccgcguguucugcgacaccaugaacucccugacgcugcccagcgagguaaaccucugcaacgucgacaucuucaaccccaaguacgacugcaagaucaugaccuccaagaccgacgugagcuccagcgugaucaccucccugggggccaucgucagcugcuacggcaagacgaagugcaccgccagcaacaagaacaaggggaucaucaagaccuucuccaacggcugcgacuacgugagcaacaagggcguggacaccguguccgucgggaacacccuguacuacgugaacaagcaggagggcaagagccucuacgugaagggggagcccaucaucaacuucuacgacccgcuggucuuccccuccgacgaguucgacgcgagcaucucccaggugaacgagaagaucaaccagagccuggccuucauccgcaaguccgacgagcugcuccacaacgugaacgccggcaagagcacgaccaacaucaugaucaccaccaucaucaucgucaucaucgugauccugcugucccucaucgccguggggcugcugcucuacugcaaggcccggagcacgcccgucacccuguccaaggaccagcugagcggcaucaacaacaucgcguucuccaacugaggacuaguguccaccugucccuccugggcugcuggauugucucguuuuccugccaaauaaacaggaucagcgcuuuacagaucuaaaaaaaaaaaaaaaaaaaaaaaaaaaaaaaaaaaaaaaaaaaaaaaaaaaaaaaaaaaaaaaaugcaucccccccccccccccccccccccccccccccaaaggcucuuuucagagccaccagaauu

SEQ ID NO: 7140 - RNA, 1994 nt, Artificial Sequence
  mRNA product Design i-1 comprising derived and/or modified sequence from HRSV(A2)__F_DSCav1_mut7 (opt1)
gggagagggcgcuuggcuugcaaggacccugagcugcggcauugaagcacacccaacccaacucgacugaagucagccucacugaaccggaucugagaaucuucucucucugggcuugccagggcucuccgaaccuagcuagcauccucuucaauuccaacuagaaagcuuaccauggagcugcucauccugaaggccaacgccaucaccaccauccugacggcggugaccuucugcuucgccagcggccagaacaucaccgaggaguucuaccaguccacgugcagcgccgucuccaagggguaccucagcgcccugcgcaccggcugguacaccuccgugaucaccaucgagcugagcaacaucaaggagaacaagugcaacgggaccgacgccaaggugaagcucaucaagcaggagcuggacaaguacaagaacgcggucacggagcugcagaugcucaugugcuccacccccgccaccggcagcggguccgccaucgccagcggcguggcggugugcaagguccugcaccuggagggcgaggugaacaagaucaaguccgcccuccugagcaccaacaaggccguggucucccugagcaacgggguguccgugcucacguucaagguccuggaccugaagaacuacaucgacaagcagcuccugccgauccugaacaagcagagcugcuccaucagcaacaucgagaccgugauggaguuccagcagaagaacaaccggcuccuggagaucacccgcgaguucuccgugaacgccggcgucaccacgcccgugagcaccuacaugcugaccaacagcgagcuccugucccugaucaacgacaugcccaucaccaacgaccagaagaagcucaugagcaacaacgugcagaucguccggcagcaguccuacagcaucaugugcaucaucaaggaggaggugcuggccuacgugguccagcugccccucuacggggugaucgacacgccgugcuggaagcugcacaccagcccccugugcaccaccaacacgaaggagggcagcaacaucugccucacccgcaccgaccgggggugguacugcgacaacgcgggcuccgugagcuucuucccccaggccgagaccugcaaggucugcuccaaccgcguguucugcgacacgaugaacagccugacccugcccuccgaggucaaccucugcaacguggacaucuucaacccgaaguacgacugcaagaucaugaccagcaagaccgacguguccagcuccgucaucacgagccugggcgccaucguguccugcuacgggaagaccaagugcaccgccagcaacaagaacaagggcaucaucaagaccuucuccaacgggugcgacuacgugagcaacaagggcgucgacacggugagcgugggcaacacccuguacuacgucaacaagcaggaggggaagucccucuacgugaagggcgagcccaucaucaacuucuacgacccccugguguuccccagcgacgaguucgacgccuccaucagccaggucaacgagaagaucaaccagucccuggcguucauccggaaguccgacgagcuccugcacaacgugaacgccgggaaguccaccaccaacaucaugaucaccacgaucaucaucgugaucaucgucauccugcucagccugaucgccgugggccugcuccuguacugcaaggcccgcuccaccccggugacccugagcaaggaccagcuguccgggaucaacaacaucgccuucagcaacugaggacuaguguccaccugucccuccugggcugcuggauugucucguuuuccugccaaauaaacaggaucagcgcuuuacagaucuaaaaaaaaaaaaaaaaaaaaaaaaaaaaaaaaaaaaaaaaaaaaaaaaaaaaaaaaaaaaaaaaugcaucccccccccccccccccccccccccccccccaaaggcucuuuucagagccaccagaauu

SEQ ID NO: 7141 - RNA, 1994 nt, Artificial Sequence
  mRNA product Design i-1 comprising derived and/or modified sequence from HRSV(A2)__F_DSCav1_mut7 (opt2)
gggagagggcgcuuggcuugcaaggacccugagcugcggcauugaagcacacccaacccaacucgacugaagucagccucacugaaccggaucugagaaucuucucucucugggcuugccagggcucuccgaaccuagcuagcauccucuucaauuccaacuagaaagcuuaccauggagcuccucauccucaaggccaacgccaucaccaccauccucaccgccgucaccuucugcuucgccuccggccagaacaucaccgaggaguucuaccaguccaccugcuccgccgucuccaagggcuaccucuccgcccuccgcaccggcugguacaccuccgucaucaccaucgagcucuccaacaucaaggagaacaagugcaacggcaccgacgccaaggucaagcucaucaagcaggagcucgacaaguacaagaacgccgucaccgagcuccagaugcucaugugcuccacccccgccaccggcuccggcuccgccaucgccuccggcgucgccgucugcaagguccuccaccucgagggcgaggucaacaagaucaaguccgcccuccucuccaccaacaaggccgucgucucccucuccaacggcgucuccguccucaccuucaagguccucgaccucaagaacuacaucgacaagcagcuccuccccauccucaacaagcaguccugcuccaucuccaacaucgagaccgucauggaguuccagcagaagaacaaccgccuccucgagaucacccgcgaguucuccgucaacgccggcgucaccacccccgucuccaccuacaugcucaccaacuccgagcuccucucccucaucaacgacaugcccaucaccaacgaccagaagaagcucauguccaacaacguccagaucguccgccagcaguccuacuccaucaugugcaucaucaaggaggagguccucgccuacgucguccagcucccccucuacggcgucaucgacacccccugcuggaagcuccacaccuccccccucugcaccaccaacaccaaggagggcuccaacaucugccucacccgcaccgaccgcggcugguacugcgacaacgccggcuccgucuccuucuucccccaggccgagaccugcaaggucugcuccaaccgcgucuucugcgacaccaugaacucccucacccuccccuccgaggucaaccucugcaacgucgacaucuucaaccccaaguacgacugcaagaucaugaccuccaagaccgacgucuccuccuccgucaucaccucccucggcgccaucgucuccugcuacggcaagaccaagugcaccgccuccaacaagaacaagggcaucaucaagaccuucuccaacggcugcgacuacgucuccaacaagggcgucgacaccgucuccgucggcaacacccucuacuacgucaacaagcaggagggcaagucccucuacgucaagggcgagcccaucaucaacuucuacgacccccucgucuuccccuccgacgaguucgacgccuccaucucccaggucaacgagaagaucaaccagucccucgccuucauccgcaaguccgacgagcuccuccacaacgucaacgccggcaaguccaccaccaacaucaugaucaccaccaucaucaucgucaucaucgucauccuccucucccucaucgccgucggccuccuccucuacugcaaggcccgcuccacccccgucacccucuccaaggaccagcucuccggcaucaacaacaucgccuucuccaacugaggacuaguguccaccugucccuccugggcugcuggauugucucguuuuccugccaaauaaacaggaucagcgcuuuacagaucuaaaaaaaaaaaaaaaaaaaaaaaaaaaaaaaaaaaaaaaaaaaaaaaaaaaaaaaaaaaaaaaaugcaucccccccccccccccccccccccccccccccaaaggcucuuuucagagccaccagaauu

SEQ ID NO: 7142 - RNA, 1994 nt, Artificial Sequence
  mRNA product Design i-1 comprising derived and/or modified sequence from HRSV(A2)__F_DSCav1_mut7 (opt3)
gggagagggcgcuuggcuugcaaggacccugagcugcggcauugaagcacacccaacccaacucgacugaagucagccucacugaaccggaucugagaaucuucucucucugggcuugccagggcucuccgaaccuagcuagcauccucuucaauuccaacuagaaagcuuaccauggagcugcucauccuuaaggccaacgcuauuaccacaauacugacugcagugacguucugcuuugccagcggccagaauaucaccgaagaguucuaccaauccacauguucugcggucucaaaaggguauuugagugcuuuaagaacuggaugguacaccagcguuauuacaaucgaacuguccaacauuaaggagaauaaaugcaacgguaccgacgccaaggugaaacuaaucaagcaggaacucgauaaguauaaaaaugcaguaacugagcugcagaugcuuauguguucuacacccgccaccggcucggggucagcuauagcaagcggaguggccgucugcaaggugcugcacuuggagggcgaaguuaacaaaaucaagagugcucuccuguccacgaauaaagccguggucucucugagcaacgguguguccguacucacuuuuaagguuuuagaccugaagaauuacauugauaaacagcuuuugccuauccugaacaagcaaucauguaguauuagcaauaucgagaccgugauggaguuccagcagaaaaacaauaggcuacucgaaauaacacgggaguuuucugucaacgcgggggugacuaccccaguguccacauauaugcugaccaauucagaacuucugagcuugauuaacgacaugccgaucacgaacgaucagaagaaacucaugaguaauaacguccaaauuguucgccagcagucuuacuccaucaugugcaucauuaaggaggaagugcuggcauauguagugcaguuaccccuguacggagucauagacacuccuuguuggaaacuccauacaagcccacuuugcaccacuaauacaaaggagggcucgaacaucugucugacccgaacggaucguggcugguacugcgacaaugccgggucuguguccuucuuuccccaagcugaaaccuguaagguuugcucaaacagaguguucugcgauacaaugaauaguuugacucuaccuagcgaggucaaccuguguaauguggacauuuuuaacccaaaauaugauugcaagaucaugaccuccaaaacagacguaucuagcucaguuauaacuagccucggagccauuguguccuguuacgguaagaccaaaugcacagcaagcaauaagaacaagggcaucaucaaaaccuucucuaaugggugugauuaugucucaaacaagggaguggacacugucagugugggcaauacgcuguacuauguuaacaaacaggaggguaagagccuuuacgugaaaggggaacccauuaucaacuuuuaugacccucugguauucccauccgaugaguuugacgcuucuauuucgcaggucaaugaaaagauaaaccaaaguuuggccuucaucaggaaguccgaugagcuccugcacaaugugaacgcgggaaaaucaacaaccaauauuaugaucacuaccaucauuauaguuaucauugugaucuuacugagucuaauugccgucggccuccugcuuuacugcaaggcacggucuacaccggugaccuugagcaaagaccagcuguccggcaucaacaauauagcuuucucaaacugaggacuaguguccaccugucccuccugggcugcuggauugucucguuuuccugccaaauaaacaggaucagcgcuuuacagaucuaaaaaaaaaaaaaaaaaaaaaaaaaaaaaaaaaaaaaaaaaaaaaaaaaaaaaaaaaaaaaaaaugcaucccccccccccccccccccccccccccccccaaaggcucuuuucagagccaccagaauu

SEQ ID NO: 7143 - RNA, 1994 nt, Artificial Sequence
  mRNA product Design i-1 comprising derived and/or modified sequence from HRSV(A2)__F_DSCav1_mut7 (opt4)
gggagagggcgcuuggcuugcaaggacccugagcugcggcauugaagcacacccaacccaacucgacugaagucagccucacugaaccggaucugagaaucuucucucucugggcuugccagggcucuccgaaccuagcuagcauccucuucaauuccaacuagaaagcuuaccauggagcugcugauccugaaggccaacgccaucaccaccauccugaccgccgugaccuucugcuucgccagcggccagaacaucaccgaggaguucuaccagagcaccugcagcgccgugagcaagggcuaccugagcgcccugagaaccggcugguacaccagcgugaucaccaucgagcugagcaacaucaaggagaacaagugcaacggcaccgacgccaaggugaagcugaucaagcaggagcuggacaaguacaagaacgccgugaccgagcugcagaugcugaugugcagcacccccgccaccggcagcggcagcgccaucgccagcggcguggccgugugcaaggugcugcaccuggagggcgaggugaacaagaucaagagcgcccugcugagcaccaacaaggccguggugagccugagcaacggcgugagcgugcugaccuucaaggugcuggaccugaagaacuacaucgacaagcagcugcugcccauccugaacaagcagagcugcagcaucagcaacaucgagaccgugauggaguuccagcagaagaacaacagacugcuggagaucaccagagaguucagcgugaacgccggcgugaccacccccgugagcaccuacaugcugaccaacagcgagcugcugagccugaucaacgacaugcccaucaccaacgaccagaagaagcugaugagcaacaacgugcagaucgugagacagcagagcuacagcaucaugugcaucaucaaggaggaggugcuggccuacguggugcagcugccccuguacggcgugaucgacacccccugcuggaagcugcacaccagcccccugugcaccaccaacaccaaggagggcagcaacaucugccugaccagaaccgacagaggcugguacugcgacaacgccggcagcgugagcuucuucccccaggccgagaccugcaaggugugcagcaacagaguguucugcgacaccaugaacagccugacccugcccagcgaggugaaccugugcaacguggacaucuucaaccccaaguacgacugcaagaucaugaccagcaagaccgacgugagcagcagcgugaucaccagccugggcgccaucgugagcugcuacggcaagaccaagugcaccgccagcaacaagaacaagggcaucaucaagaccuucagcaacggcugcgacuacgugagcaacaagggcguggacaccgugagcgugggcaacacccuguacuacgugaacaagcaggagggcaagagccuguacgugaagggcgagcccaucaucaacuucuacgacccccugguguuccccagcgacgaguucgacgccagcaucagccaggugaacgagaagaucaaccagagccuggccuucaucagaaagagcgacgagcugcugcacaacgugaacgccggcaagagcaccaccaacaucaugaucaccaccaucaucaucgugaucaucgugauccugcugagccugaucgccgugggccugcugcuguacugcaaggccagaagcacccccgugacccugagcaaggaccagcugagcggcaucaacaacaucgccuucagcaacugaggacuaguguccaccugucccuccugggcugcuggauugucucguuuuccugccaaauaaacaggaucagcgcuuuacagaucuaaaaaaaaaaaaaaaaaaaaaaaaaaaaaaaaaaaaaaaaaaaaaaaaaaaaaaaaaaaaaaaaugcaucccccccccccccccccccccccccccccccaaaggcucuuuucagagccaccagaauu

SEQ ID NO: 7144 - RNA, 1994 nt, Artificial Sequence
  mRNA product Design i-1 comprising derived and/or modified sequence from HRSV(A2)__F_DSCav1_mut7 (opt5)
gggagagggcgcuuggcuugcaaggacccugagcugcggcauugaagcacacccaacccaacucgacugaagucagccucacugaaccggaucugagaaucuucucucucugggcuugccagggcucuccgaaccuagcuagcauccucuucaauuccaacuagaaagcuuaccauggagcugcucauccugaaggccaacgcuauuaccacaauccuuacggccgugaccuucugcuuugcgagcggccagaauauuacagaagaguucuaccaauccaccuguucugcugucagcaaaggguaucuguccgcccucagaacaggaugguacaccucuguuaucacaauugaacugagcaacaucaaggagaauaaaugcaacggcaccgacgccaaggugaaacuuaucaagcaggaacuggauaaguauaaaaaugcugugacggagcuccagaugcugauguguuccacccccgccacagggucuggaagcgcuauugccuccggcgucgcggugugcaagguucugcaccucgagggggaagugaacaaaaucaagagcgcccugcuuucuaccaauaaagcugucgugucccugagcaacggaguuucugugcucacauuuaagguccuggaccuuaagaauuacauugauaaacagcugcucccuauccugaacaagcaauccuguagcauuucuaauaucgagaccgugauggaguuccagcagaaaaacaaucggcugcucgaaauuacgcgcgaguuuuccgugaacgccggcgucacaaccccgguuagcacauauaugcugaccaauuccgaacuucugucucucaucaacgacaugcccaucaccaacgaucagaagaaacugaugagcaauaacgugcaaauugugagacagcaguccuacagcaucaugugcauuaucaaggaggaaguccuugcuuaugugguucagcugccucucuacggcgugauugacacacccuguuggaaacugcauacgucuccucugugcaccacaaauaccaaggagggguccaacaucugucucacacggaccgaucgcggaugguacugcgacaaugccggcagcgucucuuucuuuccccaagcggaaacguguaaggugugcagcaacagaguuuucugcgauacaaugaacucccugacccuuccuucugaggugaaucuguguaaugucgacaucuuuaacccgaaauaugauugcaagauuaugaccagcaaaacagacguguccagcucugucaucaccucccucggggccauugugagcuguuacggaaagacaaaaugcacggcuucuaauaagaacaagggcaucauuaaaaccuucuccaaugggugugauuauguuagcaacaagggaguggacacagucuccgugggcaauacccuguacuauguuaacaaacaggagggcaagucucuuuacgugaaaggggaacccaucaucaacuuuuaugacccucuggucuuccccagcgaugaguuugacgccuccauuucucaggugaaugaaaagaucaaccaaagccucgcuuucauucggaaguccgaugagcugcugcacaaugugaacgccggaaaaagcacaaccaauaucaugauuacgaccaucauuaucguuaucauugucauccuccugucucuuauugccgugggccugcuccuguacugcaaggcucgcuccacaccugugacccugagcaaagaccagcuuucugggaucaacaauauugcguucuccaacugaggacuaguguccaccugucccuccugggcugcuggauugucucguuuuccugccaaauaaacaggaucagcgcuuuacagaucuaaaaaaaaaaaaaaaaaaaaaaaaaaaaaaaaaaaaaaaaaaaaaaaaaaaaaaaaaaaaaaaaugcaucccccccccccccccccccccccccccccccaaaggcucuuuucagagccaccagaauu

SEQ ID NO: 7145 - RNA, 1994 nt, Artificial Sequence
  mRNA product Design i-1 comprising derived and/or modified sequence from HRSV(A2)__F_DSCav1_mut7 (opt6)
gggagagggcgcuuggcuugcaaggacccugagcugcggcauugaagcacacccaacccaacucgacugaagucagccucacugaaccggaucugagaaucuucucucucugggcuugccagggcucuccgaaccuagcuagcauccucuucaauuccaacuagaaagcuuaccauggaauuacucauacucaaagcaaaugcaauuaccacuauacucacagcuguaacuuuuuguuucgccucaggacaaaacaucacagaagaauuuuaucaauccacaugcucugccguaucaaaaggcuaccuaucugcccuaagaacagguugguacacaucuguaauaacaaucgaauuauccaacaucaaagaaaacaaaugcaacggcacagacgcaaaagucaaacucaucaaacaagaauuagauaaauauaaaaacgcaguaacagaacuacaaaugcuaaugugcucuacacccgccacaggaucaggauccgcaaucgcuucuggaguagccguuugcaaaguauuacaccuagaaggagaaguaaauaaaauaaaauccgcacuacuaucaacuaauaaagcaguaguaucacuuucuaaugguguaucaguauuaacauucaaaguccucgaccuaaaaaauuacaucgacaaacaacuauuacccauccuuaauaaacaaucaugcuccauaucaaacauagaaacugucauggaauuucaacaaaaaaacaauagacuucuagaaaucacaagagaauuuucuguaaaugcaggaguaacuacaccaguaucaacauauauguuaaccaacuccgaacuacuaucacucauaaacgacaugccaauaacaaacgaccaaaaaaaacuaaugucaaauaacguucaaauaguaagacaacaaucauacucaaucaugugcauaauaaaagaagaaguuuuagcauacgucguacaacuuccccuauacggaguaauagacaccccuugcuggaaacuccacaccucaccacuaugcacuacaaacacaaaagaagguuccaacaucugcuuaacaagaaccgaucgaggaugguacugcgacaacgcugguuccguaucuuucuucccacaagcagaaacaugcaaaguaugcuccaauagaguauucugcgacaccaugaacucacuaacucuaccauccgaaguaaaccuaugcaacgucgacauauuuaauccaaaauaugacugcaaaauaaugacuucaaaaacagacguauccucaucaguaauaacauccuuaggagcaauaguaucauguuacggcaagacaaaauguacagccucaaacaaaaacaaagguaucauuaaaaccuucuccaacggcugcgacuacguaucaaauaaaggugucgauacaguaucaguaggaaacacacucuauuacguuaauaaacaagaaggaaagucauuauacguaaaaggagaaccaauaaucaauuucuacgauccccuagucuuucccucagaugaauuugacgcaagcaucucucaagucaacgaaaaaauaaaccaaucccuagccuucauaagaaaaucagaugaacuacuucauaacgucaacgccggaaaaucaacaaccaacauaaugaucacuacaaucauaauuguaauuauaguaauacuacuaucgcuaauugccguuggacuacuacuauauuguaaagcaagaucaacacccguuacucuauccaaagaucaauuaucaggaaucaacaacauagccuucucaaauuaaggacuaguguccaccugucccuccugggcugcuggauugucucguuuuccugccaaauaaacaggaucagcgcuuuacagaucuaaaaaaaaaaaaaaaaaaaaaaaaaaaaaaaaaaaaaaaaaaaaaaaaaaaaaaaaaaaaaaaaugcaucccccccccccccccccccccccccccccccaaaggcucuuuucagagccaccagaauu

SEQ ID NO: 7146 - RNA, 1994 nt, Artificial Sequence
  mRNA product Design i-1 comprising derived and/or modified sequence from HRSV(A2)__F_DSCav1_mut7 (opt11)
gggagagggcgcuuggcuugcaaggacccugagcugcggcauugaagcacacccaacccaacucgacugaagucagccucacugaaccggaucugagaaucuucucucucugggcuugccagggcucuccgaaccuagcuagcauccucuucaauuccaacuagaaagcuuaccauggaacuacucauacuuaaagccaacgcaauaaccacaauccucaccgccgucacauucugcuucgccucgggacaaaacauaaccgaagaauuuuaccagucuaccugcuccgccgucuccaaggguuaccucuccgcgcuccgcaccgggugguacaccagcguuaucaccaucgaacuaucuaacauaaaagaaaacaagugcaacggaaccgacgcaaaagucaaacucaucaaacaagaacuagacaaauacaagaaugccgucaccgaacuacaaaugcucaugugcuccacccccgccaccggauccggcuccgccauugccuccggcgucgccguaugcaaaguccuucacuuggaaggagaaguuaacaaaauaaaaagcgcccuccugucgaccaacaaagcgguggucagccucuccaacggcgucucuguccucaccuucaaaguccucgaccucaagaacuacauagauaaacaacuacuccccauccuaaacaaacagucaugcagcauauccaacaucgaaaccgucauggaguuccaacagaaaaacaaccgccuccuugaaaucacccgcgaguucucugucaacgccggcgucaccacccccgucuccaccuacaugcucacaaacuccgaacuccucagccucaucaacgacaugccaaucaccaacgaccaaaagaaacucauguccaacaacguacaaaucguucgucaacaaucauacucaaucaugugcaucauuaaagaagaaguccucgcauacgucguccaacucccccucuauggggucaucgacaccccaugcuggaaacuccacaccucuccccuaugcaccaccaacaccaaagaaggcuccaacaucugccuaacccgaaccgaccgcggaugguacugcgacaacgccggcuccgucuccuucuucccccaggccgaaacauguaaagucugcuccaaccguguguucugcgacaccaugaacucacuaacccuccccuccgaagucaaccucugcaacgucgacaucuucaacccgaaauacgacugcaaaauaaugaccagcaaaacagacguauccucuagcgucauuaccagccuaggugcaaucguguccugcuacggcaaaacaaaaugcaccgccuccaacaaaaauaaaggaaucauaaaaaccuucuccaacggcugcgacuacgucagcaacaaaggagucgacaccgucuccguaggaaauacucuauacuaugucaacaaacaagaggguaaaucccucuacgucaaaggcgaacccaucaucaacuucuacgacccccucgucuuccccucugacgaguucgacgccagcauaucacaaguaaacgaaaagaucaaccaaucccucgcauucauucgcaaauccgacgaacuccuacacaacgucaacgccggaaaauccaccaccaacaucaugaucacuacuaucauuaucgucaucaucgucauccuccucucccucaucgcagucggccuucuacucuacugcaaggcacgcucuacacccguaacccugucuaaagaccaacucuccggcaucaacaacaucgcuuucuccaacuaaggacuaguguccaccugucccuccugggcugcuggauugucucguuuuccugccaaauaaacaggaucagcgcuuuacagaucuaaaaaaaaaaaaaaaaaaaaaaaaaaaaaaaaaaaaaaaaaaaaaaaaaaaaaaaaaaaaaaaaugcaucccccccccccccccccccccccccccccccaaaggcucuuuucagagccaccagaauu

SEQ ID NO: 7147 - RNA, 1994 nt, Artificial Sequence
  mRNA product Design i-2 comprising derived and/or modified sequence from HRSV(A2)__F_DSCav1_mut7 (opt1)
gggagaggcgcugccuacggagguggcagccaucuccuucucggcaucaagcuuaccauggagcugcucauccugaaggccaacgccaucaccaccauccugacggcggugaccuucugcuucgccagcggccagaacaucaccgaggaguucuaccaguccacgugcagcgccgucuccaagggguaccucagcgcccugcggaccggcugguacaccuccgugaucaccaucgagcugagcaacaucaaggagaacaagugcaacgggaccgacgccaaggugaagcucaucaagcaggagcuggacaaguacaagaacgcggucacggagcugcagaugcugaugugcuccaccccggcaaccggcuccggcuccgccaucgcgagcggcgucgccgugugcaaggugcugcaccucgagggggaggucaacaagaucaagagcgcccugcuguccaccaacaaggccguggugagccucuccaacggcgucagcgugcugaccuucaaggugcuggaccucaagaacuacaucgacaagcagcugcugcccauccugaacaagcagagcugcuccaucagcaacaucgagacggugauggaguuccagcagaagaacaaccggcuccuggagaucacccgcgaguucagcgugaacgccggggucaccacccccguguccacguacaugcugaccaacagcgagcuccugucccugaucaacgacaugccgaucaccaacgaccagaagaagcucaugagcaacaacgugcagaucguccggcagcaguccuacagcaucaugugcaucaucaaggaggaggugcuggcguacgugguccagcugccccucuacggcgugaucgacacccccugcuggaagcugcacacgagcccccugugcaccaccaacaccaaggagggguccaacaucugccucacgcgcaccgaccggggcugguacugcgacaacgccggcagcgucuccuucuucccgcaggccgagaccugcaaggugugcagcaaccgcguguucugcgacaccaugaacucccugacgcugcccagcgagguaaaccucugcaacgucgacaucuucaaccccaaguacgacugcaagaucaugaccuccaagaccgacgugagcuccagcgugaucaccucccugggggccaucgucagcugcuacggcaagacgaagugcaccgccagcaacaagaacaaggggaucaucaagaccuucuccaacggcugcgacuacgugagcaacaagggcguggacaccguguccgucgggaacacccuguacuacgugaacaagcaggagggcaagagccucuacgugaagggggagcccaucaucaacuucuacgacccgcuggucuuccccuccgacgaguucgacgcgagcaucucccaggugaacgagaagaucaaccagagccuggccuucauccgcaaguccgacgagcugcuccacaacgugaacgccggcaagagcacgaccaacaucaugaucaccaccaucaucaucgucaucaucgugauccugcugucccucaucgccguggggcugcugcucuacugcaaggcccggagcacgcccgucacccuguccaaggaccagcugagcggcaucaacaacaucgcguucuccaacugaggacuagugcaucacauuuaaaagcaucucagccuaccaugagaauaagagaaagaaaaugaagaucaauagcuuauucaucucuuuuucuuuuucguugguguaaagccaacacccugucuaaaaaacauaaauuucuuuaaucauuuugccucuuuucucugugcuucaauuaauaaaaaauggaaagaaccuagaucuaaaaaaaaaaaaaaaaaaaaaaaaaaaaaaaaaaaaaaaaaaaaaaaaaaaaaaaaaaaaaaaaugcaucccccccccccccccccccccccccccccccaaaggcucuuuucagagccaccagaauu

SEQ ID NO: 7148 - RNA, 1994 nt, Artificial Sequence
  mRNA product Design i-2 comprising derived and/or modified sequence from HRSV(A2)__F_DSCav1_mut7 (opt1)
gggagaggcgcugccuacggagguggcagccaucuccuucucggcaucaagcuuaccauggagcugcucauccugaaggccaacgccaucaccaccauccugacggcggugaccuucugcuucgccagcggccagaacaucaccgaggaguucuaccaguccacgugcagcgccgucuccaagggguaccucagcgcccugcgcaccggcugguacaccuccgugaucaccaucgagcugagcaacaucaaggagaacaagugcaacgggaccgacgccaaggugaagcucaucaagcaggagcuggacaaguacaagaacgcggucacggagcugcagaugcucaugugcuccacccccgccaccggcagcggguccgccaucgccagcggcguggcggugugcaagguccugcaccuggagggcgaggugaacaagaucaaguccgcccuccugagcaccaacaaggccguggucucccugagcaacgggguguccgugcucacguucaagguccuggaccugaagaacuacaucgacaagcagcuccugccgauccugaacaagcagagcugcuccaucagcaacaucgagaccgugauggaguuccagcagaagaacaaccggcuccuggagaucacccgcgaguucuccgugaacgccggcgucaccacgcccgugagcaccuacaugcugaccaacagcgagcuccugucccugaucaacgacaugcccaucaccaacgaccagaagaagcucaugagcaacaacgugcagaucguccggcagcaguccuacagcaucaugugcaucaucaaggaggaggugcuggccuacgugguccagcugccccucuacggggugaucgacacgccgugcuggaagcugcacaccagcccccugugcaccaccaacacgaaggagggcagcaacaucugccucacccgcaccgaccgggggugguacugcgacaacgcgggcuccgugagcuucuucccccaggccgagaccugcaaggucugcuccaaccgcguguucugcgacacgaugaacagccugacccugcccuccgaggucaaccucugcaacguggacaucuucaacccgaaguacgacugcaagaucaugaccagcaagaccgacguguccagcuccgucaucacgagccugggcgccaucguguccugcuacgggaagaccaagugcaccgccagcaacaagaacaagggcaucaucaagaccuucuccaacgggugcgacuacgugagcaacaagggcgucgacacggugagcgugggcaacacccuguacuacgucaacaagcaggaggggaagucccucuacgugaagggcgagcccaucaucaacuucuacgacccccugguguuccccagcgacgaguucgacgccuccaucagccaggucaacgagaagaucaaccagucccuggcguucauccggaaguccgacgagcuccugcacaacgugaacgccgggaaguccaccaccaacaucaugaucaccacgaucaucaucgugaucaucgucauccugcucagccugaucgccgugggccugcuccuguacugcaaggcccgcuccaccccggugacccugagcaaggaccagcuguccgggaucaacaacaucgccuucagcaacugaggacuagugcaucacauuuaaaagcaucucagccuaccaugagaauaagagaaagaaaaugaagaucaauagcuuauucaucucuuuuucuuuuucguugguguaaagccaacacccugucuaaaaaacauaaauuucuuuaaucauuuugccucuuuucucugugcuucaauuaauaaaaaauggaaagaaccuagaucuaaaaaaaaaaaaaaaaaaaaaaaaaaaaaaaaaaaaaaaaaaaaaaaaaaaaaaaaaaaaaaaaugcaucccccccccccccccccccccccccccccccaaaggcucuuuucagagccaccagaauu

SEQ ID NO: 7149 - RNA, 1994 nt, Artificial Sequence
  mRNA product Design i-2 comprising derived and/or modified sequence from HRSV(A2)__F_DSCav1_mut7 (opt2)
gggagaggcgcugccuacggagguggcagccaucuccuucucggcaucaagcuuaccauggagcuccucauccucaaggccaacgccaucaccaccauccucaccgccgucaccuucugcuucgccuccggccagaacaucaccgaggaguucuaccaguccaccugcuccgccgucuccaagggcuaccucuccgcccuccgcaccggcugguacaccuccgucaucaccaucgagcucuccaacaucaaggagaacaagugcaacggcaccgacgccaaggucaagcucaucaagcaggagcucgacaaguacaagaacgccgucaccgagcuccagaugcucaugugcuccacccccgccaccggcuccggcuccgccaucgccuccggcgucgccgucugcaagguccuccaccucgagggcgaggucaacaagaucaaguccgcccuccucuccaccaacaaggccgucgucucccucuccaacggcgucuccguccucaccuucaagguccucgaccucaagaacuacaucgacaagcagcuccuccccauccucaacaagcaguccugcuccaucuccaacaucgagaccgucauggaguuccagcagaagaacaaccgccuccucgagaucacccgcgaguucuccgucaacgccggcgucaccacccccgucuccaccuacaugcucaccaacuccgagcuccucucccucaucaacgacaugcccaucaccaacgaccagaagaagcucauguccaacaacguccagaucguccgccagcaguccuacuccaucaugugcaucaucaaggaggagguccucgccuacgucguccagcucccccucuacggcgucaucgacacccccugcuggaagcuccacaccuccccccucugcaccaccaacaccaaggagggcuccaacaucugccucacccgcaccgaccgcggcugguacugcgacaacgccggcuccgucuccuucuucccccaggccgagaccugcaaggucugcuccaaccgcgucuucugcgacaccaugaacucccucacccuccccuccgaggucaaccucugcaacgucgacaucuucaaccccaaguacgacugcaagaucaugaccuccaagaccgacgucuccuccuccgucaucaccucccucggcgccaucgucuccugcuacggcaagaccaagugcaccgccuccaacaagaacaagggcaucaucaagaccuucuccaacggcugcgacuacgucuccaacaagggcgucgacaccgucuccgucggcaacacccucuacuacgucaacaagcaggagggcaagucccucuacgucaagggcgagcccaucaucaacuucuacgacccccucgucuuccccuccgacgaguucgacgccuccaucucccaggucaacgagaagaucaaccagucccucgccuucauccgcaaguccgacgagcuccuccacaacgucaacgccggcaaguccaccaccaacaucaugaucaccaccaucaucaucgucaucaucgucauccuccucucccucaucgccgucggccuccuccucuacugcaaggcccgcuccacccccgucacccucuccaaggaccagcucuccggcaucaacaacaucgccuucuccaacugaggacuagugcaucacauuuaaaagcaucucagccuaccaugagaauaagagaaagaaaaugaagaucaauagcuuauucaucucuuuuucuuuuucguugguguaaagccaacacccugucuaaaaaacauaaauuucuuuaaucauuuugccucuuuucucugugcuucaauuaauaaaaaauggaaagaaccuagaucuaaaaaaaaaaaaaaaaaaaaaaaaaaaaaaaaaaaaaaaaaaaaaaaaaaaaaaaaaaaaaaaaugcaucccccccccccccccccccccccccccccccaaaggcucuuuucagagccaccagaauu

SEQ ID NO: 7150 - RNA, 1994 nt, Artificial Sequence
  mRNA product Design i-2 comprising derived and/or modified sequence from HRSV(A2)__F_DSCav1_mut7 (opt3)
gggagaggcgcugccuacggagguggcagccaucuccuucucggcaucaagcuuaccauggagcugcucauccuuaaggccaacgcuauuaccacaauacugacugcagugacguucugcuuugccagcggccagaauaucaccgaagaguucuaccaauccacauguucugcggucucaaaaggguauuugagugcuuuaagaacuggaugguacaccagcguuauuacaaucgaacuguccaacauuaaggagaauaaaugcaacgguaccgacgccaaggugaaacuaaucaagcaggaacucgauaaguauaaaaaugcaguaacugagcugcagaugcuuauguguucuacacccgccaccggcucggggucagcuauagcaagcggaguggccgucugcaaggugcugcacuuggagggcgaaguuaacaaaaucaagagugcucuccuguccacgaauaaagccguggucucucugagcaacgguguguccguacucacuuuuaagguuuuagaccugaagaauuacauugauaaacagcuuuugccuauccugaacaagcaaucauguaguauuagcaauaucgagaccgugauggaguuccagcagaaaaacaauaggcuacucgaaauaacacgggaguuuucugucaacgcgggggugacuaccccaguguccacauauaugcugaccaauucagaacuucugagcuugauuaacgacaugccgaucacgaacgaucagaagaaacucaugaguaauaacguccaaauuguucgccagcagucuuacuccaucaugugcaucauuaaggaggaagugcuggcauauguagugcaguuaccccuguacggagucauagacacuccuuguuggaaacuccauacaagcccacuuugcaccacuaauacaaaggagggcucgaacaucugucugacccgaacggaucguggcugguacugcgacaaugccgggucuguguccuucuuuccccaagcugaaaccuguaagguuugcucaaacagaguguucugcgauacaaugaauaguuugacucuaccuagcgaggucaaccuguguaauguggacauuuuuaacccaaaauaugauugcaagaucaugaccuccaaaacagacguaucuagcucaguuauaacuagccucggagccauuguguccuguuacgguaagaccaaaugcacagcaagcaauaagaacaagggcaucaucaaaaccuucucuaaugggugugauuaugucucaaacaagggaguggacacugucagugugggcaauacgcuguacuauguuaacaaacaggaggguaagagccuuuacgugaaaggggaacccauuaucaacuuuuaugacccucugguauucccauccgaugaguuugacgcuucuauuucgcaggucaaugaaaagauaaaccaaaguuuggccuucaucaggaaguccgaugagcuccugcacaaugugaacgcgggaaaaucaacaaccaauauuaugaucacuaccaucauuauaguuaucauugugaucuuacugagucuaauugccgucggccuccugcuuuacugcaaggcacggucuacaccggugaccuugagcaaagaccagcuguccggcaucaacaauauagcuuucucaaacugaggacuagugcaucacauuuaaaagcaucucagccuaccaugagaauaagagaaagaaaaugaagaucaauagcuuauucaucucuuuuucuuuuucguugguguaaagccaacacccugucuaaaaaacauaaauuucuuuaaucauuuugccucuuuucucugugcuucaauuaauaaaaaauggaaagaaccuagaucuaaaaaaaaaaaaaaaaaaaaaaaaaaaaaaaaaaaaaaaaaaaaaaaaaaaaaaaaaaaaaaaaugcaucccccccccccccccccccccccccccccccaaaggcucuuuucagagccaccagaauu

SEQ ID NO: 7151 - RNA, 1994 nt, Artificial Sequence
  mRNA product Design i-2 comprising derived and/or modified sequence from HRSV(A2)__F_DSCav1_mut7 (opt4)
gggagaggcgcugccuacggagguggcagccaucuccuucucggcaucaagcuuaccauggagcugcugauccugaaggccaacgccaucaccaccauccugaccgccgugaccuucugcuucgccagcggccagaacaucaccgaggaguucuaccagagcaccugcagcgccgugagcaagggcuaccugagcgcccugagaaccggcugguacaccagcgugaucaccaucgagcugagcaacaucaaggagaacaagugcaacggcaccgacgccaaggugaagcugaucaagcaggagcuggacaaguacaagaacgccgugaccgagcugcagaugcugaugugcagcacccccgccaccggcagcggcagcgccaucgccagcggcguggccgugugcaaggugcugcaccuggagggcgaggugaacaagaucaagagcgcccugcugagcaccaacaaggccguggugagccugagcaacggcgugagcgugcugaccuucaaggugcuggaccugaagaacuacaucgacaagcagcugcugcccauccugaacaagcagagcugcagcaucagcaacaucgagaccgugauggaguuccagcagaagaacaacagacugcuggagaucaccagagaguucagcgugaacgccggcgugaccacccccgugagcaccuacaugcugaccaacagcgagcugcugagccugaucaacgacaugcccaucaccaacgaccagaagaagcugaugagcaacaacgugcagaucgugagacagcagagcuacagcaucaugugcaucaucaaggaggaggugcuggccuacguggugcagcugccccuguacggcgugaucgacacccccugcuggaagcugcacaccagcccccugugcaccaccaacaccaaggagggcagcaacaucugccugaccagaaccgacagaggcugguacugcgacaacgccggcagcgugagcuucuucccccaggccgagaccugcaaggugugcagcaacagaguguucugcgacaccaugaacagccugacccugcccagcgaggugaaccugugcaacguggacaucuucaaccccaaguacgacugcaagaucaugaccagcaagaccgacgugagcagcagcgugaucaccagccugggcgccaucgugagcugcuacggcaagaccaagugcaccgccagcaacaagaacaagggcaucaucaagaccuucagcaacggcugcgacuacgugagcaacaagggcguggacaccgugagcgugggcaacacccuguacuacgugaacaagcaggagggcaagagccuguacgugaagggcgagcccaucaucaacuucuacgacccccugguguuccccagcgacgaguucgacgccagcaucagccaggugaacgagaagaucaaccagagccuggccuucaucagaaagagcgacgagcugcugcacaacgugaacgccggcaagagcaccaccaacaucaugaucaccaccaucaucaucgugaucaucgugauccugcugagccugaucgccgugggccugcugcuguacugcaaggccagaagcacccccgugacccugagcaaggaccagcugagcggcaucaacaacaucgccuucagcaacugaggacuagugcaucacauuuaaaagcaucucagccuaccaugagaauaagagaaagaaaaugaagaucaauagcuuauucaucucuuuuucuuuuucguugguguaaagccaacacccugucuaaaaaacauaaauuucuuuaaucauuuugccucuuuucucugugcuucaauuaauaaaaaauggaaagaaccuagaucuaaaaaaaaaaaaaaaaaaaaaaaaaaaaaaaaaaaaaaaaaaaaaaaaaaaaaaaaaaaaaaaaugcaucccccccccccccccccccccccccccccccaaaggcucuuuucagagccaccagaauu

SEQ ID NO: 7152 - RNA, 1994 nt, Artificial Sequence
  mRNA product Design i-2 comprising derived and/or modified sequence from HRSV(A2)__F_DSCav1_mut7 (opt5)
gggagaggcgcugccuacggagguggcagccaucuccuucucggcaucaagcuuaccauggagcugcucauccugaaggccaacgcuauuaccacaauccuuacggccgugaccuucugcuuugcgagcggccagaauauuacagaagaguucuaccaauccaccuguucugcugucagcaaaggguaucuguccgcccucagaacaggaugguacaccucuguuaucacaauugaacugagcaacaucaaggagaauaaaugcaacggcaccgacgccaaggugaaacuuaucaagcaggaacuggauaaguauaaaaaugcugugacggagcuccagaugcugauguguuccacccccgccacagggucuggaagcgcuauugccuccggcgucgcggugugcaagguucugcaccucgagggggaagugaacaaaaucaagagcgcccugcuuucuaccaauaaagcugucgugucccugagcaacggaguuucugugcucacauuuaagguccuggaccuuaagaauuacauugauaaacagcugcucccuauccugaacaagcaauccuguagcauuucuaauaucgagaccgugauggaguuccagcagaaaaacaaucggcugcucgaaauuacgcgcgaguuuuccgugaacgccggcgucacaaccccgguuagcacauauaugcugaccaauuccgaacuucugucucucaucaacgacaugcccaucaccaacgaucagaagaaacugaugagcaauaacgugcaaauugugagacagcaguccuacagcaucaugugcauuaucaaggaggaaguccuugcuuaugugguucagcugccucucuacggcgugauugacacacccuguuggaaacugcauacgucuccucugugcaccacaaauaccaaggagggguccaacaucugucucacacggaccgaucgcggaugguacugcgacaaugccggcagcgucucuuucuuuccccaagcggaaacguguaaggugugcagcaacagaguuuucugcgauacaaugaacucccugacccuuccuucugaggugaaucuguguaaugucgacaucuuuaacccgaaauaugauugcaagauuaugaccagcaaaacagacguguccagcucugucaucaccucccucggggccauugugagcuguuacggaaagacaaaaugcacggcuucuaauaagaacaagggcaucauuaaaaccuucuccaaugggugugauuauguuagcaacaagggaguggacacagucuccgugggcaauacccuguacuauguuaacaaacaggagggcaagucucuuuacgugaaaggggaacccaucaucaacuuuuaugacccucuggucuuccccagcgaugaguuugacgccuccauuucucaggugaaugaaaagaucaaccaaagccucgcuuucauucggaaguccgaugagcugcugcacaaugugaacgccggaaaaagcacaaccaauaucaugauuacgaccaucauuaucguuaucauugucauccuccugucucuuauugccgugggccugcuccuguacugcaaggcucgcuccacaccugugacccugagcaaagaccagcuuucugggaucaacaauauugcguucuccaacugaggacuagugcaucacauuuaaaagcaucucagccuaccaugagaauaagagaaagaaaaugaagaucaauagcuuauucaucucuuuuucuuuuucguugguguaaagccaacacccugucuaaaaaacauaaauuucuuuaaucauuuugccucuuuucucugugcuucaauuaauaaaaaauggaaagaaccuagaucuaaaaaaaaaaaaaaaaaaaaaaaaaaaaaaaaaaaaaaaaaaaaaaaaaaaaaaaaaaaaaaaaugcaucccccccccccccccccccccccccccccccaaaggcucuuuucagagccaccagaauu

SEQ ID NO: 7153 - RNA, 1994 nt, Artificial Sequence
  mRNA product Design i-2 comprising derived and/or modified sequence from HRSV(A2)__F_DSCav1_mut7 (opt6)
gggagaggcgcugccuacggagguggcagccaucuccuucucggcaucaagcuuaccauggaauuacucauacucaaagcaaaugcaauuaccacuauacucacagcuguaacuuuuuguuucgccucaggacaaaacaucacagaagaauuuuaucaauccacaugcucugccguaucaaaaggcuaccuaucugcccuaagaacagguugguacacaucuguaauaacaaucgaauuauccaacaucaaagaaaacaaaugcaacggcacagacgcaaaagucaaacucaucaaacaagaauuagauaaauauaaaaacgcaguaacagaacuacaaaugcuaaugugcucuacacccgccacaggaucaggauccgcaaucgcuucuggaguagccguuugcaaaguauuacaccuagaaggagaaguaaauaaaauaaaauccgcacuacuaucaacuaauaaagcaguaguaucacuuucuaaugguguaucaguauuaacauucaaaguccucgaccuaaaaaauuacaucgacaaacaacuauuacccauccuuaauaaacaaucaugcuccauaucaaacauagaaacugucauggaauuucaacaaaaaaacaauagacuucuagaaaucacaagagaauuuucuguaaaugcaggaguaacuacaccaguaucaacauauauguuaaccaacuccgaacuacuaucacucauaaacgacaugccaauaacaaacgaccaaaaaaaacuaaugucaaauaacguucaaauaguaagacaacaaucauacucaaucaugugcauaauaaaagaagaaguuuuagcauacgucguacaacuuccccuauacggaguaauagacaccccuugcuggaaacuccacaccucaccacuaugcacuacaaacacaaaagaagguuccaacaucugcuuaacaagaaccgaucgaggaugguacugcgacaacgcugguuccguaucuuucuucccacaagcagaaacaugcaaaguaugcuccaauagaguauucugcgacaccaugaacucacuaacucuaccauccgaaguaaaccuaugcaacgucgacauauuuaauccaaaauaugacugcaaaauaaugacuucaaaaacagacguauccucaucaguaauaacauccuuaggagcaauaguaucauguuacggcaagacaaaauguacagccucaaacaaaaacaaagguaucauuaaaaccuucuccaacggcugcgacuacguaucaaauaaaggugucgauacaguaucaguaggaaacacacucuauuacguuaauaaacaagaaggaaagucauuauacguaaaaggagaaccaauaaucaauuucuacgauccccuagucuuucccucagaugaauuugacgcaagcaucucucaagucaacgaaaaaauaaaccaaucccuagccuucauaagaaaaucagaugaacuacuucauaacgucaacgccggaaaaucaacaaccaacauaaugaucacuacaaucauaauuguaauuauaguaauacuacuaucgcuaauugccguuggacuacuacuauauuguaaagcaagaucaacacccguuacucuauccaaagaucaauuaucaggaaucaacaacauagccuucucaaauuaaggacuagugcaucacauuuaaaagcaucucagccuaccaugagaauaagagaaagaaaaugaagaucaauagcuuauucaucucuuuuucuuuuucguugguguaaagccaacacccugucuaaaaaacauaaauuucuuuaaucauuuugccucuuuucucugugcuucaauuaauaaaaaauggaaagaaccuagaucuaaaaaaaaaaaaaaaaaaaaaaaaaaaaaaaaaaaaaaaaaaaaaaaaaaaaaaaaaaaaaaaaugcaucccccccccccccccccccccccccccccccaaaggcucuuuucagagccaccagaauu

SEQ ID NO: 7154 - RNA, 1994 nt, Artificial Sequence
  mRNA product Design i-2 comprising derived and/or modified sequence from HRSV(A2)__F_DSCav1_mut7 (opt11)
gggagaggcgcugccuacggagguggcagccaucuccuucucggcaucaagcuuaccauggaacuacucauacuuaaagccaacgcaauaaccacaauccucaccgccgucacauucugcuucgccucgggacaaaacauaaccgaagaauuuuaccagucuaccugcuccgccgucuccaaggguuaccucuccgcgcuccgcaccgggugguacaccagcguuaucaccaucgaacuaucuaacauaaaagaaaacaagugcaacggaaccgacgcaaaagucaaacucaucaaacaagaacuagacaaauacaagaaugccgucaccgaacuacaaaugcucaugugcuccacccccgccaccggauccggcuccgccauugccuccggcgucgccguaugcaaaguccuucacuuggaaggagaaguuaacaaaauaaaaagcgcccuccugucgaccaacaaagcgguggucagccucuccaacggcgucucuguccucaccuucaaaguccucgaccucaagaacuacauagauaaacaacuacuccccauccuaaacaaacagucaugcagcauauccaacaucgaaaccgucauggaguuccaacagaaaaacaaccgccuccuugaaaucacccgcgaguucucugucaacgccggcgucaccacccccgucuccaccuacaugcucacaaacuccgaacuccucagccucaucaacgacaugccaaucaccaacgaccaaaagaaacucauguccaacaacguacaaaucguucgucaacaaucauacucaaucaugugcaucauuaaagaagaaguccucgcauacgucguccaacucccccucuauggggucaucgacaccccaugcuggaaacuccacaccucuccccuaugcaccaccaacaccaaagaaggcuccaacaucugccuaacccgaaccgaccgcggaugguacugcgacaacgccggcuccgucuccuucuucccccaggccgaaacauguaaagucugcuccaaccguguguucugcgacaccaugaacucacuaacccuccccuccgaagucaaccucugcaacgucgacaucuucaacccgaaauacgacugcaaaauaaugaccagcaaaacagacguauccucuagcgucauuaccagccuaggugcaaucguguccugcuacggcaaaacaaaaugcaccgccuccaacaaaaauaaaggaaucauaaaaaccuucuccaacggcugcgacuacgucagcaacaaaggagucgacaccgucuccguaggaaauacucuauacuaugucaacaaacaagaggguaaaucccucuacgucaaaggcgaacccaucaucaacuucuacgacccccucgucuuccccucugacgaguucgacgccagcauaucacaaguaaacgaaaagaucaaccaaucccucgcauucauucgcaaauccgacgaacuccuacacaacgucaacgccggaaaauccaccaccaacaucaugaucacuacuaucauuaucgucaucaucgucauccuccucucccucaucgcagucggccuucuacucuacugcaaggcacgcucuacacccguaacccugucuaaagaccaacucuccggcaucaacaacaucgcuuucuccaacuaaggacuagugcaucacauuuaaaagcaucucagccuaccaugagaauaagagaaagaaaaugaagaucaauagcuuauucaucucuuuuucuuuuucguugguguaaagccaacacccugucuaaaaaacauaaauuucuuuaaucauuuugccucuuuucucugugcuucaauuaauaaaaaauggaaagaaccuagaucuaaaaaaaaaaaaaaaaaaaaaaaaaaaaaaaaaaaaaaaaaaaaaaaaaaaaaaaaaaaaaaaaugcaucccccccccccccccccccccccccccccccaaaggcucuuuucagagccaccagaauu

SEQ ID NO: 7155 - RNA, 1990 nt, Artificial Sequence
  mRNA product Design i-2 comprising derived and/or modified sequence from HRSV(A2)__F_DSCav1_mut7 (opt1)
ggggcgcugccuacggagguggcagccaucuccuucucggcaucaagcuuaccauggagcugcucauccugaaggccaacgccaucaccaccauccugacggcggugaccuucugcuucgccagcggccagaacaucaccgaggaguucuaccaguccacgugcagcgccgucuccaagggguaccucagcgcccugcggaccggcugguacaccuccgugaucaccaucgagcugagcaacaucaaggagaacaagugcaacgggaccgacgccaaggugaagcucaucaagcaggagcuggacaaguacaagaacgcggucacggagcugcagaugcugaugugcuccaccccggcaaccggcuccggcuccgccaucgcgagcggcgucgccgugugcaaggugcugcaccucgagggggaggucaacaagaucaagagcgcccugcuguccaccaacaaggccguggugagccucuccaacggcgucagcgugcugaccuucaaggugcuggaccucaagaacuacaucgacaagcagcugcugcccauccugaacaagcagagcugcuccaucagcaacaucgagacggugauggaguuccagcagaagaacaaccggcuccuggagaucacccgcgaguucagcgugaacgccggggucaccacccccguguccacguacaugcugaccaacagcgagcuccugucccugaucaacgacaugccgaucaccaacgaccagaagaagcucaugagcaacaacgugcagaucguccggcagcaguccuacagcaucaugugcaucaucaaggaggaggugcuggcguacgugguccagcugccccucuacggcgugaucgacacccccugcuggaagcugcacacgagcccccugugcaccaccaacaccaaggagggguccaacaucugccucacgcgcaccgaccggggcugguacugcgacaacgccggcagcgucuccuucuucccgcaggccgagaccugcaaggugugcagcaaccgcguguucugcgacaccaugaacucccugacgcugcccagcgagguaaaccucugcaacgucgacaucuucaaccccaaguacgacugcaagaucaugaccuccaagaccgacgugagcuccagcgugaucaccucccugggggccaucgucagcugcuacggcaagacgaagugcaccgccagcaacaagaacaaggggaucaucaagaccuucuccaacggcugcgacuacgugagcaacaagggcguggacaccguguccgucgggaacacccuguacuacgugaacaagcaggagggcaagagccucuacgugaagggggagcccaucaucaacuucuacgacccgcuggucuuccccuccgacgaguucgacgcgagcaucucccaggugaacgagaagaucaaccagagccuggccuucauccgcaaguccgacgagcugcuccacaacgugaacgccggcaagagcacgaccaacaucaugaucaccaccaucaucaucgucaucaucgugauccugcugucccucaucgccguggggcugcugcucuacugcaaggcccggagcacgcccgucacccuguccaaggaccagcugagcggcaucaacaacaucgcguucuccaacugaggacuagugcaucacauuuaaaagcaucucagccuaccaugagaauaagagaaagaaaaugaagaucaauagcuuauucaucucuuuuucuuuuucguugguguaaagccaacacccugucuaaaaaacauaaauuucuuuaaucauuuugccucuuuucucugugcuucaauuaauaaaaaauggaaagaaccuagaucuaaaaaaaaaaaaaaaaaaaaaaaaaaaaaaaaaaaaaaaaaaaaaaaaaaaaaaaaaaaaaaaaugcaucccccccccccccccccccccccccccccccaaaggcucuuuucagagccaccagaauu

SEQ ID NO: 7156 - RNA, 1990 nt, Artificial Sequence
  mRNA product Design i-2 comprising derived and/or modified sequence from HRSV(A2)__F_DSCav1_mut7 (opt1)
ggggcgcugccuacggagguggcagccaucuccuucucggcaucaagcuuaccauggagcugcucauccugaaggccaacgccaucaccaccauccugacggcggugaccuucugcuucgccagcggccagaacaucaccgaggaguucuaccaguccacgugcagcgccgucuccaagggguaccucagcgcccugcgcaccggcugguacaccuccgugaucaccaucgagcugagcaacaucaaggagaacaagugcaacgggaccgacgccaaggugaagcucaucaagcaggagcuggacaaguacaagaacgcggucacggagcugcagaugcucaugugcuccacccccgccaccggcagcggguccgccaucgccagcggcguggcggugugcaagguccugcaccuggagggcgaggugaacaagaucaaguccgcccuccugagcaccaacaaggccguggucucccugagcaacgggguguccgugcucacguucaagguccuggaccugaagaacuacaucgacaagcagcuccugccgauccugaacaagcagagcugcuccaucagcaacaucgagaccgugauggaguuccagcagaagaacaaccggcuccuggagaucacccgcgaguucuccgugaacgccggcgucaccacgcccgugagcaccuacaugcugaccaacagcgagcuccugucccugaucaacgacaugcccaucaccaacgaccagaagaagcucaugagcaacaacgugcagaucguccggcagcaguccuacagcaucaugugcaucaucaaggaggaggugcuggccuacgugguccagcugccccucuacggggugaucgacacgccgugcuggaagcugcacaccagcccccugugcaccaccaacacgaaggagggcagcaacaucugccucacccgcaccgaccgggggugguacugcgacaacgcgggcuccgugagcuucuucccccaggccgagaccugcaaggucugcuccaaccgcguguucugcgacacgaugaacagccugacccugcccuccgaggucaaccucugcaacguggacaucuucaacccgaaguacgacugcaagaucaugaccagcaagaccgacguguccagcuccgucaucacgagccugggcgccaucguguccugcuacgggaagaccaagugcaccgccagcaacaagaacaagggcaucaucaagaccuucuccaacgggugcgacuacgugagcaacaagggcgucgacacggugagcgugggcaacacccuguacuacgucaacaagcaggaggggaagucccucuacgugaagggcgagcccaucaucaacuucuacgacccccugguguuccccagcgacgaguucgacgccuccaucagccaggucaacgagaagaucaaccagucccuggcguucauccggaaguccgacgagcuccugcacaacgugaacgccgggaaguccaccaccaacaucaugaucaccacgaucaucaucgugaucaucgucauccugcucagccugaucgccgugggccugcuccuguacugcaaggcccgcuccaccccggugacccugagcaaggaccagcuguccgggaucaacaacaucgccuucagcaacugaggacuagugcaucacauuuaaaagcaucucagccuaccaugagaauaagagaaagaaaaugaagaucaauagcuuauucaucucuuuuucuuuuucguugguguaaagccaacacccugucuaaaaaacauaaauuucuuuaaucauuuugccucuuuucucugugcuucaauuaauaaaaaauggaaagaaccuagaucuaaaaaaaaaaaaaaaaaaaaaaaaaaaaaaaaaaaaaaaaaaaaaaaaaaaaaaaaaaaaaaaaugcaucccccccccccccccccccccccccccccccaaaggcucuuuucagagccaccagaauu

SEQ ID NO: 7157 - RNA, 1990 nt, Artificial Sequence
  mRNA product Design i-2 comprising derived and/or modified sequence from HRSV(A2)__F_DSCav1_mut7 (opt2)
ggggcgcugccuacggagguggcagccaucuccuucucggcaucaagcuuaccauggagcuccucauccucaaggccaacgccaucaccaccauccucaccgccgucaccuucugcuucgccuccggccagaacaucaccgaggaguucuaccaguccaccugcuccgccgucuccaagggcuaccucuccgcccuccgcaccggcugguacaccuccgucaucaccaucgagcucuccaacaucaaggagaacaagugcaacggcaccgacgccaaggucaagcucaucaagcaggagcucgacaaguacaagaacgccgucaccgagcuccagaugcucaugugcuccacccccgccaccggcuccggcuccgccaucgccuccggcgucgccgucugcaagguccuccaccucgagggcgaggucaacaagaucaaguccgcccuccucuccaccaacaaggccgucgucucccucuccaacggcgucuccguccucaccuucaagguccucgaccucaagaacuacaucgacaagcagcuccuccccauccucaacaagcaguccugcuccaucuccaacaucgagaccgucauggaguuccagcagaagaacaaccgccuccucgagaucacccgcgaguucuccgucaacgccggcgucaccacccccgucuccaccuacaugcucaccaacuccgagcuccucucccucaucaacgacaugcccaucaccaacgaccagaagaagcucauguccaacaacguccagaucguccgccagcaguccuacuccaucaugugcaucaucaaggaggagguccucgccuacgucguccagcucccccucuacggcgucaucgacacccccugcuggaagcuccacaccuccccccucugcaccaccaacaccaaggagggcuccaacaucugccucacccgcaccgaccgcggcugguacugcgacaacgccggcuccgucuccuucuucccccaggccgagaccugcaaggucugcuccaaccgcgucuucugcgacaccaugaacucccucacccuccccuccgaggucaaccucugcaacgucgacaucuucaaccccaaguacgacugcaagaucaugaccuccaagaccgacgucuccuccuccgucaucaccucccucggcgccaucgucuccugcuacggcaagaccaagugcaccgccuccaacaagaacaagggcaucaucaagaccuucuccaacggcugcgacuacgucuccaacaagggcgucgacaccgucuccgucggcaacacccucuacuacgucaacaagcaggagggcaagucccucuacgucaagggcgagcccaucaucaacuucuacgacccccucgucuuccccuccgacgaguucgacgccuccaucucccaggucaacgagaagaucaaccagucccucgccuucauccgcaaguccgacgagcuccuccacaacgucaacgccggcaaguccaccaccaacaucaugaucaccaccaucaucaucgucaucaucgucauccuccucucccucaucgccgucggccuccuccucuacugcaaggcccgcuccacccccgucacccucuccaaggaccagcucuccggcaucaacaacaucgccuucuccaacugaggacuagugcaucacauuuaaaagcaucucagccuaccaugagaauaagagaaagaaaaugaagaucaauagcuuauucaucucuuuuucuuuuucguugguguaaagccaacacccugucuaaaaaacauaaauuucuuuaaucauuuugccucuuuucucugugcuucaauuaauaaaaaauggaaagaaccuagaucuaaaaaaaaaaaaaaaaaaaaaaaaaaaaaaaaaaaaaaaaaaaaaaaaaaaaaaaaaaaaaaaaugcaucccccccccccccccccccccccccccccccaaaggcucuuuucagagccaccagaauu

SEQ ID NO: 7158 - RNA, 1990 nt, Artificial Sequence
  mRNA product Design i-2 comprising derived and/or modified sequence from HRSV(A2)__F_DSCav1_mut7 (opt3)
ggggcgcugccuacggagguggcagccaucuccuucucggcaucaagcuuaccauggagcugcucauccuuaaggccaacgcuauuaccacaauacugacugcagugacguucugcuuugccagcggccagaauaucaccgaagaguucuaccaauccacauguucugcggucucaaaaggguauuugagugcuuuaagaacuggaugguacaccagcguuauuacaaucgaacuguccaacauuaaggagaauaaaugcaacgguaccgacgccaaggugaaacuaaucaagcaggaacucgauaaguauaaaaaugcaguaacugagcugcagaugcuuauguguucuacacccgccaccggcucggggucagcuauagcaagcggaguggccgucugcaaggugcugcacuuggagggcgaaguuaacaaaaucaagagugcucuccuguccacgaauaaagccguggucucucugagcaacgguguguccguacucacuuuuaagguuuuagaccugaagaauuacauugauaaacagcuuuugccuauccugaacaagcaaucauguaguauuagcaauaucgagaccgugauggaguuccagcagaaaaacaauaggcuacucgaaauaacacgggaguuuucugucaacgcgggggugacuaccccaguguccacauauaugcugaccaauucagaacuucugagcuugauuaacgacaugccgaucacgaacgaucagaagaaacucaugaguaauaacguccaaauuguucgccagcagucuuacuccaucaugugcaucauuaaggaggaagugcuggcauauguagugcaguuaccccuguacggagucauagacacuccuuguuggaaacuccauacaagcccacuuugcaccacuaauacaaaggagggcucgaacaucugucugacccgaacggaucguggcugguacugcgacaaugccgggucuguguccuucuuuccccaagcugaaaccuguaagguuugcucaaacagaguguucugcgauacaaugaauaguuugacucuaccuagcgaggucaaccuguguaauguggacauuuuuaacccaaaauaugauugcaagaucaugaccuccaaaacagacguaucuagcucaguuauaacuagccucggagccauuguguccuguuacgguaagaccaaaugcacagcaagcaauaagaacaagggcaucaucaaaaccuucucuaaugggugugauuaugucucaaacaagggaguggacacugucagugugggcaauacgcuguacuauguuaacaaacaggaggguaagagccuuuacgugaaaggggaacccauuaucaacuuuuaugacccucugguauucccauccgaugaguuugacgcuucuauuucgcaggucaaugaaaagauaaaccaaaguuuggccuucaucaggaaguccgaugagcuccugcacaaugugaacgcgggaaaaucaacaaccaauauuaugaucacuaccaucauuauaguuaucauugugaucuuacugagucuaauugccgucggccuccugcuuuacugcaaggcacggucuacaccggugaccuugagcaaagaccagcuguccggcaucaacaauauagcuuucucaaacugaggacuagugcaucacauuuaaaagcaucucagccuaccaugagaauaagagaaagaaaaugaagaucaauagcuuauucaucucuuuuucuuuuucguugguguaaagccaacacccugucuaaaaaacauaaauuucuuuaaucauuuugccucuuuucucugugcuucaauuaauaaaaaauggaaagaaccuagaucuaaaaaaaaaaaaaaaaaaaaaaaaaaaaaaaaaaaaaaaaaaaaaaaaaaaaaaaaaaaaaaaaugcaucccccccccccccccccccccccccccccccaaaggcucuuuucagagccaccagaauu

SEQ ID NO: 7159 - RNA, 1990 nt, Artificial Sequence
  mRNA product Design i-2 comprising derived and/or modified sequence from HRSV(A2)__F_DSCav1_mut7 (opt4)
ggggcgcugccuacggagguggcagccaucuccuucucggcaucaagcuuaccauggagcugcugauccugaaggccaacgccaucaccaccauccugaccgccgugaccuucugcuucgccagcggccagaacaucaccgaggaguucuaccagagcaccugcagcgccgugagcaagggcuaccugagcgcccugagaaccggcugguacaccagcgugaucaccaucgagcugagcaacaucaaggagaacaagugcaacggcaccgacgccaaggugaagcugaucaagcaggagcuggacaaguacaagaacgccgugaccgagcugcagaugcugaugugcagcacccccgccaccggcagcggcagcgccaucgccagcggcguggccgugugcaaggugcugcaccuggagggcgaggugaacaagaucaagagcgcccugcugagcaccaacaaggccguggugagccugagcaacggcgugagcgugcugaccuucaaggugcuggaccugaagaacuacaucgacaagcagcugcugcccauccugaacaagcagagcugcagcaucagcaacaucgagaccgugauggaguuccagcagaagaacaacagacugcuggagaucaccagagaguucagcgugaacgccggcgugaccacccccgugagcaccuacaugcugaccaacagcgagcugcugagccugaucaacgacaugcccaucaccaacgaccagaagaagcugaugagcaacaacgugcagaucgugagacagcagagcuacagcaucaugugcaucaucaaggaggaggugcuggccuacguggugcagcugccccuguacggcgugaucgacacccccugcuggaagcugcacaccagcccccugugcaccaccaacaccaaggagggcagcaacaucugccugaccagaaccgacagaggcugguacugcgacaacgccggcagcgugagcuucuucccccaggccgagaccugcaaggugugcagcaacagaguguucugcgacaccaugaacagccugacccugcccagcgaggugaaccugugcaacguggacaucuucaaccccaaguacgacugcaagaucaugaccagcaagaccgacgugagcagcagcgugaucaccagccugggcgccaucgugagcugcuacggcaagaccaagugcaccgccagcaacaagaacaagggcaucaucaagaccuucagcaacggcugcgacuacgugagcaacaagggcguggacaccgugagcgugggcaacacccuguacuacgugaacaagcaggagggcaagagccuguacgugaagggcgagcccaucaucaacuucuacgacccccugguguuccccagcgacgaguucgacgccagcaucagccaggugaacgagaagaucaaccagagccuggccuucaucagaaagagcgacgagcugcugcacaacgugaacgccggcaagagcaccaccaacaucaugaucaccaccaucaucaucgugaucaucgugauccugcugagccugaucgccgugggccugcugcuguacugcaaggccagaagcacccccgugacccugagcaaggaccagcugagcggcaucaacaacaucgccuucagcaacugaggacuagugcaucacauuuaaaagcaucucagccuaccaugagaauaagagaaagaaaaugaagaucaauagcuuauucaucucuuuuucuuuuucguugguguaaagccaacacccugucuaaaaaacauaaauuucuuuaaucauuuugccucuuuucucugugcuucaauuaauaaaaaauggaaagaaccuagaucuaaaaaaaaaaaaaaaaaaaaaaaaaaaaaaaaaaaaaaaaaaaaaaaaaaaaaaaaaaaaaaaaugcaucccccccccccccccccccccccccccccccaaaggcucuuuucagagccaccagaauu

SEQ ID NO: 7160 - RNA, 1990 nt, Artificial Sequence
  mRNA product Design i-2 comprising derived and/or modified sequence from HRSV(A2)__F_DSCav1_mut7 (opt5)
ggggcgcugccuacggagguggcagccaucuccuucucggcaucaagcuuaccauggagcugcucauccugaaggccaacgcuauuaccacaauccuuacggccgugaccuucugcuuugcgagcggccagaauauuacagaagaguucuaccaauccaccuguucugcugucagcaaaggguaucuguccgcccucagaacaggaugguacaccucuguuaucacaauugaacugagcaacaucaaggagaauaaaugcaacggcaccgacgccaaggugaaacuuaucaagcaggaacuggauaaguauaaaaaugcugugacggagcuccagaugcugauguguuccacccccgccacagggucuggaagcgcuauugccuccggcgucgcggugugcaagguucugcaccucgagggggaagugaacaaaaucaagagcgcccugcuuucuaccaauaaagcugucgugucccugagcaacggaguuucugugcucacauuuaagguccuggaccuuaagaauuacauugauaaacagcugcucccuauccugaacaagcaauccuguagcauuucuaauaucgagaccgugauggaguuccagcagaaaaacaaucggcugcucgaaauuacgcgcgaguuuuccgugaacgccggcgucacaaccccgguuagcacauauaugcugaccaauuccgaacuucugucucucaucaacgacaugcccaucaccaacgaucagaagaaacugaugagcaauaacgugcaaauugugagacagcaguccuacagcaucaugugcauuaucaaggaggaaguccuugcuuaugugguucagcugccucucuacggcgugauugacacacccuguuggaaacugcauacgucuccucugugcaccacaaauaccaaggagggguccaacaucugucucacacggaccgaucgcggaugguacugcgacaaugccggcagcgucucuuucuuuccccaagcggaaacguguaaggugugcagcaacagaguuuucugcgauacaaugaacucccugacccuuccuucugaggugaaucuguguaaugucgacaucuuuaacccgaaauaugauugcaagauuaugaccagcaaaacagacguguccagcucugucaucaccucccucggggccauugugagcuguuacggaaagacaaaaugcacggcuucuaauaagaacaagggcaucauuaaaaccuucuccaaugggugugauuauguuagcaacaagggaguggacacagucuccgugggcaauacccuguacuauguuaacaaacaggagggcaagucucuuuacgugaaaggggaacccaucaucaacuuuuaugacccucuggucuuccccagcgaugaguuugacgccuccauuucucaggugaaugaaaagaucaaccaaagccucgcuuucauucggaaguccgaugagcugcugcacaaugugaacgccggaaaaagcacaaccaauaucaugauuacgaccaucauuaucguuaucauugucauccuccugucucuuauugccgugggccugcuccuguacugcaaggcucgcuccacaccugugacccugagcaaagaccagcuuucugggaucaacaauauugcguucuccaacugaggacuagugcaucacauuuaaaagcaucucagccuaccaugagaauaagagaaagaaaaugaagaucaauagcuuauucaucucuuuuucuuuuucguugguguaaagccaacacccugucuaaaaaacauaaauuucuuuaaucauuuugccucuuuucucugugcuucaauuaauaaaaaauggaaagaaccuagaucuaaaaaaaaaaaaaaaaaaaaaaaaaaaaaaaaaaaaaaaaaaaaaaaaaaaaaaaaaaaaaaaaugcaucccccccccccccccccccccccccccccccaaaggcucuuuucagagccaccagaauu

SEQ ID NO: 7161 - RNA, 1990 nt, Artificial Sequence
  mRNA product Design i-2 comprising derived and/or modified sequence from HRSV(A2)__F_DSCav1_mut7 (opt6)
ggggcgcugccuacggagguggcagccaucuccuucucggcaucaagcuuaccauggaauuacucauacucaaagcaaaugcaauuaccacuauacucacagcuguaacuuuuuguuucgccucaggacaaaacaucacagaagaauuuuaucaauccacaugcucugccguaucaaaaggcuaccuaucugcccuaagaacagguugguacacaucuguaauaacaaucgaauuauccaacaucaaagaaaacaaaugcaacggcacagacgcaaaagucaaacucaucaaacaagaauuagauaaauauaaaaacgcaguaacagaacuacaaaugcuaaugugcucuacacccgccacaggaucaggauccgcaaucgcuucuggaguagccguuugcaaaguauuacaccuagaaggagaaguaaauaaaauaaaauccgcacuacuaucaacuaauaaagcaguaguaucacuuucuaaugguguaucaguauuaacauucaaaguccucgaccuaaaaaauuacaucgacaaacaacuauuacccauccuuaauaaacaaucaugcuccauaucaaacauagaaacugucauggaauuucaacaaaaaaacaauagacuucuagaaaucacaagagaauuuucuguaaaugcaggaguaacuacaccaguaucaacauauauguuaaccaacuccgaacuacuaucacucauaaacgacaugccaauaacaaacgaccaaaaaaaacuaaugucaaauaacguucaaauaguaagacaacaaucauacucaaucaugugcauaauaaaagaagaaguuuuagcauacgucguacaacuuccccuauacggaguaauagacaccccuugcuggaaacuccacaccucaccacuaugcacuacaaacacaaaagaagguuccaacaucugcuuaacaagaaccgaucgaggaugguacugcgacaacgcugguuccguaucuuucuucccacaagcagaaacaugcaaaguaugcuccaauagaguauucugcgacaccaugaacucacuaacucuaccauccgaaguaaaccuaugcaacgucgacauauuuaauccaaaauaugacugcaaaauaaugacuucaaaaacagacguauccucaucaguaauaacauccuuaggagcaauaguaucauguuacggcaagacaaaauguacagccucaaacaaaaacaaagguaucauuaaaaccuucuccaacggcugcgacuacguaucaaauaaaggugucgauacaguaucaguaggaaacacacucuauuacguuaauaaacaagaaggaaagucauuauacguaaaaggagaaccaauaaucaauuucuacgauccccuagucuuucccucagaugaauuugacgcaagcaucucucaagucaacgaaaaaauaaaccaaucccuagccuucauaagaaaaucagaugaacuacuucauaacgucaacgccggaaaaucaacaaccaacauaaugaucacuacaaucauaauuguaauuauaguaauacuacuaucgcuaauugccguuggacuacuacuauauuguaaagcaagaucaacacccguuacucuauccaaagaucaauuaucaggaaucaacaacauagccuucucaaauuaaggacuagugcaucacauuuaaaagcaucucagccuaccaugagaauaagagaaagaaaaugaagaucaauagcuuauucaucucuuuuucuuuuucguugguguaaagccaacacccugucuaaaaaacauaaauuucuuuaaucauuuugccucuuuucucugugcuucaauuaauaaaaaauggaaagaaccuagaucuaaaaaaaaaaaaaaaaaaaaaaaaaaaaaaaaaaaaaaaaaaaaaaaaaaaaaaaaaaaaaaaaugcaucccccccccccccccccccccccccccccccaaaggcucuuuucagagccaccagaauu

SEQ ID NO: 7162 - RNA, 1990 nt, Artificial Sequence
  mRNA product Design i-2 comprising derived and/or modified sequence from HRSV(A2)__F_DSCav1_mut7 (opt11)
ggggcgcugccuacggagguggcagccaucuccuucucggcaucaagcuuaccauggaacuacucauacuuaaagccaacgcaauaaccacaauccucaccgccgucacauucugcuucgccucgggacaaaacauaaccgaagaauuuuaccagucuaccugcuccgccgucuccaaggguuaccucuccgcgcuccgcaccgggugguacaccagcguuaucaccaucgaacuaucuaacauaaaagaaaacaagugcaacggaaccgacgcaaaagucaaacucaucaaacaagaacuagacaaauacaagaaugccgucaccgaacuacaaaugcucaugugcuccacccccgccaccggauccggcuccgccauugccuccggcgucgccguaugcaaaguccuucacuuggaaggagaaguuaacaaaauaaaaagcgcccuccugucgaccaacaaagcgguggucagccucuccaacggcgucucuguccucaccuucaaaguccucgaccucaagaacuacauagauaaacaacuacuccccauccuaaacaaacagucaugcagcauauccaacaucgaaaccgucauggaguuccaacagaaaaacaaccgccuccuugaaaucacccgcgaguucucugucaacgccggcgucaccacccccgucuccaccuacaugcucacaaacuccgaacuccucagccucaucaacgacaugccaaucaccaacgaccaaaagaaacucauguccaacaacguacaaaucguucgucaacaaucauacucaaucaugugcaucauuaaagaagaaguccucgcauacgucguccaacucccccucuauggggucaucgacaccccaugcuggaaacuccacaccucuccccuaugcaccaccaacaccaaagaaggcuccaacaucugccuaacccgaaccgaccgcggaugguacugcgacaacgccggcuccgucuccuucuucccccaggccgaaacauguaaagucugcuccaaccguguguucugcgacaccaugaacucacuaacccuccccuccgaagucaaccucugcaacgucgacaucuucaacccgaaauacgacugcaaaauaaugaccagcaaaacagacguauccucuagcgucauuaccagccuaggugcaaucguguccugcuacggcaaaacaaaaugcaccgccuccaacaaaaauaaaggaaucauaaaaaccuucuccaacggcugcgacuacgucagcaacaaaggagucgacaccgucuccguaggaaauacucuauacuaugucaacaaacaagaggguaaaucccucuacgucaaaggcgaacccaucaucaacuucuacgacccccucgucuuccccucugacgaguucgacgccagcauaucacaaguaaacgaaaagaucaaccaaucccucgcauucauucgcaaauccgacgaacuccuacacaacgucaacgccggaaaauccaccaccaacaucaugaucacuacuaucauuaucgucaucaucgucauccuccucucccucaucgcagucggccuucuacucuacugcaaggcacgcucuacacccguaacccugucuaaagaccaacucuccggcaucaacaacaucgcuuucuccaacuaaggacuagugcaucacauuuaaaagcaucucagccuaccaugagaauaagagaaagaaaaugaagaucaauagcuuauucaucucuuuuucuuuuucguugguguaaagccaacacccugucuaaaaaacauaaauuucuuuaaucauuuugccucuuuucucugugcuucaauuaauaaaaaauggaaagaaccuagaucuaaaaaaaaaaaaaaaaaaaaaaaaaaaaaaaaaaaaaaaaaaaaaaaaaaaaaaaaaaaaaaaaugcaucccccccccccccccccccccccccccccccaaaggcucuuuucagagccaccagaauu

SEQ ID NO: 7163 - RNA, 1825 nt, Artificial Sequence
  mRNA product Design i-3 comprising derived and/or modified sequence from HRSV(A2)__F_DSCav1_mut7 (opt1)
gggagaaagcuuaccauggagcugcucauccugaaggccaacgccaucaccaccauccugacggcggugaccuucugcuucgccagcggccagaacaucaccgaggaguucuaccaguccacgugcagcgccgucuccaagggguaccucagcgcccugcggaccggcugguacaccuccgugaucaccaucgagcugagcaacaucaaggagaacaagugcaacgggaccgacgccaaggugaagcucaucaagcaggagcuggacaaguacaagaacgcggucacggagcugcagaugcugaugugcuccaccccggcaaccggcuccggcuccgccaucgcgagcggcgucgccgugugcaaggugcugcaccucgagggggaggucaacaagaucaagagcgcccugcuguccaccaacaaggccguggugagccucuccaacggcgucagcgugcugaccuucaaggugcuggaccucaagaacuacaucgacaagcagcugcugcccauccugaacaagcagagcugcuccaucagcaacaucgagacggugauggaguuccagcagaagaacaaccggcuccuggagaucacccgcgaguucagcgugaacgccggggucaccacccccguguccacguacaugcugaccaacagcgagcuccugucccugaucaacgacaugccgaucaccaacgaccagaagaagcucaugagcaacaacgugcagaucguccggcagcaguccuacagcaucaugugcaucaucaaggaggaggugcuggcguacgugguccagcugccccucuacggcgugaucgacacccccugcuggaagcugcacacgagcccccugugcaccaccaacaccaaggagggguccaacaucugccucacgcgcaccgaccggggcugguacugcgacaacgccggcagcgucuccuucuucccgcaggccgagaccugcaaggugugcagcaaccgcguguucugcgacaccaugaacucccugacgcugcccagcgagguaaaccucugcaacgucgacaucuucaaccccaaguacgacugcaagaucaugaccuccaagaccgacgugagcuccagcgugaucaccucccugggggccaucgucagcugcuacggcaagacgaagugcaccgccagcaacaagaacaaggggaucaucaagaccuucuccaacggcugcgacuacgugagcaacaagggcguggacaccguguccgucgggaacacccuguacuacgugaacaagcaggagggcaagagccucuacgugaagggggagcccaucaucaacuucuacgacccgcuggucuuccccuccgacgaguucgacgcgagcaucucccaggugaacgagaagaucaaccagagccuggccuucauccgcaaguccgacgagcugcuccacaacgugaacgccggcaagagcacgaccaacaucaugaucaccaccaucaucaucgucaucaucgugauccugcugucccucaucgccguggggcugcugcucuacugcaaggcccggagcacgcccgucacccuguccaaggaccagcugagcggcaucaacaacaucgcguucuccaacugaggacuaguuauaagacugacuagcccgaugggccucccaacgggcccuccuccccuccuugcaccgagauuaauaaaaaaaaaaaaaaaaaaaaaaaaaaaaaaaaaaaaaaaaaaaaaaaaaaaaaaaaaaaaaaaaugcaucccccccccccccccccccccccccccccccaaaggcucuuuucagagccaccagaauu

SEQ ID NO: 7164 - RNA, 1825 nt, Artificial Sequence
  mRNA product Design i-3 comprising derived and/or modified sequence from HRSV(A2)__F_DSCav1_mut7 (opt1)
gggagaaagcuuaccauggagcugcucauccugaaggccaacgccaucaccaccauccugacggcggugaccuucugcuucgccagcggccagaacaucaccgaggaguucuaccaguccacgugcagcgccgucuccaagggguaccucagcgcccugcgcaccggcugguacaccuccgugaucaccaucgagcugagcaacaucaaggagaacaagugcaacgggaccgacgccaaggugaagcucaucaagcaggagcuggacaaguacaagaacgcggucacggagcugcagaugcucaugugcuccacccccgccaccggcagcggguccgccaucgccagcggcguggcggugugcaagguccugcaccuggagggcgaggugaacaagaucaaguccgcccuccugagcaccaacaaggccguggucucccugagcaacgggguguccgugcucacguucaagguccuggaccugaagaacuacaucgacaagcagcuccugccgauccugaacaagcagagcugcuccaucagcaacaucgagaccgugauggaguuccagcagaagaacaaccggcuccuggagaucacccgcgaguucuccgugaacgccggcgucaccacgcccgugagcaccuacaugcugaccaacagcgagcuccugucccugaucaacgacaugcccaucaccaacgaccagaagaagcucaugagcaacaacgugcagaucguccggcagcaguccuacagcaucaugugcaucaucaaggaggaggugcuggccuacgugguccagcugccccucuacggggugaucgacacgccgugcuggaagcugcacaccagcccccugugcaccaccaacacgaaggagggcagcaacaucugccucacccgcaccgaccgggggugguacugcgacaacgcgggcuccgugagcuucuucccccaggccgagaccugcaaggucugcuccaaccgcguguucugcgacacgaugaacagccugacccugcccuccgaggucaaccucugcaacguggacaucuucaacccgaaguacgacugcaagaucaugaccagcaagaccgacguguccagcuccgucaucacgagccugggcgccaucguguccugcuacgggaagaccaagugcaccgccagcaacaagaacaagggcaucaucaagaccuucuccaacgggugcgacuacgugagcaacaagggcgucgacacggugagcgugggcaacacccuguacuacgucaacaagcaggaggggaagucccucuacgugaagggcgagcccaucaucaacuucuacgacccccugguguuccccagcgacgaguucgacgccuccaucagccaggucaacgagaagaucaaccagucccuggcguucauccggaaguccgacgagcuccugcacaacgugaacgccgggaaguccaccaccaacaucaugaucaccacgaucaucaucgugaucaucgucauccugcucagccugaucgccgugggccugcuccuguacugcaaggcccgcuccaccccggugacccugagcaaggaccagcuguccgggaucaacaacaucgccuucagcaacugaggacuaguuauaagacugacuagcccgaugggccucccaacgggcccuccuccccuccuugcaccgagauuaauaaaaaaaaaaaaaaaaaaaaaaaaaaaaaaaaaaaaaaaaaaaaaaaaaaaaaaaaaaaaaaaaugcaucccccccccccccccccccccccccccccccaaaggcucuuuucagagccaccagaauu

SEQ ID NO: 7165 - RNA, 1825 nt, Artificial Sequence
  mRNA product Design i-3 comprising derived and/or modified sequence from HRSV(A2)__F_DSCav1_mut7 (opt2)
gggagaaagcuuaccauggagcuccucauccucaaggccaacgccaucaccaccauccucaccgccgucaccuucugcuucgccuccggccagaacaucaccgaggaguucuaccaguccaccugcuccgccgucuccaagggcuaccucuccgcccuccgcaccggcugguacaccuccgucaucaccaucgagcucuccaacaucaaggagaacaagugcaacggcaccgacgccaaggucaagcucaucaagcaggagcucgacaaguacaagaacgccgucaccgagcuccagaugcucaugugcuccacccccgccaccggcuccggcuccgccaucgccuccggcgucgccgucugcaagguccuccaccucgagggcgaggucaacaagaucaaguccgcccuccucuccaccaacaaggccgucgucucccucuccaacggcgucuccguccucaccuucaagguccucgaccucaagaacuacaucgacaagcagcuccuccccauccucaacaagcaguccugcuccaucuccaacaucgagaccgucauggaguuccagcagaagaacaaccgccuccucgagaucacccgcgaguucuccgucaacgccggcgucaccacccccgucuccaccuacaugcucaccaacuccgagcuccucucccucaucaacgacaugcccaucaccaacgaccagaagaagcucauguccaacaacguccagaucguccgccagcaguccuacuccaucaugugcaucaucaaggaggagguccucgccuacgucguccagcucccccucuacggcgucaucgacacccccugcuggaagcuccacaccuccccccucugcaccaccaacaccaaggagggcuccaacaucugccucacccgcaccgaccgcggcugguacugcgacaacgccggcuccgucuccuucuucccccaggccgagaccugcaaggucugcuccaaccgcgucuucugcgacaccaugaacucccucacccuccccuccgaggucaaccucugcaacgucgacaucuucaaccccaaguacgacugcaagaucaugaccuccaagaccgacgucuccuccuccgucaucaccucccucggcgccaucgucuccugcuacggcaagaccaagugcaccgccuccaacaagaacaagggcaucaucaagaccuucuccaacggcugcgacuacgucuccaacaagggcgucgacaccgucuccgucggcaacacccucuacuacgucaacaagcaggagggcaagucccucuacgucaagggcgagcccaucaucaacuucuacgacccccucgucuuccccuccgacgaguucgacgccuccaucucccaggucaacgagaagaucaaccagucccucgccuucauccgcaaguccgacgagcuccuccacaacgucaacgccggcaaguccaccaccaacaucaugaucaccaccaucaucaucgucaucaucgucauccuccucucccucaucgccgucggccuccuccucuacugcaaggcccgcuccacccccgucacccucuccaaggaccagcucuccggcaucaacaacaucgccuucuccaacugaggacuaguuauaagacugacuagcccgaugggccucccaacgggcccuccuccccuccuugcaccgagauuaauaaaaaaaaaaaaaaaaaaaaaaaaaaaaaaaaaaaaaaaaaaaaaaaaaaaaaaaaaaaaaaaaugcaucccccccccccccccccccccccccccccccaaaggcucuuuucagagccaccagaauu

SEQ ID NO: 7166 - RNA, 1825 nt, Artificial Sequence
  mRNA product Design i-3 comprising derived and/or modified sequence from HRSV(A2)__F_DSCav1_mut7 (opt3)
gggagaaagcuuaccauggagcugcucauccuuaaggccaacgcuauuaccacaauacugacugcagugacguucugcuuugccagcggccagaauaucaccgaagaguucuaccaauccacauguucugcggucucaaaaggguauuugagugcuuuaagaacuggaugguacaccagcguuauuacaaucgaacuguccaacauuaaggagaauaaaugcaacgguaccgacgccaaggugaaacuaaucaagcaggaacucgauaaguauaaaaaugcaguaacugagcugcagaugcuuauguguucuacacccgccaccggcucggggucagcuauagcaagcggaguggccgucugcaaggugcugcacuuggagggcgaaguuaacaaaaucaagagugcucuccuguccacgaauaaagccguggucucucugagcaacgguguguccguacucacuuuuaagguuuuagaccugaagaauuacauugauaaacagcuuuugccuauccugaacaagcaaucauguaguauuagcaauaucgagaccgugauggaguuccagcagaaaaacaauaggcuacucgaaauaacacgggaguuuucugucaacgcgggggugacuaccccaguguccacauauaugcugaccaauucagaacuucugagcuugauuaacgacaugccgaucacgaacgaucagaagaaacucaugaguaauaacguccaaauuguucgccagcagucuuacuccaucaugugcaucauuaaggaggaagugcuggcauauguagugcaguuaccccuguacggagucauagacacuccuuguuggaaacuccauacaagcccacuuugcaccacuaauacaaaggagggcucgaacaucugucugacccgaacggaucguggcugguacugcgacaaugccgggucuguguccuucuuuccccaagcugaaaccuguaagguuugcucaaacagaguguucugcgauacaaugaauaguuugacucuaccuagcgaggucaaccuguguaauguggacauuuuuaacccaaaauaugauugcaagaucaugaccuccaaaacagacguaucuagcucaguuauaacuagccucggagccauuguguccuguuacgguaagaccaaaugcacagcaagcaauaagaacaagggcaucaucaaaaccuucucuaaugggugugauuaugucucaaacaagggaguggacacugucagugugggcaauacgcuguacuauguuaacaaacaggaggguaagagccuuuacgugaaaggggaacccauuaucaacuuuuaugacccucugguauucccauccgaugaguuugacgcuucuauuucgcaggucaaugaaaagauaaaccaaaguuuggccuucaucaggaaguccgaugagcuccugcacaaugugaacgcgggaaaaucaacaaccaauauuaugaucacuaccaucauuauaguuaucauugugaucuuacugagucuaauugccgucggccuccugcuuuacugcaaggcacggucuacaccggugaccuugagcaaagaccagcuguccggcaucaacaauauagcuuucucaaacugaggacuaguuauaagacugacuagcccgaugggccucccaacgggcccuccuccccuccuugcaccgagauuaauaaaaaaaaaaaaaaaaaaaaaaaaaaaaaaaaaaaaaaaaaaaaaaaaaaaaaaaaaaaaaaaaugcaucccccccccccccccccccccccccccccccaaaggcucuuuucagagccaccagaauu

SEQ ID NO: 7167 - RNA, 1825 nt, Artificial Sequence
  mRNA product Design i-3 comprising derived and/or modified sequence from HRSV(A2)__F_DSCav1_mut7 (opt4)
gggagaaagcuuaccauggagcugcugauccugaaggccaacgccaucaccaccauccugaccgccgugaccuucugcuucgccagcggccagaacaucaccgaggaguucuaccagagcaccugcagcgccgugagcaagggcuaccugagcgcccugagaaccggcugguacaccagcgugaucaccaucgagcugagcaacaucaaggagaacaagugcaacggcaccgacgccaaggugaagcugaucaagcaggagcuggacaaguacaagaacgccgugaccgagcugcagaugcugaugugcagcacccccgccaccggcagcggcagcgccaucgccagcggcguggccgugugcaaggugcugcaccuggagggcgaggugaacaagaucaagagcgcccugcugagcaccaacaaggccguggugagccugagcaacggcgugagcgugcugaccuucaaggugcuggaccugaagaacuacaucgacaagcagcugcugcccauccugaacaagcagagcugcagcaucagcaacaucgagaccgugauggaguuccagcagaagaacaacagacugcuggagaucaccagagaguucagcgugaacgccggcgugaccacccccgugagcaccuacaugcugaccaacagcgagcugcugagccugaucaacgacaugcccaucaccaacgaccagaagaagcugaugagcaacaacgugcagaucgugagacagcagagcuacagcaucaugugcaucaucaaggaggaggugcuggccuacguggugcagcugccccuguacggcgugaucgacacccccugcuggaagcugcacaccagcccccugugcaccaccaacaccaaggagggcagcaacaucugccugaccagaaccgacagaggcugguacugcgacaacgccggcagcgugagcuucuucccccaggccgagaccugcaaggugugcagcaacagaguguucugcgacaccaugaacagccugacccugcccagcgaggugaaccugugcaacguggacaucuucaaccccaaguacgacugcaagaucaugaccagcaagaccgacgugagcagcagcgugaucaccagccugggcgccaucgugagcugcuacggcaagaccaagugcaccgccagcaacaagaacaagggcaucaucaagaccuucagcaacggcugcgacuacgugagcaacaagggcguggacaccgugagcgugggcaacacccuguacuacgugaacaagcaggagggcaagagccuguacgugaagggcgagcccaucaucaacuucuacgacccccugguguuccccagcgacgaguucgacgccagcaucagccaggugaacgagaagaucaaccagagccuggccuucaucagaaagagcgacgagcugcugcacaacgugaacgccggcaagagcaccaccaacaucaugaucaccaccaucaucaucgugaucaucgugauccugcugagccugaucgccgugggccugcugcuguacugcaaggccagaagcacccccgugacccugagcaaggaccagcugagcggcaucaacaacaucgccuucagcaacugaggacuaguuauaagacugacuagcccgaugggccucccaacgggcccuccuccccuccuugcaccgagauuaauaaaaaaaaaaaaaaaaaaaaaaaaaaaaaaaaaaaaaaaaaaaaaaaaaaaaaaaaaaaaaaaaugcaucccccccccccccccccccccccccccccccaaaggcucuuuucagagccaccagaauu

SEQ ID NO: 7168 - RNA, 1825 nt, Artificial Sequence
  mRNA product Design i-3 comprising derived and/or modified sequence from HRSV(A2)__F_DSCav1_mut7 (opt5)
gggagaaagcuuaccauggagcugcucauccugaaggccaacgcuauuaccacaauccuuacggccgugaccuucugcuuugcgagcggccagaauauuacagaagaguucuaccaauccaccuguucugcugucagcaaaggguaucuguccgcccucagaacaggaugguacaccucuguuaucacaauugaacugagcaacaucaaggagaauaaaugcaacggcaccgacgccaaggugaaacuuaucaagcaggaacuggauaaguauaaaaaugcugugacggagcuccagaugcugauguguuccacccccgccacagggucuggaagcgcuauugccuccggcgucgcggugugcaagguucugcaccucgagggggaagugaacaaaaucaagagcgcccugcuuucuaccaauaaagcugucgugucccugagcaacggaguuucugugcucacauuuaagguccuggaccuuaagaauuacauugauaaacagcugcucccuauccugaacaagcaauccuguagcauuucuaauaucgagaccgugauggaguuccagcagaaaaacaaucggcugcucgaaauuacgcgcgaguuuuccgugaacgccggcgucacaaccccgguuagcacauauaugcugaccaauuccgaacuucugucucucaucaacgacaugcccaucaccaacgaucagaagaaacugaugagcaauaacgugcaaauugugagacagcaguccuacagcaucaugugcauuaucaaggaggaaguccuugcuuaugugguucagcugccucucuacggcgugauugacacacccuguuggaaacugcauacgucuccucugugcaccacaaauaccaaggagggguccaacaucugucucacacggaccgaucgcggaugguacugcgacaaugccggcagcgucucuuucuuuccccaagcggaaacguguaaggugugcagcaacagaguuuucugcgauacaaugaacucccugacccuuccuucugaggugaaucuguguaaugucgacaucuuuaacccgaaauaugauugcaagauuaugaccagcaaaacagacguguccagcucugucaucaccucccucggggccauugugagcuguuacggaaagacaaaaugcacggcuucuaauaagaacaagggcaucauuaaaaccuucuccaaugggugugauuauguuagcaacaagggaguggacacagucuccgugggcaauacccuguacuauguuaacaaacaggagggcaagucucuuuacgugaaaggggaacccaucaucaacuuuuaugacccucuggucuuccccagcgaugaguuugacgccuccauuucucaggugaaugaaaagaucaaccaaagccucgcuuucauucggaaguccgaugagcugcugcacaaugugaacgccggaaaaagcacaaccaauaucaugauuacgaccaucauuaucguuaucauugucauccuccugucucuuauugccgugggccugcuccuguacugcaaggcucgcuccacaccugugacccugagcaaagaccagcuuucugggaucaacaauauugcguucuccaacugaggacuaguuauaagacugacuagcccgaugggccucccaacgggcccuccuccccuccuugcaccgagauuaauaaaaaaaaaaaaaaaaaaaaaaaaaaaaaaaaaaaaaaaaaaaaaaaaaaaaaaaaaaaaaaaaugcaucccccccccccccccccccccccccccccccaaaggcucuuuucagagccaccagaauu

SEQ ID NO: 7169 - RNA, 1825 nt, Artificial Sequence
  mRNA product Design i-3 comprising derived and/or modified sequence from HRSV(A2)__F_DSCav1_mut7 (opt6)
gggagaaagcuuaccauggaauuacucauacucaaagcaaaugcaauuaccacuauacucacagcuguaacuuuuuguuucgccucaggacaaaacaucacagaagaauuuuaucaauccacaugcucugccguaucaaaaggcuaccuaucugcccuaagaacagguugguacacaucuguaauaacaaucgaauuauccaacaucaaagaaaacaaaugcaacggcacagacgcaaaagucaaacucaucaaacaagaauuagauaaauauaaaaacgcaguaacagaacuacaaaugcuaaugugcucuacacccgccacaggaucaggauccgcaaucgcuucuggaguagccguuugcaaaguauuacaccuagaaggagaaguaaauaaaauaaaauccgcacuacuaucaacuaauaaagcaguaguaucacuuucuaaugguguaucaguauuaacauucaaaguccucgaccuaaaaaauuacaucgacaaacaacuauuacccauccuuaauaaacaaucaugcuccauaucaaacauagaaacugucauggaauuucaacaaaaaaacaauagacuucuagaaaucacaagagaauuuucuguaaaugcaggaguaacuacaccaguaucaacauauauguuaaccaacuccgaacuacuaucacucauaaacgacaugccaauaacaaacgaccaaaaaaaacuaaugucaaauaacguucaaauaguaagacaacaaucauacucaaucaugugcauaauaaaagaagaaguuuuagcauacgucguacaacuuccccuauacggaguaauagacaccccuugcuggaaacuccacaccucaccacuaugcacuacaaacacaaaagaagguuccaacaucugcuuaacaagaaccgaucgaggaugguacugcgacaacgcugguuccguaucuuucuucccacaagcagaaacaugcaaaguaugcuccaauagaguauucugcgacaccaugaacucacuaacucuaccauccgaaguaaaccuaugcaacgucgacauauuuaauccaaaauaugacugcaaaauaaugacuucaaaaacagacguauccucaucaguaauaacauccuuaggagcaauaguaucauguuacggcaagacaaaauguacagccucaaacaaaaacaaagguaucauuaaaaccuucuccaacggcugcgacuacguaucaaauaaaggugucgauacaguaucaguaggaaacacacucuauuacguuaauaaacaagaaggaaagucauuauacguaaaaggagaaccaauaaucaauuucuacgauccccuagucuuucccucagaugaauuugacgcaagcaucucucaagucaacgaaaaaauaaaccaaucccuagccuucauaagaaaaucagaugaacuacuucauaacgucaacgccggaaaaucaacaaccaacauaaugaucacuacaaucauaauuguaauuauaguaauacuacuaucgcuaauugccguuggacuacuacuauauuguaaagcaagaucaacacccguuacucuauccaaagaucaauuaucaggaaucaacaacauagccuucucaaauuaaggacuaguuauaagacugacuagcccgaugggccucccaacgggcccuccuccccuccuugcaccgagauuaauaaaaaaaaaaaaaaaaaaaaaaaaaaaaaaaaaaaaaaaaaaaaaaaaaaaaaaaaaaaaaaaaugcaucccccccccccccccccccccccccccccccaaaggcucuuuucagagccaccagaauu

SEQ ID NO: 7170 - RNA, 1825 nt, Artificial Sequence
  mRNA product Design i-3 comprising derived and/or modified sequence from HRSV(A2)__F_DSCav1_mut7 (opt11)
gggagaaagcuuaccauggaacuacucauacuuaaagccaacgcaauaaccacaauccucaccgccgucacauucugcuucgccucgggacaaaacauaaccgaagaauuuuaccagucuaccugcuccgccgucuccaaggguuaccucuccgcgcuccgcaccgggugguacaccagcguuaucaccaucgaacuaucuaacauaaaagaaaacaagugcaacggaaccgacgcaaaagucaaacucaucaaacaagaacuagacaaauacaagaaugccgucaccgaacuacaaaugcucaugugcuccacccccgccaccggauccggcuccgccauugccuccggcgucgccguaugcaaaguccuucacuuggaaggagaaguuaacaaaauaaaaagcgcccuccugucgaccaacaaagcgguggucagccucuccaacggcgucucuguccucaccuucaaaguccucgaccucaagaacuacauagauaaacaacuacuccccauccuaaacaaacagucaugcagcauauccaacaucgaaaccgucauggaguuccaacagaaaaacaaccgccuccuugaaaucacccgcgaguucucugucaacgccggcgucaccacccccgucuccaccuacaugcucacaaacuccgaacuccucagccucaucaacgacaugccaaucaccaacgaccaaaagaaacucauguccaacaacguacaaaucguucgucaacaaucauacucaaucaugugcaucauuaaagaagaaguccucgcauacgucguccaacucccccucuauggggucaucgacaccccaugcuggaaacuccacaccucuccccuaugcaccaccaacaccaaagaaggcuccaacaucugccuaacccgaaccgaccgcggaugguacugcgacaacgccggcuccgucuccuucuucccccaggccgaaacauguaaagucugcuccaaccguguguucugcgacaccaugaacucacuaacccuccccuccgaagucaaccucugcaacgucgacaucuucaacccgaaauacgacugcaaaauaaugaccagcaaaacagacguauccucuagcgucauuaccagccuaggugcaaucguguccugcuacggcaaaacaaaaugcaccgccuccaacaaaaauaaaggaaucauaaaaaccuucuccaacggcugcgacuacgucagcaacaaaggagucgacaccgucuccguaggaaauacucuauacuaugucaacaaacaagaggguaaaucccucuacgucaaaggcgaacccaucaucaacuucuacgacccccucgucuuccccucugacgaguucgacgccagcauaucacaaguaaacgaaaagaucaaccaaucccucgcauucauucgcaaauccgacgaacuccuacacaacgucaacgccggaaaauccaccaccaacaucaugaucacuacuaucauuaucgucaucaucgucauccuccucucccucaucgcagucggccuucuacucuacugcaaggcacgcucuacacccguaacccugucuaaagaccaacucuccggcaucaacaacaucgcuuucuccaacuaaggacuaguuauaagacugacuagcccgaugggccucccaacgggcccuccuccccuccuugcaccgagauuaauaaaaaaaaaaaaaaaaaaaaaaaaaaaaaaaaaaaaaaaaaaaaaaaaaaaaaaaaaaaaaaaaugcaucccccccccccccccccccccccccccccccaaaggcucuuuucagagccaccagaauu

SEQ ID NO: 7171 - protein, 514 aa, Artificial Sequence
  derived and/or modified protein sequence (artificial) from HRSV(A2)__F-del_DSCav1_mut7
MELLILKANAITTILTAVTFCFASGQNITEEFYQSTCSAVSKGYLSALRTGWYTSVITIELSNIKENKCNGTDAKVKLIKQELDKYKNAVTELQMLMCSTPATGSGSAIASGVAVCKVLHLEGEVNKIKSALLSTNKAVVSLSNGVSVLTFKVLDLKNYIDKQLLPILNKQSCSISNIETVMEFQQKNNRLLEITREFSVNAGVTTPVSTYMLTNSELLSLINDMPITNDQKKLMSNNVQIVRQQSYSIMCIIKEEVLAYVVQLPLYGVIDTPCWKLHTSPLCTTNTKEGSNICLTRTDRGWYCDNAGSVSFFPQAETCKVCSNRVFCDTMNSLTLPSEVNLCNVDIFNPKYDCKIMTSKTDVSSSVITSLGAIVSCYGKTKCTASNKNKGIIKTFSNGCDYVSNKGVDTVSVGNTLYYVNKQEGKSLYVKGEPIINFYDPLVFPSDEFDASISQVNEKINQSLAFIRKSDELLHNVNAGKSTTNIMITTIIIVIIVILLSLIAVGLLLYCKAR

SEQ ID NO: 7172 - RNA, 1545 nt, Artificial Sequence
  derived and/or modified CDS sequence (opt1) from HRSV(A2)__F-del_DSCav1_mut7
auggagcugcucauccugaaggccaacgccaucaccaccauccugacggcggugaccuucugcuucgccagcggccagaacaucaccgaggaguucuaccaguccacgugcagcgccgucuccaagggguaccucagcgcccugcggaccggcugguacaccuccgugaucaccaucgagcugagcaacaucaaggagaacaagugcaacgggaccgacgccaaggugaagcucaucaagcaggagcuggacaaguacaagaacgcggucacggagcugcagaugcugaugugcuccaccccggcaaccggcuccggcuccgccaucgcgagcggcgucgccgugugcaaggugcugcaccucgagggggaggucaacaagaucaagagcgcccugcuguccaccaacaaggccguggugagccucuccaacggcgucagcgugcugaccuucaaggugcuggaccucaagaacuacaucgacaagcagcugcugcccauccugaacaagcagagcugcuccaucagcaacaucgagacggugauggaguuccagcagaagaacaaccggcuccuggagaucacccgcgaguucagcgugaacgccggggucaccacccccguguccacguacaugcugaccaacagcgagcuccugucccugaucaacgacaugccgaucaccaacgaccagaagaagcucaugagcaacaacgugcagaucguccggcagcaguccuacagcaucaugugcaucaucaaggaggaggugcuggcguacgugguccagcugccccucuacggcgugaucgacacccccugcuggaagcugcacacgagcccccugugcaccaccaacaccaaggagggguccaacaucugccucacgcgcaccgaccggggcugguacugcgacaacgccggcagcgucuccuucuucccgcaggccgagaccugcaaggugugcagcaaccgcguguucugcgacaccaugaacucccugacgcugcccagcgagguaaaccucugcaacgucgacaucuucaaccccaaguacgacugcaagaucaugaccuccaagaccgacgugagcuccagcgugaucaccucccugggggccaucgucagcugcuacggcaagacgaagugcaccgccagcaacaagaacaaggggaucaucaagaccuucuccaacggcugcgacuacgugagcaacaagggcguggacaccguguccgucgggaacacccuguacuacgugaacaagcaggagggcaagagccucuacgugaagggggagcccaucaucaacuucuacgacccgcuggucuuccccuccgacgaguucgacgcgagcaucucccaggugaacgagaagaucaaccagagccuggccuucauccgcaaguccgacgagcugcuccacaacgugaacgccggcaagagcacgaccaacaucaugaucaccaccaucaucaucgucaucaucgugauccugcugucccucaucgccguggggcugcugcucuacugcaaggcccgguga

SEQ ID NO: 7173 - RNA, 1545 nt, Artificial Sequence
  derived and/or modified CDS sequence (opt1) from HRSV(A2)__F-del_DSCav1_mut7
auggagcugcucauccugaaggccaacgccaucaccaccauccugacggcggugaccuucugcuucgccagcggccagaacaucaccgaggaguucuaccaguccacgugcagcgccgucuccaagggguaccucagcgcccugcgcaccggcugguacaccuccgugaucaccaucgagcugagcaacaucaaggagaacaagugcaacgggaccgacgccaaggugaagcucaucaagcaggagcuggacaaguacaagaacgcggucacggagcugcagaugcucaugugcuccacccccgccaccggcagcggguccgccaucgccagcggcguggcggugugcaagguccugcaccuggagggcgaggugaacaagaucaaguccgcccuccugagcaccaacaaggccguggucucccugagcaacgggguguccgugcucacguucaagguccuggaccugaagaacuacaucgacaagcagcuccugccgauccugaacaagcagagcugcuccaucagcaacaucgagaccgugauggaguuccagcagaagaacaaccggcuccuggagaucacccgcgaguucuccgugaacgccggcgucaccacgcccgugagcaccuacaugcugaccaacagcgagcuccugucccugaucaacgacaugcccaucaccaacgaccagaagaagcucaugagcaacaacgugcagaucguccggcagcaguccuacagcaucaugugcaucaucaaggaggaggugcuggccuacgugguccagcugccccucuacggggugaucgacacgccgugcuggaagcugcacaccagcccccugugcaccaccaacacgaaggagggcagcaacaucugccucacccgcaccgaccgggggugguacugcgacaacgcgggcuccgugagcuucuucccccaggccgagaccugcaaggucugcuccaaccgcguguucugcgacacgaugaacagccugacccugcccuccgaggucaaccucugcaacguggacaucuucaacccgaaguacgacugcaagaucaugaccagcaagaccgacguguccagcuccgucaucacgagccugggcgccaucguguccugcuacgggaagaccaagugcaccgccagcaacaagaacaagggcaucaucaagaccuucuccaacgggugcgacuacgugagcaacaagggcgucgacacggugagcgugggcaacacccuguacuacgucaacaagcaggaggggaagucccucuacgugaagggcgagcccaucaucaacuucuacgacccccugguguuccccagcgacgaguucgacgccuccaucagccaggucaacgagaagaucaaccagucccuggcguucauccggaaguccgacgagcuccugcacaacgugaacgccgggaaguccaccaccaacaucaugaucaccacgaucaucaucgugaucaucgucauccugcucagccugaucgccgugggccugcuccuguacugcaaggcccgcuga

SEQ ID NO: 7174 - RNA, 1545 nt, Artificial Sequence
  derived and/or modified CDS sequence (opt2) from HRSV(A2)__F-del_DSCav1_mut7
auggagcuccucauccucaaggccaacgccaucaccaccauccucaccgccgucaccuucugcuucgccuccggccagaacaucaccgaggaguucuaccaguccaccugcuccgccgucuccaagggcuaccucuccgcccuccgcaccggcugguacaccuccgucaucaccaucgagcucuccaacaucaaggagaacaagugcaacggcaccgacgccaaggucaagcucaucaagcaggagcucgacaaguacaagaacgccgucaccgagcuccagaugcucaugugcuccacccccgccaccggcuccggcuccgccaucgccuccggcgucgccgucugcaagguccuccaccucgagggcgaggucaacaagaucaaguccgcccuccucuccaccaacaaggccgucgucucccucuccaacggcgucuccguccucaccuucaagguccucgaccucaagaacuacaucgacaagcagcuccuccccauccucaacaagcaguccugcuccaucuccaacaucgagaccgucauggaguuccagcagaagaacaaccgccuccucgagaucacccgcgaguucuccgucaacgccggcgucaccacccccgucuccaccuacaugcucaccaacuccgagcuccucucccucaucaacgacaugcccaucaccaacgaccagaagaagcucauguccaacaacguccagaucguccgccagcaguccuacuccaucaugugcaucaucaaggaggagguccucgccuacgucguccagcucccccucuacggcgucaucgacacccccugcuggaagcuccacaccuccccccucugcaccaccaacaccaaggagggcuccaacaucugccucacccgcaccgaccgcggcugguacugcgacaacgccggcuccgucuccuucuucccccaggccgagaccugcaaggucugcuccaaccgcgucuucugcgacaccaugaacucccucacccuccccuccgaggucaaccucugcaacgucgacaucuucaaccccaaguacgacugcaagaucaugaccuccaagaccgacgucuccuccuccgucaucaccucccucggcgccaucgucuccugcuacggcaagaccaagugcaccgccuccaacaagaacaagggcaucaucaagaccuucuccaacggcugcgacuacgucuccaacaagggcgucgacaccgucuccgucggcaacacccucuacuacgucaacaagcaggagggcaagucccucuacgucaagggcgagcccaucaucaacuucuacgacccccucgucuuccccuccgacgaguucgacgccuccaucucccaggucaacgagaagaucaaccagucccucgccuucauccgcaaguccgacgagcuccuccacaacgucaacgccggcaaguccaccaccaacaucaugaucaccaccaucaucaucgucaucaucgucauccuccucucccucaucgccgucggccuccuccucuacugcaaggcccgcuga

SEQ ID NO: 7175 - RNA, 1545 nt, Artificial Sequence
  derived and/or modified CDS sequence (opt3) from HRSV(A2)__F-del_DSCav1_mut7
auggagcugcucauccuuaaggccaacgcuauuaccacaauacugacugcagugacguucugcuuugccagcggccagaauaucaccgaagaguucuaccaauccacauguucugcggucucaaaaggguauuugagugcuuuaagaacuggaugguacaccagcguuauuacaaucgaacuguccaacauuaaggagaauaaaugcaacgguaccgacgccaaggugaaacuaaucaagcaggaacucgauaaguauaaaaaugcaguaacugagcugcagaugcuuauguguucuacacccgccaccggcucggggucagcuauagcaagcggaguggccgucugcaaggugcugcacuuggagggcgaaguuaacaaaaucaagagugcucuccuguccacgaauaaagccguggucucucugagcaacgguguguccguacucacuuuuaagguuuuagaccugaagaauuacauugauaaacagcuuuugccuauccugaacaagcaaucauguaguauuagcaauaucgagaccgugauggaguuccagcagaaaaacaauaggcuacucgaaauaacacgggaguuuucugucaacgcgggggugacuaccccaguguccacauauaugcugaccaauucagaacuucugagcuugauuaacgacaugccgaucacgaacgaucagaagaaacucaugaguaauaacguccaaauuguucgccagcagucuuacuccaucaugugcaucauuaaggaggaagugcuggcauauguagugcaguuaccccuguacggagucauagacacuccuuguuggaaacuccauacaagcccacuuugcaccacuaauacaaaggagggcucgaacaucugucugacccgaacggaucguggcugguacugcgacaaugccgggucuguguccuucuuuccccaagcugaaaccuguaagguuugcucaaacagaguguucugcgauacaaugaauaguuugacucuaccuagcgaggucaaccuguguaauguggacauuuuuaacccaaaauaugauugcaagaucaugaccuccaaaacagacguaucuagcucaguuauaacuagccucggagccauuguguccuguuacgguaagaccaaaugcacagcaagcaauaagaacaagggcaucaucaaaaccuucucuaaugggugugauuaugucucaaacaagggaguggacacugucagugugggcaauacgcuguacuauguuaacaaacaggaggguaagagccuuuacgugaaaggggaacccauuaucaacuuuuaugacccucugguauucccauccgaugaguuugacgcuucuauuucgcaggucaaugaaaagauaaaccaaaguuuggccuucaucaggaaguccgaugagcuccugcacaaugugaacgcgggaaaaucaacaaccaauauuaugaucacuaccaucauuauaguuaucauugugaucuuacugagucuaauugccgucggccuccugcuuuacugcaaggcacgguga

SEQ ID NO: 7176 - RNA, 1545 nt, Artificial Sequence
  derived and/or modified CDS sequence (opt4) from HRSV(A2)__F-del_DSCav1_mut7
auggagcugcugauccugaaggccaacgccaucaccaccauccugaccgccgugaccuucugcuucgccagcggccagaacaucaccgaggaguucuaccagagcaccugcagcgccgugagcaagggcuaccugagcgcccugagaaccggcugguacaccagcgugaucaccaucgagcugagcaacaucaaggagaacaagugcaacggcaccgacgccaaggugaagcugaucaagcaggagcuggacaaguacaagaacgccgugaccgagcugcagaugcugaugugcagcacccccgccaccggcagcggcagcgccaucgccagcggcguggccgugugcaaggugcugcaccuggagggcgaggugaacaagaucaagagcgcccugcugagcaccaacaaggccguggugagccugagcaacggcgugagcgugcugaccuucaaggugcuggaccugaagaacuacaucgacaagcagcugcugcccauccugaacaagcagagcugcagcaucagcaacaucgagaccgugauggaguuccagcagaagaacaacagacugcuggagaucaccagagaguucagcgugaacgccggcgugaccacccccgugagcaccuacaugcugaccaacagcgagcugcugagccugaucaacgacaugcccaucaccaacgaccagaagaagcugaugagcaacaacgugcagaucgugagacagcagagcuacagcaucaugugcaucaucaaggaggaggugcuggccuacguggugcagcugccccuguacggcgugaucgacacccccugcuggaagcugcacaccagcccccugugcaccaccaacaccaaggagggcagcaacaucugccugaccagaaccgacagaggcugguacugcgacaacgccggcagcgugagcuucuucccccaggccgagaccugcaaggugugcagcaacagaguguucugcgacaccaugaacagccugacccugcccagcgaggugaaccugugcaacguggacaucuucaaccccaaguacgacugcaagaucaugaccagcaagaccgacgugagcagcagcgugaucaccagccugggcgccaucgugagcugcuacggcaagaccaagugcaccgccagcaacaagaacaagggcaucaucaagaccuucagcaacggcugcgacuacgugagcaacaagggcguggacaccgugagcgugggcaacacccuguacuacgugaacaagcaggagggcaagagccuguacgugaagggcgagcccaucaucaacuucuacgacccccugguguuccccagcgacgaguucgacgccagcaucagccaggugaacgagaagaucaaccagagccuggccuucaucagaaagagcgacgagcugcugcacaacgugaacgccggcaagagcaccaccaacaucaugaucaccaccaucaucaucgugaucaucgugauccugcugagccugaucgccgugggccugcugcuguacugcaaggccagauga

SEQ ID NO: 7177 - RNA, 1545 nt, Artificial Sequence
  derived and/or modified CDS sequence (opt5) from HRSV(A2)__F-del_DSCav1_mut7
auggagcugcucauccugaaggccaacgcuauuaccacaauccuuacggccgugaccuucugcuuugcgagcggccagaauauuacagaagaguucuaccaauccaccuguucugcugucagcaaaggguaucuguccgcccucagaacaggaugguacaccucuguuaucacaauugaacugagcaacaucaaggagaauaaaugcaacggcaccgacgccaaggugaaacuuaucaagcaggaacuggauaaguauaaaaaugcugugacggagcuccagaugcugauguguuccacccccgccacagggucuggaagcgcuauugccuccggcgucgcggugugcaagguucugcaccucgagggggaagugaacaaaaucaagagcgcccugcuuucuaccaauaaagcugucgugucccugagcaacggaguuucugugcucacauuuaagguccuggaccuuaagaauuacauugauaaacagcugcucccuauccugaacaagcaauccuguagcauuucuaauaucgagaccgugauggaguuccagcagaaaaacaaucggcugcucgaaauuacgcgcgaguuuuccgugaacgccggcgucacaaccccgguuagcacauauaugcugaccaauuccgaacuucugucucucaucaacgacaugcccaucaccaacgaucagaagaaacugaugagcaauaacgugcaaauugugagacagcaguccuacagcaucaugugcauuaucaaggaggaaguccuugcuuaugugguucagcugccucucuacggcgugauugacacacccuguuggaaacugcauacgucuccucugugcaccacaaauaccaaggagggguccaacaucugucucacacggaccgaucgcggaugguacugcgacaaugccggcagcgucucuuucuuuccccaagcggaaacguguaaggugugcagcaacagaguuuucugcgauacaaugaacucccugacccuuccuucugaggugaaucuguguaaugucgacaucuuuaacccgaaauaugauugcaagauuaugaccagcaaaacagacguguccagcucugucaucaccucccucggggccauugugagcuguuacggaaagacaaaaugcacggcuucuaauaagaacaagggcaucauuaaaaccuucuccaaugggugugauuauguuagcaacaagggaguggacacagucuccgugggcaauacccuguacuauguuaacaaacaggagggcaagucucuuuacgugaaaggggaacccaucaucaacuuuuaugacccucuggucuuccccagcgaugaguuugacgccuccauuucucaggugaaugaaaagaucaaccaaagccucgcuuucauucggaaguccgaugagcugcugcacaaugugaacgccggaaaaagcacaaccaauaucaugauuacgaccaucauuaucguuaucauugucauccuccugucucuuauugccgugggccugcuccuguacugcaaggcucgcuga

SEQ ID NO: 7178 - RNA, 1545 nt, Artificial Sequence
  derived and/or modified CDS sequence (opt6) from HRSV(A2)__F-del_DSCav1_mut7
auggaauuacuaauccucaaagcaaacgcaauuacaaccauacuaaccgcugucaccuuuuguuuugccucaggacaaaacauaacugaagaauuuuaccaaucaacaugcuccgcaguaucuaaaggauaccucagcgcguuaagaacaggaugguacacaucgguaauaaccaucgaauuauccaacauaaaagaaaauaaaugcaauggaacagacgcaaaagucaaauuaauuaaacaagaacuagacaaauauaaaaacgcaguaaccgaauuacaaaugcuaauguguucaacaccagcaacaggaucaggaucagcuauagcuucaggaguugccguaugcaaagugcuacacuuagaaggagaagugaauaaaauaaaaucagcucuauuaucaacgaacaaagccguaguaucucuaucaaauggcguaucaguacucacauucaaaguacucgaccuaaaaaacuauauagauaaacaacuauuacccauccuaaauaaacaaagcugcucuauaucaaacaucgaaacaguaauggaauuucaacaaaaaaacaacagacuacuagaaauaacccgagaguucucaguuaaugcaggaguaacaacaccagucucaacauacaugcucacaaacucagaacuccuaucacuaauaaaugacaugccaauaacaaacgaccaaaaaaaacucaugucuaacaacguccaaauaguaagacaacaauccuacagcauaauguguauaauaaaagaagaaguuuuagcauacgucguacaacuacccuuauauggcguaauagauacaccaugcuggaaacuccauaccucaccucuauguacaacaaauaccaaagaagguucuaauauaugccuaacacgaacugaccgaggaugguacugugacaacgcaggaucagucucuuucuuuccacaagcagaaaccugcaaaguaugcaguaaccgcguauuuugcgacacaaugaacucccuaaccuuaccaucagaaguaaacuuauguaacguagacauauucaauccaaaauaugacugcaaaauaaugacaucaaaaacagacguaagcucaucaguaauaacuucacuaggcgcaauuguaucaugcuauggaaaaaccaaauguaccgcauccaacaaaaauaaaggaauaauaaaaaccuucucuaacggaugcgacuacguaucaaacaaagguguagauacaguuucuguaggaaacacacucuacuauguaaauaaacaagaaggaaaaucacuauacguaaaaggagaaccaauaauaaacuucuaugacccacuuguauuuccaucugaugaauuugaugcaagcauaucacaaguaaacgaaaaaauaaaccaaucucuagccuuuauacgaaaaagcgacgaauuacuacauaacgucaacgcuggaaaaucaacaacaaacauaaugauaacaacaauaauaauaguaauaauagucauccuauuaucacuaaucgccguaggacuacuccuauacugcaaagcuagauaa

SEQ ID NO: 7179 - RNA, 1545 nt, Artificial Sequence
  derived and/or modified CDS sequence (opt11) from HRSV(A2)__F-del_DSCav1_mut7
auggaacuccucauccucaaagccaacgccauaaccacuauccucacagcagucacuuucugcuucgccucaggacaaaacauaaccgaagaguucuaccaauccacaugcuccgccgucuccaaaggcuaccucucagcgcuccgcaccggcugguacacauccgucaucaccaucgaacuaagcaacauaaaagaaaacaaaugcaacggcaccgacgccaaaguuaaacucaucaagcaagaacucgacaaauacaaaaacgcagucacagaacuucaaaugcucaugugcuccacacccgccacagguucuggcucagcaaucgcaagcggcgucgccguaugcaaaguccuucaccucgaaggcgaagucaacaaaaucaaauccgcccuccucuccaccaauaaagcugucgucucacucuccaacggcgucagcguccucacauucaaaguccucgaccucaaaaacuacauagacaagcaacuccucccgauacucaacaaacaaagcugcucuaucuccaacaucgaaaccgucauggaguuccaacagaaaaacaaucgucuccucgaaaucacccgcgaguucucaguaaacgccggggucaccacaccagucuccaccuacaugcucaccaacuccgaacuccuuagccucauaaacgacaugcccauaaccaacgaccaaaagaaacucaugagcaacaacguacaaauaguccgacaacaauccuauuccaucauguguaucaucaaagaagaaguccucgcauacguaguccaacucccccuauacggcguaaucgacaccccauguuggaaacuccacaccucaccacucuguaccaccaacaccaaagaaggcucaaacaucugccucacccgcacagaccgcggcugguacugcgacaacgcgggcuccgucagcuucuuuccccaagcggaaaccugcaaagucugcagcaacagagucuucugcgacacuaugaacucccucacccuccccucagaagucaaccucugcaacgucgacaucuucaacccgaaauacgacugcaaaaucaugaccagcaaaacugacgucuccucguccgucaucaccucacucggcgcaaucgugagcugcuacggcaaaaccaaaugcaccgccuccaacaaaaacaaaggcaucauaaaaacauucagcaacggcugcgacuacgucucgaacaaaggagucgacaccguaucagugggcaacacccuauacuacguaaacaagcaagaaggcaaaucacucuacguaaaaggcgaacccaucaucaacuucuacgacccccucgucuuccccuccgacgaguucgacgccuccaucucucaagucaacgagaaaaucaaccaaucccuugccuucauacguaaaagcgacgaacuccuucacaacguaaacgccgggaaauccaccacuaacauaaugaucaccaccaucaucaucguuaucauagucauccuccucucucucauagcagucggccuacuccuguacugcaaagcgcgcuaa

SEQ ID NO: 7180 - RNA, 1821 nt, Artificial Sequence
  mRNA product Design a-1 comprising derived and/or modified sequence from HRSV(A2)__F-del_DSCav1_mut7 (opt1)
gggagagucccgcagucggcguccagcggcucugcuuguucgugugugugucguugcaggccuuauucaagcuuaccauggagcugcucauccugaaggccaacgccaucaccaccauccugacggcggugaccuucugcuucgccagcggccagaacaucaccgaggaguucuaccaguccacgugcagcgccgucuccaagggguaccucagcgcccugcggaccggcugguacaccuccgugaucaccaucgagcugagcaacaucaaggagaacaagugcaacgggaccgacgccaaggugaagcucaucaagcaggagcuggacaaguacaagaacgcggucacggagcugcagaugcugaugugcuccaccccggcaaccggcuccggcuccgccaucgcgagcggcgucgccgugugcaaggugcugcaccucgagggggaggucaacaagaucaagagcgcccugcuguccaccaacaaggccguggugagccucuccaacggcgucagcgugcugaccuucaaggugcuggaccucaagaacuacaucgacaagcagcugcugcccauccugaacaagcagagcugcuccaucagcaacaucgagacggugauggaguuccagcagaagaacaaccggcuccuggagaucacccgcgaguucagcgugaacgccggggucaccacccccguguccacguacaugcugaccaacagcgagcuccugucccugaucaacgacaugccgaucaccaacgaccagaagaagcucaugagcaacaacgugcagaucguccggcagcaguccuacagcaucaugugcaucaucaaggaggaggugcuggcguacgugguccagcugccccucuacggcgugaucgacacccccugcuggaagcugcacacgagcccccugugcaccaccaacaccaaggagggguccaacaucugccucacgcgcaccgaccggggcugguacugcgacaacgccggcagcgucuccuucuucccgcaggccgagaccugcaaggugugcagcaaccgcguguucugcgacaccaugaacucccugacgcugcccagcgagguaaaccucugcaacgucgacaucuucaaccccaaguacgacugcaagaucaugaccuccaagaccgacgugagcuccagcgugaucaccucccugggggccaucgucagcugcuacggcaagacgaagugcaccgccagcaacaagaacaaggggaucaucaagaccuucuccaacggcugcgacuacgugagcaacaagggcguggacaccguguccgucgggaacacccuguacuacgugaacaagcaggagggcaagagccucuacgugaagggggagcccaucaucaacuucuacgacccgcuggucuuccccuccgacgaguucgacgcgagcaucucccaggugaacgagaagaucaaccagagccuggccuucauccgcaaguccgacgagcugcuccacaacgugaacgccggcaagagcacgaccaacaucaugaucaccaccaucaucaucgucaucaucgugauccugcugucccucaucgccguggggcugcugcucuacugcaaggcccggugaggacuagucccuguucccagagcccacuuuuuuuucuuuuuuugaaauaaaauagccugucuuucagaucuaaaaaaaaaaaaaaaaaaaaaaaaaaaaaaaaaaaaaaaaaaaaaaaaaaaaaaaaaaaaaaaaugcaucccccccccccccccccccccccccccccccaaaggcucuuuucagagccaccagaauu

SEQ ID NO: 7181 - RNA, 1821 nt, Artificial Sequence
  mRNA product Design a-1 comprising derived and/or modified sequence from HRSV(A2)__F-del_DSCav1_mut7 (opt1)
gggagagucccgcagucggcguccagcggcucugcuuguucgugugugugucguugcaggccuuauucaagcuuaccauggagcugcucauccugaaggccaacgccaucaccaccauccugacggcggugaccuucugcuucgccagcggccagaacaucaccgaggaguucuaccaguccacgugcagcgccgucuccaagggguaccucagcgcccugcgcaccggcugguacaccuccgugaucaccaucgagcugagcaacaucaaggagaacaagugcaacgggaccgacgccaaggugaagcucaucaagcaggagcuggacaaguacaagaacgcggucacggagcugcagaugcucaugugcuccacccccgccaccggcagcggguccgccaucgccagcggcguggcggugugcaagguccugcaccuggagggcgaggugaacaagaucaaguccgcccuccugagcaccaacaaggccguggucucccugagcaacgggguguccgugcucacguucaagguccuggaccugaagaacuacaucgacaagcagcuccugccgauccugaacaagcagagcugcuccaucagcaacaucgagaccgugauggaguuccagcagaagaacaaccggcuccuggagaucacccgcgaguucuccgugaacgccggcgucaccacgcccgugagcaccuacaugcugaccaacagcgagcuccugucccugaucaacgacaugcccaucaccaacgaccagaagaagcucaugagcaacaacgugcagaucguccggcagcaguccuacagcaucaugugcaucaucaaggaggaggugcuggccuacgugguccagcugccccucuacggggugaucgacacgccgugcuggaagcugcacaccagcccccugugcaccaccaacacgaaggagggcagcaacaucugccucacccgcaccgaccgggggugguacugcgacaacgcgggcuccgugagcuucuucccccaggccgagaccugcaaggucugcuccaaccgcguguucugcgacacgaugaacagccugacccugcccuccgaggucaaccucugcaacguggacaucuucaacccgaaguacgacugcaagaucaugaccagcaagaccgacguguccagcuccgucaucacgagccugggcgccaucguguccugcuacgggaagaccaagugcaccgccagcaacaagaacaagggcaucaucaagaccuucuccaacgggugcgacuacgugagcaacaagggcgucgacacggugagcgugggcaacacccuguacuacgucaacaagcaggaggggaagucccucuacgugaagggcgagcccaucaucaacuucuacgacccccugguguuccccagcgacgaguucgacgccuccaucagccaggucaacgagaagaucaaccagucccuggcguucauccggaaguccgacgagcuccugcacaacgugaacgccgggaaguccaccaccaacaucaugaucaccacgaucaucaucgugaucaucgucauccugcucagccugaucgccgugggccugcuccuguacugcaaggcccgcugaggacuagucccuguucccagagcccacuuuuuuuucuuuuuuugaaauaaaauagccugucuuucagaucuaaaaaaaaaaaaaaaaaaaaaaaaaaaaaaaaaaaaaaaaaaaaaaaaaaaaaaaaaaaaaaaaugcaucccccccccccccccccccccccccccccccaaaggcucuuuucagagccaccagaauu

SEQ ID NO: 7182 - RNA, 1821 nt, Artificial Sequence
  mRNA product Design a-1 comprising derived and/or modified sequence from HRSV(A2)__F-del_DSCav1_mut7 (opt2)
gggagagucccgcagucggcguccagcggcucugcuuguucgugugugugucguugcaggccuuauucaagcuuaccauggagcuccucauccucaaggccaacgccaucaccaccauccucaccgccgucaccuucugcuucgccuccggccagaacaucaccgaggaguucuaccaguccaccugcuccgccgucuccaagggcuaccucuccgcccuccgcaccggcugguacaccuccgucaucaccaucgagcucuccaacaucaaggagaacaagugcaacggcaccgacgccaaggucaagcucaucaagcaggagcucgacaaguacaagaacgccgucaccgagcuccagaugcucaugugcuccacccccgccaccggcuccggcuccgccaucgccuccggcgucgccgucugcaagguccuccaccucgagggcgaggucaacaagaucaaguccgcccuccucuccaccaacaaggccgucgucucccucuccaacggcgucuccguccucaccuucaagguccucgaccucaagaacuacaucgacaagcagcuccuccccauccucaacaagcaguccugcuccaucuccaacaucgagaccgucauggaguuccagcagaagaacaaccgccuccucgagaucacccgcgaguucuccgucaacgccggcgucaccacccccgucuccaccuacaugcucaccaacuccgagcuccucucccucaucaacgacaugcccaucaccaacgaccagaagaagcucauguccaacaacguccagaucguccgccagcaguccuacuccaucaugugcaucaucaaggaggagguccucgccuacgucguccagcucccccucuacggcgucaucgacacccccugcuggaagcuccacaccuccccccucugcaccaccaacaccaaggagggcuccaacaucugccucacccgcaccgaccgcggcugguacugcgacaacgccggcuccgucuccuucuucccccaggccgagaccugcaaggucugcuccaaccgcgucuucugcgacaccaugaacucccucacccuccccuccgaggucaaccucugcaacgucgacaucuucaaccccaaguacgacugcaagaucaugaccuccaagaccgacgucuccuccuccgucaucaccucccucggcgccaucgucuccugcuacggcaagaccaagugcaccgccuccaacaagaacaagggcaucaucaagaccuucuccaacggcugcgacuacgucuccaacaagggcgucgacaccgucuccgucggcaacacccucuacuacgucaacaagcaggagggcaagucccucuacgucaagggcgagcccaucaucaacuucuacgacccccucgucuuccccuccgacgaguucgacgccuccaucucccaggucaacgagaagaucaaccagucccucgccuucauccgcaaguccgacgagcuccuccacaacgucaacgccggcaaguccaccaccaacaucaugaucaccaccaucaucaucgucaucaucgucauccuccucucccucaucgccgucggccuccuccucuacugcaaggcccgcugaggacuagucccuguucccagagcccacuuuuuuuucuuuuuuugaaauaaaauagccugucuuucagaucuaaaaaaaaaaaaaaaaaaaaaaaaaaaaaaaaaaaaaaaaaaaaaaaaaaaaaaaaaaaaaaaaugcaucccccccccccccccccccccccccccccccaaaggcucuuuucagagccaccagaauu

SEQ ID NO: 7183 - RNA, 1821 nt, Artificial Sequence
  mRNA product Design a-1 comprising derived and/or modified sequence from HRSV(A2)__F-del_DSCav1_mut7 (opt3)
gggagagucccgcagucggcguccagcggcucugcuuguucgugugugugucguugcaggccuuauucaagcuuaccauggagcugcucauccuuaaggccaacgcuauuaccacaauacugacugcagugacguucugcuuugccagcggccagaauaucaccgaagaguucuaccaauccacauguucugcggucucaaaaggguauuugagugcuuuaagaacuggaugguacaccagcguuauuacaaucgaacuguccaacauuaaggagaauaaaugcaacgguaccgacgccaaggugaaacuaaucaagcaggaacucgauaaguauaaaaaugcaguaacugagcugcagaugcuuauguguucuacacccgccaccggcucggggucagcuauagcaagcggaguggccgucugcaaggugcugcacuuggagggcgaaguuaacaaaaucaagagugcucuccuguccacgaauaaagccguggucucucugagcaacgguguguccguacucacuuuuaagguuuuagaccugaagaauuacauugauaaacagcuuuugccuauccugaacaagcaaucauguaguauuagcaauaucgagaccgugauggaguuccagcagaaaaacaauaggcuacucgaaauaacacgggaguuuucugucaacgcgggggugacuaccccaguguccacauauaugcugaccaauucagaacuucugagcuugauuaacgacaugccgaucacgaacgaucagaagaaacucaugaguaauaacguccaaauuguucgccagcagucuuacuccaucaugugcaucauuaaggaggaagugcuggcauauguagugcaguuaccccuguacggagucauagacacuccuuguuggaaacuccauacaagcccacuuugcaccacuaauacaaaggagggcucgaacaucugucugacccgaacggaucguggcugguacugcgacaaugccgggucuguguccuucuuuccccaagcugaaaccuguaagguuugcucaaacagaguguucugcgauacaaugaauaguuugacucuaccuagcgaggucaaccuguguaauguggacauuuuuaacccaaaauaugauugcaagaucaugaccuccaaaacagacguaucuagcucaguuauaacuagccucggagccauuguguccuguuacgguaagaccaaaugcacagcaagcaauaagaacaagggcaucaucaaaaccuucucuaaugggugugauuaugucucaaacaagggaguggacacugucagugugggcaauacgcuguacuauguuaacaaacaggaggguaagagccuuuacgugaaaggggaacccauuaucaacuuuuaugacccucugguauucccauccgaugaguuugacgcuucuauuucgcaggucaaugaaaagauaaaccaaaguuuggccuucaucaggaaguccgaugagcuccugcacaaugugaacgcgggaaaaucaacaaccaauauuaugaucacuaccaucauuauaguuaucauugugaucuuacugagucuaauugccgucggccuccugcuuuacugcaaggcacggugaggacuagucccuguucccagagcccacuuuuuuuucuuuuuuugaaauaaaauagccugucuuucagaucuaaaaaaaaaaaaaaaaaaaaaaaaaaaaaaaaaaaaaaaaaaaaaaaaaaaaaaaaaaaaaaaaugcaucccccccccccccccccccccccccccccccaaaggcucuuuucagagccaccagaauu

SEQ ID NO: 7184 - RNA, 1821 nt, Artificial Sequence
  mRNA product Design a-1 comprising derived and/or modified sequence from HRSV(A2)__F-del_DSCav1_mut7 (opt4)
gggagagucccgcagucggcguccagcggcucugcuuguucgugugugugucguugcaggccuuauucaagcuuaccauggagcugcugauccugaaggccaacgccaucaccaccauccugaccgccgugaccuucugcuucgccagcggccagaacaucaccgaggaguucuaccagagcaccugcagcgccgugagcaagggcuaccugagcgcccugagaaccggcugguacaccagcgugaucaccaucgagcugagcaacaucaaggagaacaagugcaacggcaccgacgccaaggugaagcugaucaagcaggagcuggacaaguacaagaacgccgugaccgagcugcagaugcugaugugcagcacccccgccaccggcagcggcagcgccaucgccagcggcguggccgugugcaaggugcugcaccuggagggcgaggugaacaagaucaagagcgcccugcugagcaccaacaaggccguggugagccugagcaacggcgugagcgugcugaccuucaaggugcuggaccugaagaacuacaucgacaagcagcugcugcccauccugaacaagcagagcugcagcaucagcaacaucgagaccgugauggaguuccagcagaagaacaacagacugcuggagaucaccagagaguucagcgugaacgccggcgugaccacccccgugagcaccuacaugcugaccaacagcgagcugcugagccugaucaacgacaugcccaucaccaacgaccagaagaagcugaugagcaacaacgugcagaucgugagacagcagagcuacagcaucaugugcaucaucaaggaggaggugcuggccuacguggugcagcugccccuguacggcgugaucgacacccccugcuggaagcugcacaccagcccccugugcaccaccaacaccaaggagggcagcaacaucugccugaccagaaccgacagaggcugguacugcgacaacgccggcagcgugagcuucuucccccaggccgagaccugcaaggugugcagcaacagaguguucugcgacaccaugaacagccugacccugcccagcgaggugaaccugugcaacguggacaucuucaaccccaaguacgacugcaagaucaugaccagcaagaccgacgugagcagcagcgugaucaccagccugggcgccaucgugagcugcuacggcaagaccaagugcaccgccagcaacaagaacaagggcaucaucaagaccuucagcaacggcugcgacuacgugagcaacaagggcguggacaccgugagcgugggcaacacccuguacuacgugaacaagcaggagggcaagagccuguacgugaagggcgagcccaucaucaacuucuacgacccccugguguuccccagcgacgaguucgacgccagcaucagccaggugaacgagaagaucaaccagagccuggccuucaucagaaagagcgacgagcugcugcacaacgugaacgccggcaagagcaccaccaacaucaugaucaccaccaucaucaucgugaucaucgugauccugcugagccugaucgccgugggccugcugcuguacugcaaggccagaugaggacuagucccuguucccagagcccacuuuuuuuucuuuuuuugaaauaaaauagccugucuuucagaucuaaaaaaaaaaaaaaaaaaaaaaaaaaaaaaaaaaaaaaaaaaaaaaaaaaaaaaaaaaaaaaaaugcaucccccccccccccccccccccccccccccccaaaggcucuuuucagagccaccagaauu

SEQ ID NO: 7185 - RNA, 1821 nt, Artificial Sequence
  mRNA product Design a-1 comprising derived and/or modified sequence from HRSV(A2)__F-del_DSCav1_mut7 (opt5)
gggagagucccgcagucggcguccagcggcucugcuuguucgugugugugucguugcaggccuuauucaagcuuaccauggagcugcucauccugaaggccaacgcuauuaccacaauccuuacggccgugaccuucugcuuugcgagcggccagaauauuacagaagaguucuaccaauccaccuguucugcugucagcaaaggguaucuguccgcccucagaacaggaugguacaccucuguuaucacaauugaacugagcaacaucaaggagaauaaaugcaacggcaccgacgccaaggugaaacuuaucaagcaggaacuggauaaguauaaaaaugcugugacggagcuccagaugcugauguguuccacccccgccacagggucuggaagcgcuauugccuccggcgucgcggugugcaagguucugcaccucgagggggaagugaacaaaaucaagagcgcccugcuuucuaccaauaaagcugucgugucccugagcaacggaguuucugugcucacauuuaagguccuggaccuuaagaauuacauugauaaacagcugcucccuauccugaacaagcaauccuguagcauuucuaauaucgagaccgugauggaguuccagcagaaaaacaaucggcugcucgaaauuacgcgcgaguuuuccgugaacgccggcgucacaaccccgguuagcacauauaugcugaccaauuccgaacuucugucucucaucaacgacaugcccaucaccaacgaucagaagaaacugaugagcaauaacgugcaaauugugagacagcaguccuacagcaucaugugcauuaucaaggaggaaguccuugcuuaugugguucagcugccucucuacggcgugauugacacacccuguuggaaacugcauacgucuccucugugcaccacaaauaccaaggagggguccaacaucugucucacacggaccgaucgcggaugguacugcgacaaugccggcagcgucucuuucuuuccccaagcggaaacguguaaggugugcagcaacagaguuuucugcgauacaaugaacucccugacccuuccuucugaggugaaucuguguaaugucgacaucuuuaacccgaaauaugauugcaagauuaugaccagcaaaacagacguguccagcucugucaucaccucccucggggccauugugagcuguuacggaaagacaaaaugcacggcuucuaauaagaacaagggcaucauuaaaaccuucuccaaugggugugauuauguuagcaacaagggaguggacacagucuccgugggcaauacccuguacuauguuaacaaacaggagggcaagucucuuuacgugaaaggggaacccaucaucaacuuuuaugacccucuggucuuccccagcgaugaguuugacgccuccauuucucaggugaaugaaaagaucaaccaaagccucgcuuucauucggaaguccgaugagcugcugcacaaugugaacgccggaaaaagcacaaccaauaucaugauuacgaccaucauuaucguuaucauugucauccuccugucucuuauugccgugggccugcuccuguacugcaaggcucgcugaggacuagucccuguucccagagcccacuuuuuuuucuuuuuuugaaauaaaauagccugucuuucagaucuaaaaaaaaaaaaaaaaaaaaaaaaaaaaaaaaaaaaaaaaaaaaaaaaaaaaaaaaaaaaaaaaugcaucccccccccccccccccccccccccccccccaaaggcucuuuucagagccaccagaauu

SEQ ID NO: 7186 - RNA, 1821 nt, Artificial Sequence
  mRNA product Design a-1 comprising derived and/or modified sequence from HRSV(A2)__F-del_DSCav1_mut7 (opt6)
gggagagucccgcagucggcguccagcggcucugcuuguucgugugugugucguugcaggccuuauucaagcuuaccauggaauuacuaauccucaaagcaaacgcaauuacaaccauacuaaccgcugucaccuuuuguuuugccucaggacaaaacauaacugaagaauuuuaccaaucaacaugcuccgcaguaucuaaaggauaccucagcgcguuaagaacaggaugguacacaucgguaauaaccaucgaauuauccaacauaaaagaaaauaaaugcaauggaacagacgcaaaagucaaauuaauuaaacaagaacuagacaaauauaaaaacgcaguaaccgaauuacaaaugcuaauguguucaacaccagcaacaggaucaggaucagcuauagcuucaggaguugccguaugcaaagugcuacacuuagaaggagaagugaauaaaauaaaaucagcucuauuaucaacgaacaaagccguaguaucucuaucaaauggcguaucaguacucacauucaaaguacucgaccuaaaaaacuauauagauaaacaacuauuacccauccuaaauaaacaaagcugcucuauaucaaacaucgaaacaguaauggaauuucaacaaaaaaacaacagacuacuagaaauaacccgagaguucucaguuaaugcaggaguaacaacaccagucucaacauacaugcucacaaacucagaacuccuaucacuaauaaaugacaugccaauaacaaacgaccaaaaaaaacucaugucuaacaacguccaaauaguaagacaacaauccuacagcauaauguguauaauaaaagaagaaguuuuagcauacgucguacaacuacccuuauauggcguaauagauacaccaugcuggaaacuccauaccucaccucuauguacaacaaauaccaaagaagguucuaauauaugccuaacacgaacugaccgaggaugguacugugacaacgcaggaucagucucuuucuuuccacaagcagaaaccugcaaaguaugcaguaaccgcguauuuugcgacacaaugaacucccuaaccuuaccaucagaaguaaacuuauguaacguagacauauucaauccaaaauaugacugcaaaauaaugacaucaaaaacagacguaagcucaucaguaauaacuucacuaggcgcaauuguaucaugcuauggaaaaaccaaauguaccgcauccaacaaaaauaaaggaauaauaaaaaccuucucuaacggaugcgacuacguaucaaacaaagguguagauacaguuucuguaggaaacacacucuacuauguaaauaaacaagaaggaaaaucacuauacguaaaaggagaaccaauaauaaacuucuaugacccacuuguauuuccaucugaugaauuugaugcaagcauaucacaaguaaacgaaaaaauaaaccaaucucuagccuuuauacgaaaaagcgacgaauuacuacauaacgucaacgcuggaaaaucaacaacaaacauaaugauaacaacaauaauaauaguaauaauagucauccuauuaucacuaaucgccguaggacuacuccuauacugcaaagcuagauaaggacuagucccuguucccagagcccacuuuuuuuucuuuuuuugaaauaaaauagccugucuuucagaucuaaaaaaaaaaaaaaaaaaaaaaaaaaaaaaaaaaaaaaaaaaaaaaaaaaaaaaaaaaaaaaaaugcaucccccccccccccccccccccccccccccccaaaggcucuuuucagagccaccagaauu

SEQ ID NO: 7187 - RNA, 1821 nt, Artificial Sequence
  mRNA product Design a-1 comprising derived and/or modified sequence from HRSV(A2)__F-del_DSCav1_mut7 (opt11)
gggagagucccgcagucggcguccagcggcucugcuuguucgugugugugucguugcaggccuuauucaagcuuaccauggaacuccucauccucaaagccaacgccauaaccacuauccucacagcagucacuuucugcuucgccucaggacaaaacauaaccgaagaguucuaccaauccacaugcuccgccgucuccaaaggcuaccucucagcgcuccgcaccggcugguacacauccgucaucaccaucgaacuaagcaacauaaaagaaaacaaaugcaacggcaccgacgccaaaguuaaacucaucaagcaagaacucgacaaauacaaaaacgcagucacagaacuucaaaugcucaugugcuccacacccgccacagguucuggcucagcaaucgcaagcggcgucgccguaugcaaaguccuucaccucgaaggcgaagucaacaaaaucaaauccgcccuccucuccaccaauaaagcugucgucucacucuccaacggcgucagcguccucacauucaaaguccucgaccucaaaaacuacauagacaagcaacuccucccgauacucaacaaacaaagcugcucuaucuccaacaucgaaaccgucauggaguuccaacagaaaaacaaucgucuccucgaaaucacccgcgaguucucaguaaacgccggggucaccacaccagucuccaccuacaugcucaccaacuccgaacuccuuagccucauaaacgacaugcccauaaccaacgaccaaaagaaacucaugagcaacaacguacaaauaguccgacaacaauccuauuccaucauguguaucaucaaagaagaaguccucgcauacguaguccaacucccccuauacggcguaaucgacaccccauguuggaaacuccacaccucaccacucuguaccaccaacaccaaagaaggcucaaacaucugccucacccgcacagaccgcggcugguacugcgacaacgcgggcuccgucagcuucuuuccccaagcggaaaccugcaaagucugcagcaacagagucuucugcgacacuaugaacucccucacccuccccucagaagucaaccucugcaacgucgacaucuucaacccgaaauacgacugcaaaaucaugaccagcaaaacugacgucuccucguccgucaucaccucacucggcgcaaucgugagcugcuacggcaaaaccaaaugcaccgccuccaacaaaaacaaaggcaucauaaaaacauucagcaacggcugcgacuacgucucgaacaaaggagucgacaccguaucagugggcaacacccuauacuacguaaacaagcaagaaggcaaaucacucuacguaaaaggcgaacccaucaucaacuucuacgacccccucgucuuccccuccgacgaguucgacgccuccaucucucaagucaacgagaaaaucaaccaaucccuugccuucauacguaaaagcgacgaacuccuucacaacguaaacgccgggaaauccaccacuaacauaaugaucaccaccaucaucaucguuaucauagucauccuccucucucucauagcagucggccuacuccuguacugcaaagcgcgcuaaggacuagucccuguucccagagcccacuuuuuuuucuuuuuuugaaauaaaauagccugucuuucagaucuaaaaaaaaaaaaaaaaaaaaaaaaaaaaaaaaaaaaaaaaaaaaaaaaaaaaaaaaaaaaaaaaugcaucccccccccccccccccccccccccccccccaaaggcucuuuucagagccaccagaauu

SEQ ID NO: 7188 - RNA, 1840 nt, Artificial Sequence
  mRNA product Design a-2 comprising derived and/or modified sequence from HRSV(A2)__F-del_DSCav1_mut7 (opt1)
gggagaguccgcucagccagguugcagaagcggcuuagcguguguccuaaucuucucucugcguguagguaggccugugccgcaaacaagcuuaccauggagcugcucauccugaaggccaacgccaucaccaccauccugacggcggugaccuucugcuucgccagcggccagaacaucaccgaggaguucuaccaguccacgugcagcgccgucuccaagggguaccucagcgcccugcggaccggcugguacaccuccgugaucaccaucgagcugagcaacaucaaggagaacaagugcaacgggaccgacgccaaggugaagcucaucaagcaggagcuggacaaguacaagaacgcggucacggagcugcagaugcugaugugcuccaccccggcaaccggcuccggcuccgccaucgcgagcggcgucgccgugugcaaggugcugcaccucgagggggaggucaacaagaucaagagcgcccugcuguccaccaacaaggccguggugagccucuccaacggcgucagcgugcugaccuucaaggugcuggaccucaagaacuacaucgacaagcagcugcugcccauccugaacaagcagagcugcuccaucagcaacaucgagacggugauggaguuccagcagaagaacaaccggcuccuggagaucacccgcgaguucagcgugaacgccggggucaccacccccguguccacguacaugcugaccaacagcgagcuccugucccugaucaacgacaugccgaucaccaacgaccagaagaagcucaugagcaacaacgugcagaucguccggcagcaguccuacagcaucaugugcaucaucaaggaggaggugcuggcguacgugguccagcugccccucuacggcgugaucgacacccccugcuggaagcugcacacgagcccccugugcaccaccaacaccaaggagggguccaacaucugccucacgcgcaccgaccggggcugguacugcgacaacgccggcagcgucuccuucuucccgcaggccgagaccugcaaggugugcagcaaccgcguguucugcgacaccaugaacucccugacgcugcccagcgagguaaaccucugcaacgucgacaucuucaaccccaaguacgacugcaagaucaugaccuccaagaccgacgugagcuccagcgugaucaccucccugggggccaucgucagcugcuacggcaagacgaagugcaccgccagcaacaagaacaaggggaucaucaagaccuucuccaacggcugcgacuacgugagcaacaagggcguggacaccguguccgucgggaacacccuguacuacgugaacaagcaggagggcaagagccucuacgugaagggggagcccaucaucaacuucuacgacccgcuggucuuccccuccgacgaguucgacgcgagcaucucccaggugaacgagaagaucaaccagagccuggccuucauccgcaaguccgacgagcugcuccacaacgugaacgccggcaagagcacgaccaacaucaugaucaccaccaucaucaucgucaucaucgugauccugcugucccucaucgccguggggcugcugcucuacugcaaggcccggugaggacuagucccuguucccagagcccacuuuuuuuucuuuuuuugaaauaaaauagccugucuuucagaucuaaaaaaaaaaaaaaaaaaaaaaaaaaaaaaaaaaaaaaaaaaaaaaaaaaaaaaaaaaaaaaaaugcaucccccccccccccccccccccccccccccccaaaggcucuuuucagagccaccagaauu

SEQ ID NO: 7189 - RNA, 1840 nt, Artificial Sequence
  mRNA product Design a-2 comprising derived and/or modified sequence from HRSV(A2)__F-del_DSCav1_mut7 (opt1)
gggagaguccgcucagccagguugcagaagcggcuuagcguguguccuaaucuucucucugcguguagguaggccugugccgcaaacaagcuuaccauggagcugcucauccugaaggccaacgccaucaccaccauccugacggcggugaccuucugcuucgccagcggccagaacaucaccgaggaguucuaccaguccacgugcagcgccgucuccaagggguaccucagcgcccugcgcaccggcugguacaccuccgugaucaccaucgagcugagcaacaucaaggagaacaagugcaacgggaccgacgccaaggugaagcucaucaagcaggagcuggacaaguacaagaacgcggucacggagcugcagaugcucaugugcuccacccccgccaccggcagcggguccgccaucgccagcggcguggcggugugcaagguccugcaccuggagggcgaggugaacaagaucaaguccgcccuccugagcaccaacaaggccguggucucccugagcaacgggguguccgugcucacguucaagguccuggaccugaagaacuacaucgacaagcagcuccugccgauccugaacaagcagagcugcuccaucagcaacaucgagaccgugauggaguuccagcagaagaacaaccggcuccuggagaucacccgcgaguucuccgugaacgccggcgucaccacgcccgugagcaccuacaugcugaccaacagcgagcuccugucccugaucaacgacaugcccaucaccaacgaccagaagaagcucaugagcaacaacgugcagaucguccggcagcaguccuacagcaucaugugcaucaucaaggaggaggugcuggccuacgugguccagcugccccucuacggggugaucgacacgccgugcuggaagcugcacaccagcccccugugcaccaccaacacgaaggagggcagcaacaucugccucacccgcaccgaccgggggugguacugcgacaacgcgggcuccgugagcuucuucccccaggccgagaccugcaaggucugcuccaaccgcguguucugcgacacgaugaacagccugacccugcccuccgaggucaaccucugcaacguggacaucuucaacccgaaguacgacugcaagaucaugaccagcaagaccgacguguccagcuccgucaucacgagccugggcgccaucguguccugcuacgggaagaccaagugcaccgccagcaacaagaacaagggcaucaucaagaccuucuccaacgggugcgacuacgugagcaacaagggcgucgacacggugagcgugggcaacacccuguacuacgucaacaagcaggaggggaagucccucuacgugaagggcgagcccaucaucaacuucuacgacccccugguguuccccagcgacgaguucgacgccuccaucagccaggucaacgagaagaucaaccagucccuggcguucauccggaaguccgacgagcuccugcacaacgugaacgccgggaaguccaccaccaacaucaugaucaccacgaucaucaucgugaucaucgucauccugcucagccugaucgccgugggccugcuccuguacugcaaggcccgcugaggacuagucccuguucccagagcccacuuuuuuuucuuuuuuugaaauaaaauagccugucuuucagaucuaaaaaaaaaaaaaaaaaaaaaaaaaaaaaaaaaaaaaaaaaaaaaaaaaaaaaaaaaaaaaaaaugcaucccccccccccccccccccccccccccccccaaaggcucuuuucagagccaccagaauu

SEQ ID NO: 7190 - RNA, 1840 nt, Artificial Sequence
  mRNA product Design a-2 comprising derived and/or modified sequence from HRSV(A2)__F-del_DSCav1_mut7 (opt2)
gggagaguccgcucagccagguugcagaagcggcuuagcguguguccuaaucuucucucugcguguagguaggccugugccgcaaacaagcuuaccauggagcuccucauccucaaggccaacgccaucaccaccauccucaccgccgucaccuucugcuucgccuccggccagaacaucaccgaggaguucuaccaguccaccugcuccgccgucuccaagggcuaccucuccgcccuccgcaccggcugguacaccuccgucaucaccaucgagcucuccaacaucaaggagaacaagugcaacggcaccgacgccaaggucaagcucaucaagcaggagcucgacaaguacaagaacgccgucaccgagcuccagaugcucaugugcuccacccccgccaccggcuccggcuccgccaucgccuccggcgucgccgucugcaagguccuccaccucgagggcgaggucaacaagaucaaguccgcccuccucuccaccaacaaggccgucgucucccucuccaacggcgucuccguccucaccuucaagguccucgaccucaagaacuacaucgacaagcagcuccuccccauccucaacaagcaguccugcuccaucuccaacaucgagaccgucauggaguuccagcagaagaacaaccgccuccucgagaucacccgcgaguucuccgucaacgccggcgucaccacccccgucuccaccuacaugcucaccaacuccgagcuccucucccucaucaacgacaugcccaucaccaacgaccagaagaagcucauguccaacaacguccagaucguccgccagcaguccuacuccaucaugugcaucaucaaggaggagguccucgccuacgucguccagcucccccucuacggcgucaucgacacccccugcuggaagcuccacaccuccccccucugcaccaccaacaccaaggagggcuccaacaucugccucacccgcaccgaccgcggcugguacugcgacaacgccggcuccgucuccuucuucccccaggccgagaccugcaaggucugcuccaaccgcgucuucugcgacaccaugaacucccucacccuccccuccgaggucaaccucugcaacgucgacaucuucaaccccaaguacgacugcaagaucaugaccuccaagaccgacgucuccuccuccgucaucaccucccucggcgccaucgucuccugcuacggcaagaccaagugcaccgccuccaacaagaacaagggcaucaucaagaccuucuccaacggcugcgacuacgucuccaacaagggcgucgacaccgucuccgucggcaacacccucuacuacgucaacaagcaggagggcaagucccucuacgucaagggcgagcccaucaucaacuucuacgacccccucgucuuccccuccgacgaguucgacgccuccaucucccaggucaacgagaagaucaaccagucccucgccuucauccgcaaguccgacgagcuccuccacaacgucaacgccggcaaguccaccaccaacaucaugaucaccaccaucaucaucgucaucaucgucauccuccucucccucaucgccgucggccuccuccucuacugcaaggcccgcugaggacuagucccuguucccagagcccacuuuuuuuucuuuuuuugaaauaaaauagccugucuuucagaucuaaaaaaaaaaaaaaaaaaaaaaaaaaaaaaaaaaaaaaaaaaaaaaaaaaaaaaaaaaaaaaaaugcaucccccccccccccccccccccccccccccccaaaggcucuuuucagagccaccagaauu

SEQ ID NO: 7191 - RNA, 1840 nt, Artificial Sequence
  mRNA product Design a-2 comprising derived and/or modified sequence from HRSV(A2)__F-del_DSCav1_mut7 (opt3)
gggagaguccgcucagccagguugcagaagcggcuuagcguguguccuaaucuucucucugcguguagguaggccugugccgcaaacaagcuuaccauggagcugcucauccuuaaggccaacgcuauuaccacaauacugacugcagugacguucugcuuugccagcggccagaauaucaccgaagaguucuaccaauccacauguucugcggucucaaaaggguauuugagugcuuuaagaacuggaugguacaccagcguuauuacaaucgaacuguccaacauuaaggagaauaaaugcaacgguaccgacgccaaggugaaacuaaucaagcaggaacucgauaaguauaaaaaugcaguaacugagcugcagaugcuuauguguucuacacccgccaccggcucggggucagcuauagcaagcggaguggccgucugcaaggugcugcacuuggagggcgaaguuaacaaaaucaagagugcucuccuguccacgaauaaagccguggucucucugagcaacgguguguccguacucacuuuuaagguuuuagaccugaagaauuacauugauaaacagcuuuugccuauccugaacaagcaaucauguaguauuagcaauaucgagaccgugauggaguuccagcagaaaaacaauaggcuacucgaaauaacacgggaguuuucugucaacgcgggggugacuaccccaguguccacauauaugcugaccaauucagaacuucugagcuugauuaacgacaugccgaucacgaacgaucagaagaaacucaugaguaauaacguccaaauuguucgccagcagucuuacuccaucaugugcaucauuaaggaggaagugcuggcauauguagugcaguuaccccuguacggagucauagacacuccuuguuggaaacuccauacaagcccacuuugcaccacuaauacaaaggagggcucgaacaucugucugacccgaacggaucguggcugguacugcgacaaugccgggucuguguccuucuuuccccaagcugaaaccuguaagguuugcucaaacagaguguucugcgauacaaugaauaguuugacucuaccuagcgaggucaaccuguguaauguggacauuuuuaacccaaaauaugauugcaagaucaugaccuccaaaacagacguaucuagcucaguuauaacuagccucggagccauuguguccuguuacgguaagaccaaaugcacagcaagcaauaagaacaagggcaucaucaaaaccuucucuaaugggugugauuaugucucaaacaagggaguggacacugucagugugggcaauacgcuguacuauguuaacaaacaggaggguaagagccuuuacgugaaaggggaacccauuaucaacuuuuaugacccucugguauucccauccgaugaguuugacgcuucuauuucgcaggucaaugaaaagauaaaccaaaguuuggccuucaucaggaaguccgaugagcuccugcacaaugugaacgcgggaaaaucaacaaccaauauuaugaucacuaccaucauuauaguuaucauugugaucuuacugagucuaauugccgucggccuccugcuuuacugcaaggcacggugaggacuagucccuguucccagagcccacuuuuuuuucuuuuuuugaaauaaaauagccugucuuucagaucuaaaaaaaaaaaaaaaaaaaaaaaaaaaaaaaaaaaaaaaaaaaaaaaaaaaaaaaaaaaaaaaaugcaucccccccccccccccccccccccccccccccaaaggcucuuuucagagccaccagaauu

SEQ ID NO: 7192 - RNA, 1840 nt, Artificial Sequence
  mRNA product Design a-2 comprising derived and/or modified sequence from HRSV(A2)__F-del_DSCav1_mut7 (opt4)
gggagaguccgcucagccagguugcagaagcggcuuagcguguguccuaaucuucucucugcguguagguaggccugugccgcaaacaagcuuaccauggagcugcugauccugaaggccaacgccaucaccaccauccugaccgccgugaccuucugcuucgccagcggccagaacaucaccgaggaguucuaccagagcaccugcagcgccgugagcaagggcuaccugagcgcccugagaaccggcugguacaccagcgugaucaccaucgagcugagcaacaucaaggagaacaagugcaacggcaccgacgccaaggugaagcugaucaagcaggagcuggacaaguacaagaacgccgugaccgagcugcagaugcugaugugcagcacccccgccaccggcagcggcagcgccaucgccagcggcguggccgugugcaaggugcugcaccuggagggcgaggugaacaagaucaagagcgcccugcugagcaccaacaaggccguggugagccugagcaacggcgugagcgugcugaccuucaaggugcuggaccugaagaacuacaucgacaagcagcugcugcccauccugaacaagcagagcugcagcaucagcaacaucgagaccgugauggaguuccagcagaagaacaacagacugcuggagaucaccagagaguucagcgugaacgccggcgugaccacccccgugagcaccuacaugcugaccaacagcgagcugcugagccugaucaacgacaugcccaucaccaacgaccagaagaagcugaugagcaacaacgugcagaucgugagacagcagagcuacagcaucaugugcaucaucaaggaggaggugcuggccuacguggugcagcugccccuguacggcgugaucgacacccccugcuggaagcugcacaccagcccccugugcaccaccaacaccaaggagggcagcaacaucugccugaccagaaccgacagaggcugguacugcgacaacgccggcagcgugagcuucuucccccaggccgagaccugcaaggugugcagcaacagaguguucugcgacaccaugaacagccugacccugcccagcgaggugaaccugugcaacguggacaucuucaaccccaaguacgacugcaagaucaugaccagcaagaccgacgugagcagcagcgugaucaccagccugggcgccaucgugagcugcuacggcaagaccaagugcaccgccagcaacaagaacaagggcaucaucaagaccuucagcaacggcugcgacuacgugagcaacaagggcguggacaccgugagcgugggcaacacccuguacuacgugaacaagcaggagggcaagagccuguacgugaagggcgagcccaucaucaacuucuacgacccccugguguuccccagcgacgaguucgacgccagcaucagccaggugaacgagaagaucaaccagagccuggccuucaucagaaagagcgacgagcugcugcacaacgugaacgccggcaagagcaccaccaacaucaugaucaccaccaucaucaucgugaucaucgugauccugcugagccugaucgccgugggccugcugcuguacugcaaggccagaugaggacuagucccuguucccagagcccacuuuuuuuucuuuuuuugaaauaaaauagccugucuuucagaucuaaaaaaaaaaaaaaaaaaaaaaaaaaaaaaaaaaaaaaaaaaaaaaaaaaaaaaaaaaaaaaaaugcaucccccccccccccccccccccccccccccccaaaggcucuuuucagagccaccagaauu

SEQ ID NO: 7193 - RNA, 1840 nt, Artificial Sequence
  mRNA product Design a-2 comprising derived and/or modified sequence from HRSV(A2)__F-del_DSCav1_mut7 (opt5)
gggagaguccgcucagccagguugcagaagcggcuuagcguguguccuaaucuucucucugcguguagguaggccugugccgcaaacaagcuuaccauggagcugcucauccugaaggccaacgcuauuaccacaauccuuacggccgugaccuucugcuuugcgagcggccagaauauuacagaagaguucuaccaauccaccuguucugcugucagcaaaggguaucuguccgcccucagaacaggaugguacaccucuguuaucacaauugaacugagcaacaucaaggagaauaaaugcaacggcaccgacgccaaggugaaacuuaucaagcaggaacuggauaaguauaaaaaugcugugacggagcuccagaugcugauguguuccacccccgccacagggucuggaagcgcuauugccuccggcgucgcggugugcaagguucugcaccucgagggggaagugaacaaaaucaagagcgcccugcuuucuaccaauaaagcugucgugucccugagcaacggaguuucugugcucacauuuaagguccuggaccuuaagaauuacauugauaaacagcugcucccuauccugaacaagcaauccuguagcauuucuaauaucgagaccgugauggaguuccagcagaaaaacaaucggcugcucgaaauuacgcgcgaguuuuccgugaacgccggcgucacaaccccgguuagcacauauaugcugaccaauuccgaacuucugucucucaucaacgacaugcccaucaccaacgaucagaagaaacugaugagcaauaacgugcaaauugugagacagcaguccuacagcaucaugugcauuaucaaggaggaaguccuugcuuaugugguucagcugccucucuacggcgugauugacacacccuguuggaaacugcauacgucuccucugugcaccacaaauaccaaggagggguccaacaucugucucacacggaccgaucgcggaugguacugcgacaaugccggcagcgucucuuucuuuccccaagcggaaacguguaaggugugcagcaacagaguuuucugcgauacaaugaacucccugacccuuccuucugaggugaaucuguguaaugucgacaucuuuaacccgaaauaugauugcaagauuaugaccagcaaaacagacguguccagcucugucaucaccucccucggggccauugugagcuguuacggaaagacaaaaugcacggcuucuaauaagaacaagggcaucauuaaaaccuucuccaaugggugugauuauguuagcaacaagggaguggacacagucuccgugggcaauacccuguacuauguuaacaaacaggagggcaagucucuuuacgugaaaggggaacccaucaucaacuuuuaugacccucuggucuuccccagcgaugaguuugacgccuccauuucucaggugaaugaaaagaucaaccaaagccucgcuuucauucggaaguccgaugagcugcugcacaaugugaacgccggaaaaagcacaaccaauaucaugauuacgaccaucauuaucguuaucauugucauccuccugucucuuauugccgugggccugcuccuguacugcaaggcucgcugaggacuagucccuguucccagagcccacuuuuuuuucuuuuuuugaaauaaaauagccugucuuucagaucuaaaaaaaaaaaaaaaaaaaaaaaaaaaaaaaaaaaaaaaaaaaaaaaaaaaaaaaaaaaaaaaaugcaucccccccccccccccccccccccccccccccaaaggcucuuuucagagccaccagaauu

SEQ ID NO: 7194 - RNA, 1840 nt, Artificial Sequence
  mRNA product Design a-2 comprising derived and/or modified sequence from HRSV(A2)__F-del_DSCav1_mut7 (opt6)
gggagaguccgcucagccagguugcagaagcggcuuagcguguguccuaaucuucucucugcguguagguaggccugugccgcaaacaagcuuaccauggaauuacuaauccucaaagcaaacgcaauuacaaccauacuaaccgcugucaccuuuuguuuugccucaggacaaaacauaacugaagaauuuuaccaaucaacaugcuccgcaguaucuaaaggauaccucagcgcguuaagaacaggaugguacacaucgguaauaaccaucgaauuauccaacauaaaagaaaauaaaugcaauggaacagacgcaaaagucaaauuaauuaaacaagaacuagacaaauauaaaaacgcaguaaccgaauuacaaaugcuaauguguucaacaccagcaacaggaucaggaucagcuauagcuucaggaguugccguaugcaaagugcuacacuuagaaggagaagugaauaaaauaaaaucagcucuauuaucaacgaacaaagccguaguaucucuaucaaauggcguaucaguacucacauucaaaguacucgaccuaaaaaacuauauagauaaacaacuauuacccauccuaaauaaacaaagcugcucuauaucaaacaucgaaacaguaauggaauuucaacaaaaaaacaacagacuacuagaaauaacccgagaguucucaguuaaugcaggaguaacaacaccagucucaacauacaugcucacaaacucagaacuccuaucacuaauaaaugacaugccaauaacaaacgaccaaaaaaaacucaugucuaacaacguccaaauaguaagacaacaauccuacagcauaauguguauaauaaaagaagaaguuuuagcauacgucguacaacuacccuuauauggcguaauagauacaccaugcuggaaacuccauaccucaccucuauguacaacaaauaccaaagaagguucuaauauaugccuaacacgaacugaccgaggaugguacugugacaacgcaggaucagucucuuucuuuccacaagcagaaaccugcaaaguaugcaguaaccgcguauuuugcgacacaaugaacucccuaaccuuaccaucagaaguaaacuuauguaacguagacauauucaauccaaaauaugacugcaaaauaaugacaucaaaaacagacguaagcucaucaguaauaacuucacuaggcgcaauuguaucaugcuauggaaaaaccaaauguaccgcauccaacaaaaauaaaggaauaauaaaaaccuucucuaacggaugcgacuacguaucaaacaaagguguagauacaguuucuguaggaaacacacucuacuauguaaauaaacaagaaggaaaaucacuauacguaaaaggagaaccaauaauaaacuucuaugacccacuuguauuuccaucugaugaauuugaugcaagcauaucacaaguaaacgaaaaaauaaaccaaucucuagccuuuauacgaaaaagcgacgaauuacuacauaacgucaacgcuggaaaaucaacaacaaacauaaugauaacaacaauaauaauaguaauaauagucauccuauuaucacuaaucgccguaggacuacuccuauacugcaaagcuagauaaggacuagucccuguucccagagcccacuuuuuuuucuuuuuuugaaauaaaauagccugucuuucagaucuaaaaaaaaaaaaaaaaaaaaaaaaaaaaaaaaaaaaaaaaaaaaaaaaaaaaaaaaaaaaaaaaugcaucccccccccccccccccccccccccccccccaaaggcucuuuucagagccaccagaauu

SEQ ID NO: 7195 - RNA, 1840 nt, Artificial Sequence
  mRNA product Design a-2 comprising derived and/or modified sequence from HRSV(A2)__F-del_DSCav1_mut7 (opt11)
gggagaguccgcucagccagguugcagaagcggcuuagcguguguccuaaucuucucucugcguguagguaggccugugccgcaaacaagcuuaccauggaacuccucauccucaaagccaacgccauaaccacuauccucacagcagucacuuucugcuucgccucaggacaaaacauaaccgaagaguucuaccaauccacaugcuccgccgucuccaaaggcuaccucucagcgcuccgcaccggcugguacacauccgucaucaccaucgaacuaagcaacauaaaagaaaacaaaugcaacggcaccgacgccaaaguuaaacucaucaagcaagaacucgacaaauacaaaaacgcagucacagaacuucaaaugcucaugugcuccacacccgccacagguucuggcucagcaaucgcaagcggcgucgccguaugcaaaguccuucaccucgaaggcgaagucaacaaaaucaaauccgcccuccucuccaccaauaaagcugucgucucacucuccaacggcgucagcguccucacauucaaaguccucgaccucaaaaacuacauagacaagcaacuccucccgauacucaacaaacaaagcugcucuaucuccaacaucgaaaccgucauggaguuccaacagaaaaacaaucgucuccucgaaaucacccgcgaguucucaguaaacgccggggucaccacaccagucuccaccuacaugcucaccaacuccgaacuccuuagccucauaaacgacaugcccauaaccaacgaccaaaagaaacucaugagcaacaacguacaaauaguccgacaacaauccuauuccaucauguguaucaucaaagaagaaguccucgcauacguaguccaacucccccuauacggcguaaucgacaccccauguuggaaacuccacaccucaccacucuguaccaccaacaccaaagaaggcucaaacaucugccucacccgcacagaccgcggcugguacugcgacaacgcgggcuccgucagcuucuuuccccaagcggaaaccugcaaagucugcagcaacagagucuucugcgacacuaugaacucccucacccuccccucagaagucaaccucugcaacgucgacaucuucaacccgaaauacgacugcaaaaucaugaccagcaaaacugacgucuccucguccgucaucaccucacucggcgcaaucgugagcugcuacggcaaaaccaaaugcaccgccuccaacaaaaacaaaggcaucauaaaaacauucagcaacggcugcgacuacgucucgaacaaaggagucgacaccguaucagugggcaacacccuauacuacguaaacaagcaagaaggcaaaucacucuacguaaaaggcgaacccaucaucaacuucuacgacccccucgucuuccccuccgacgaguucgacgccuccaucucucaagucaacgagaaaaucaaccaaucccuugccuucauacguaaaagcgacgaacuccuucacaacguaaacgccgggaaauccaccacuaacauaaugaucaccaccaucaucaucguuaucauagucauccuccucucucucauagcagucggccuacuccuguacugcaaagcgcgcuaaggacuagucccuguucccagagcccacuuuuuuuucuuuuuuugaaauaaaauagccugucuuucagaucuaaaaaaaaaaaaaaaaaaaaaaaaaaaaaaaaaaaaaaaaaaaaaaaaaaaaaaaaaaaaaaaaugcaucccccccccccccccccccccccccccccccaaaggcucuuuucagagccaccagaauu

SEQ ID NO: 7196 - RNA, 1918 nt, Artificial Sequence
  mRNA product Design a-3 comprising derived and/or modified sequence from HRSV(A2)__F-del_DSCav1_mut7 (opt1)
gggagagggcgcuuggcuugcaaggacccugagcugcggcauugaagcacacccaacccaacucgacugaagucagccucacugaaccggaucugagaaucuucucucucugggcuugccagggcucuccgaaccuagcuagcauccucuucaauuccaacuagaaagcuuaccauggagcugcucauccugaaggccaacgccaucaccaccauccugacggcggugaccuucugcuucgccagcggccagaacaucaccgaggaguucuaccaguccacgugcagcgccgucuccaagggguaccucagcgcccugcggaccggcugguacaccuccgugaucaccaucgagcugagcaacaucaaggagaacaagugcaacgggaccgacgccaaggugaagcucaucaagcaggagcuggacaaguacaagaacgcggucacggagcugcagaugcugaugugcuccaccccggcaaccggcuccggcuccgccaucgcgagcggcgucgccgugugcaaggugcugcaccucgagggggaggucaacaagaucaagagcgcccugcuguccaccaacaaggccguggugagccucuccaacggcgucagcgugcugaccuucaaggugcuggaccucaagaacuacaucgacaagcagcugcugcccauccugaacaagcagagcugcuccaucagcaacaucgagacggugauggaguuccagcagaagaacaaccggcuccuggagaucacccgcgaguucagcgugaacgccggggucaccacccccguguccacguacaugcugaccaacagcgagcuccugucccugaucaacgacaugccgaucaccaacgaccagaagaagcucaugagcaacaacgugcagaucguccggcagcaguccuacagcaucaugugcaucaucaaggaggaggugcuggcguacgugguccagcugccccucuacggcgugaucgacacccccugcuggaagcugcacacgagcccccugugcaccaccaacaccaaggagggguccaacaucugccucacgcgcaccgaccggggcugguacugcgacaacgccggcagcgucuccuucuucccgcaggccgagaccugcaaggugugcagcaaccgcguguucugcgacaccaugaacucccugacgcugcccagcgagguaaaccucugcaacgucgacaucuucaaccccaaguacgacugcaagaucaugaccuccaagaccgacgugagcuccagcgugaucaccucccugggggccaucgucagcugcuacggcaagacgaagugcaccgccagcaacaagaacaaggggaucaucaagaccuucuccaacggcugcgacuacgugagcaacaagggcguggacaccguguccgucgggaacacccuguacuacgugaacaagcaggagggcaagagccucuacgugaagggggagcccaucaucaacuucuacgacccgcuggucuuccccuccgacgaguucgacgcgagcaucucccaggugaacgagaagaucaaccagagccuggccuucauccgcaaguccgacgagcugcuccacaacgugaacgccggcaagagcacgaccaacaucaugaucaccaccaucaucaucgucaucaucgugauccugcugucccucaucgccguggggcugcugcucuacugcaaggcccggugaggacuagucccuguucccagagcccacuuuuuuuucuuuuuuugaaauaaaauagccugucuuucagaucuaaaaaaaaaaaaaaaaaaaaaaaaaaaaaaaaaaaaaaaaaaaaaaaaaaaaaaaaaaaaaaaaugcaucccccccccccccccccccccccccccccccaaaggcucuuuucagagccaccagaauu

SEQ ID NO: 7197 - RNA, 1918 nt, Artificial Sequence
  mRNA product Design a-3 comprising derived and/or modified sequence from HRSV(A2)__F-del_DSCav1_mut7 (opt1)
gggagagggcgcuuggcuugcaaggacccugagcugcggcauugaagcacacccaacccaacucgacugaagucagccucacugaaccggaucugagaaucuucucucucugggcuugccagggcucuccgaaccuagcuagcauccucuucaauuccaacuagaaagcuuaccauggagcugcucauccugaaggccaacgccaucaccaccauccugacggcggugaccuucugcuucgccagcggccagaacaucaccgaggaguucuaccaguccacgugcagcgccgucuccaagggguaccucagcgcccugcgcaccggcugguacaccuccgugaucaccaucgagcugagcaacaucaaggagaacaagugcaacgggaccgacgccaaggugaagcucaucaagcaggagcuggacaaguacaagaacgcggucacggagcugcagaugcucaugugcuccacccccgccaccggcagcggguccgccaucgccagcggcguggcggugugcaagguccugcaccuggagggcgaggugaacaagaucaaguccgcccuccugagcaccaacaaggccguggucucccugagcaacgggguguccgugcucacguucaagguccuggaccugaagaacuacaucgacaagcagcuccugccgauccugaacaagcagagcugcuccaucagcaacaucgagaccgugauggaguuccagcagaagaacaaccggcuccuggagaucacccgcgaguucuccgugaacgccggcgucaccacgcccgugagcaccuacaugcugaccaacagcgagcuccugucccugaucaacgacaugcccaucaccaacgaccagaagaagcucaugagcaacaacgugcagaucguccggcagcaguccuacagcaucaugugcaucaucaaggaggaggugcuggccuacgugguccagcugccccucuacggggugaucgacacgccgugcuggaagcugcacaccagcccccugugcaccaccaacacgaaggagggcagcaacaucugccucacccgcaccgaccgggggugguacugcgacaacgcgggcuccgugagcuucuucccccaggccgagaccugcaaggucugcuccaaccgcguguucugcgacacgaugaacagccugacccugcccuccgaggucaaccucugcaacguggacaucuucaacccgaaguacgacugcaagaucaugaccagcaagaccgacguguccagcuccgucaucacgagccugggcgccaucguguccugcuacgggaagaccaagugcaccgccagcaacaagaacaagggcaucaucaagaccuucuccaacgggugcgacuacgugagcaacaagggcgucgacacggugagcgugggcaacacccuguacuacgucaacaagcaggaggggaagucccucuacgugaagggcgagcccaucaucaacuucuacgacccccugguguuccccagcgacgaguucgacgccuccaucagccaggucaacgagaagaucaaccagucccuggcguucauccggaaguccgacgagcuccugcacaacgugaacgccgggaaguccaccaccaacaucaugaucaccacgaucaucaucgugaucaucgucauccugcucagccugaucgccgugggccugcuccuguacugcaaggcccgcugaggacuagucccuguucccagagcccacuuuuuuuucuuuuuuugaaauaaaauagccugucuuucagaucuaaaaaaaaaaaaaaaaaaaaaaaaaaaaaaaaaaaaaaaaaaaaaaaaaaaaaaaaaaaaaaaaugcaucccccccccccccccccccccccccccccccaaaggcucuuuucagagccaccagaauu

SEQ ID NO: 7198 - RNA, 1918 nt, Artificial Sequence
  mRNA product Design a-3 comprising derived and/or modified sequence from HRSV(A2)__F-del_DSCav1_mut7 (opt2)
gggagagggcgcuuggcuugcaaggacccugagcugcggcauugaagcacacccaacccaacucgacugaagucagccucacugaaccggaucugagaaucuucucucucugggcuugccagggcucuccgaaccuagcuagcauccucuucaauuccaacuagaaagcuuaccauggagcuccucauccucaaggccaacgccaucaccaccauccucaccgccgucaccuucugcuucgccuccggccagaacaucaccgaggaguucuaccaguccaccugcuccgccgucuccaagggcuaccucuccgcccuccgcaccggcugguacaccuccgucaucaccaucgagcucuccaacaucaaggagaacaagugcaacggcaccgacgccaaggucaagcucaucaagcaggagcucgacaaguacaagaacgccgucaccgagcuccagaugcucaugugcuccacccccgccaccggcuccggcuccgccaucgccuccggcgucgccgucugcaagguccuccaccucgagggcgaggucaacaagaucaaguccgcccuccucuccaccaacaaggccgucgucucccucuccaacggcgucuccguccucaccuucaagguccucgaccucaagaacuacaucgacaagcagcuccuccccauccucaacaagcaguccugcuccaucuccaacaucgagaccgucauggaguuccagcagaagaacaaccgccuccucgagaucacccgcgaguucuccgucaacgccggcgucaccacccccgucuccaccuacaugcucaccaacuccgagcuccucucccucaucaacgacaugcccaucaccaacgaccagaagaagcucauguccaacaacguccagaucguccgccagcaguccuacuccaucaugugcaucaucaaggaggagguccucgccuacgucguccagcucccccucuacggcgucaucgacacccccugcuggaagcuccacaccuccccccucugcaccaccaacaccaaggagggcuccaacaucugccucacccgcaccgaccgcggcugguacugcgacaacgccggcuccgucuccuucuucccccaggccgagaccugcaaggucugcuccaaccgcgucuucugcgacaccaugaacucccucacccuccccuccgaggucaaccucugcaacgucgacaucuucaaccccaaguacgacugcaagaucaugaccuccaagaccgacgucuccuccuccgucaucaccucccucggcgccaucgucuccugcuacggcaagaccaagugcaccgccuccaacaagaacaagggcaucaucaagaccuucuccaacggcugcgacuacgucuccaacaagggcgucgacaccgucuccgucggcaacacccucuacuacgucaacaagcaggagggcaagucccucuacgucaagggcgagcccaucaucaacuucuacgacccccucgucuuccccuccgacgaguucgacgccuccaucucccaggucaacgagaagaucaaccagucccucgccuucauccgcaaguccgacgagcuccuccacaacgucaacgccggcaaguccaccaccaacaucaugaucaccaccaucaucaucgucaucaucgucauccuccucucccucaucgccgucggccuccuccucuacugcaaggcccgcugaggacuagucccuguucccagagcccacuuuuuuuucuuuuuuugaaauaaaauagccugucuuucagaucuaaaaaaaaaaaaaaaaaaaaaaaaaaaaaaaaaaaaaaaaaaaaaaaaaaaaaaaaaaaaaaaaugcaucccccccccccccccccccccccccccccccaaaggcucuuuucagagccaccagaauu

SEQ ID NO: 7199 - RNA, 1918 nt, Artificial Sequence
  mRNA product Design a-3 comprising derived and/or modified sequence from HRSV(A2)__F-del_DSCav1_mut7 (opt3)
gggagagggcgcuuggcuugcaaggacccugagcugcggcauugaagcacacccaacccaacucgacugaagucagccucacugaaccggaucugagaaucuucucucucugggcuugccagggcucuccgaaccuagcuagcauccucuucaauuccaacuagaaagcuuaccauggagcugcucauccuuaaggccaacgcuauuaccacaauacugacugcagugacguucugcuuugccagcggccagaauaucaccgaagaguucuaccaauccacauguucugcggucucaaaaggguauuugagugcuuuaagaacuggaugguacaccagcguuauuacaaucgaacuguccaacauuaaggagaauaaaugcaacgguaccgacgccaaggugaaacuaaucaagcaggaacucgauaaguauaaaaaugcaguaacugagcugcagaugcuuauguguucuacacccgccaccggcucggggucagcuauagcaagcggaguggccgucugcaaggugcugcacuuggagggcgaaguuaacaaaaucaagagugcucuccuguccacgaauaaagccguggucucucugagcaacgguguguccguacucacuuuuaagguuuuagaccugaagaauuacauugauaaacagcuuuugccuauccugaacaagcaaucauguaguauuagcaauaucgagaccgugauggaguuccagcagaaaaacaauaggcuacucgaaauaacacgggaguuuucugucaacgcgggggugacuaccccaguguccacauauaugcugaccaauucagaacuucugagcuugauuaacgacaugccgaucacgaacgaucagaagaaacucaugaguaauaacguccaaauuguucgccagcagucuuacuccaucaugugcaucauuaaggaggaagugcuggcauauguagugcaguuaccccuguacggagucauagacacuccuuguuggaaacuccauacaagcccacuuugcaccacuaauacaaaggagggcucgaacaucugucugacccgaacggaucguggcugguacugcgacaaugccgggucuguguccuucuuuccccaagcugaaaccuguaagguuugcucaaacagaguguucugcgauacaaugaauaguuugacucuaccuagcgaggucaaccuguguaauguggacauuuuuaacccaaaauaugauugcaagaucaugaccuccaaaacagacguaucuagcucaguuauaacuagccucggagccauuguguccuguuacgguaagaccaaaugcacagcaagcaauaagaacaagggcaucaucaaaaccuucucuaaugggugugauuaugucucaaacaagggaguggacacugucagugugggcaauacgcuguacuauguuaacaaacaggaggguaagagccuuuacgugaaaggggaacccauuaucaacuuuuaugacccucugguauucccauccgaugaguuugacgcuucuauuucgcaggucaaugaaaagauaaaccaaaguuuggccuucaucaggaaguccgaugagcuccugcacaaugugaacgcgggaaaaucaacaaccaauauuaugaucacuaccaucauuauaguuaucauugugaucuuacugagucuaauugccgucggccuccugcuuuacugcaaggcacggugaggacuagucccuguucccagagcccacuuuuuuuucuuuuuuugaaauaaaauagccugucuuucagaucuaaaaaaaaaaaaaaaaaaaaaaaaaaaaaaaaaaaaaaaaaaaaaaaaaaaaaaaaaaaaaaaaugcaucccccccccccccccccccccccccccccccaaaggcucuuuucagagccaccagaauu

SEQ ID NO: 7200 - RNA, 1918 nt, Artificial Sequence
  mRNA product Design a-3 comprising derived and/or modified sequence from HRSV(A2)__F-del_DSCav1_mut7 (opt4)
gggagagggcgcuuggcuugcaaggacccugagcugcggcauugaagcacacccaacccaacucgacugaagucagccucacugaaccggaucugagaaucuucucucucugggcuugccagggcucuccgaaccuagcuagcauccucuucaauuccaacuagaaagcuuaccauggagcugcugauccugaaggccaacgccaucaccaccauccugaccgccgugaccuucugcuucgccagcggccagaacaucaccgaggaguucuaccagagcaccugcagcgccgugagcaagggcuaccugagcgcccugagaaccggcugguacaccagcgugaucaccaucgagcugagcaacaucaaggagaacaagugcaacggcaccgacgccaaggugaagcugaucaagcaggagcuggacaaguacaagaacgccgugaccgagcugcagaugcugaugugcagcacccccgccaccggcagcggcagcgccaucgccagcggcguggccgugugcaaggugcugcaccuggagggcgaggugaacaagaucaagagcgcccugcugagcaccaacaaggccguggugagccugagcaacggcgugagcgugcugaccuucaaggugcuggaccugaagaacuacaucgacaagcagcugcugcccauccugaacaagcagagcugcagcaucagcaacaucgagaccgugauggaguuccagcagaagaacaacagacugcuggagaucaccagagaguucagcgugaacgccggcgugaccacccccgugagcaccuacaugcugaccaacagcgagcugcugagccugaucaacgacaugcccaucaccaacgaccagaagaagcugaugagcaacaacgugcagaucgugagacagcagagcuacagcaucaugugcaucaucaaggaggaggugcuggccuacguggugcagcugccccuguacggcgugaucgacacccccugcuggaagcugcacaccagcccccugugcaccaccaacaccaaggagggcagcaacaucugccugaccagaaccgacagaggcugguacugcgacaacgccggcagcgugagcuucuucccccaggccgagaccugcaaggugugcagcaacagaguguucugcgacaccaugaacagccugacccugcccagcgaggugaaccugugcaacguggacaucuucaaccccaaguacgacugcaagaucaugaccagcaagaccgacgugagcagcagcgugaucaccagccugggcgccaucgugagcugcuacggcaagaccaagugcaccgccagcaacaagaacaagggcaucaucaagaccuucagcaacggcugcgacuacgugagcaacaagggcguggacaccgugagcgugggcaacacccuguacuacgugaacaagcaggagggcaagagccuguacgugaagggcgagcccaucaucaacuucuacgacccccugguguuccccagcgacgaguucgacgccagcaucagccaggugaacgagaagaucaaccagagccuggccuucaucagaaagagcgacgagcugcugcacaacgugaacgccggcaagagcaccaccaacaucaugaucaccaccaucaucaucgugaucaucgugauccugcugagccugaucgccgugggccugcugcuguacugcaaggccagaugaggacuagucccuguucccagagcccacuuuuuuuucuuuuuuugaaauaaaauagccugucuuucagaucuaaaaaaaaaaaaaaaaaaaaaaaaaaaaaaaaaaaaaaaaaaaaaaaaaaaaaaaaaaaaaaaaugcaucccccccccccccccccccccccccccccccaaaggcucuuuucagagccaccagaauu

SEQ ID NO: 7201 - RNA, 1918 nt, Artificial Sequence
  mRNA product Design a-3 comprising derived and/or modified sequence from HRSV(A2)__F-del_DSCav1_mut7 (opt5)
gggagagggcgcuuggcuugcaaggacccugagcugcggcauugaagcacacccaacccaacucgacugaagucagccucacugaaccggaucugagaaucuucucucucugggcuugccagggcucuccgaaccuagcuagcauccucuucaauuccaacuagaaagcuuaccauggagcugcucauccugaaggccaacgcuauuaccacaauccuuacggccgugaccuucugcuuugcgagcggccagaauauuacagaagaguucuaccaauccaccuguucugcugucagcaaaggguaucuguccgcccucagaacaggaugguacaccucuguuaucacaauugaacugagcaacaucaaggagaauaaaugcaacggcaccgacgccaaggugaaacuuaucaagcaggaacuggauaaguauaaaaaugcugugacggagcuccagaugcugauguguuccacccccgccacagggucuggaagcgcuauugccuccggcgucgcggugugcaagguucugcaccucgagggggaagugaacaaaaucaagagcgcccugcuuucuaccaauaaagcugucgugucccugagcaacggaguuucugugcucacauuuaagguccuggaccuuaagaauuacauugauaaacagcugcucccuauccugaacaagcaauccuguagcauuucuaauaucgagaccgugauggaguuccagcagaaaaacaaucggcugcucgaaauuacgcgcgaguuuuccgugaacgccggcgucacaaccccgguuagcacauauaugcugaccaauuccgaacuucugucucucaucaacgacaugcccaucaccaacgaucagaagaaacugaugagcaauaacgugcaaauugugagacagcaguccuacagcaucaugugcauuaucaaggaggaaguccuugcuuaugugguucagcugccucucuacggcgugauugacacacccuguuggaaacugcauacgucuccucugugcaccacaaauaccaaggagggguccaacaucugucucacacggaccgaucgcggaugguacugcgacaaugccggcagcgucucuuucuuuccccaagcggaaacguguaaggugugcagcaacagaguuuucugcgauacaaugaacucccugacccuuccuucugaggugaaucuguguaaugucgacaucuuuaacccgaaauaugauugcaagauuaugaccagcaaaacagacguguccagcucugucaucaccucccucggggccauugugagcuguuacggaaagacaaaaugcacggcuucuaauaagaacaagggcaucauuaaaaccuucuccaaugggugugauuauguuagcaacaagggaguggacacagucuccgugggcaauacccuguacuauguuaacaaacaggagggcaagucucuuuacgugaaaggggaacccaucaucaacuuuuaugacccucuggucuuccccagcgaugaguuugacgccuccauuucucaggugaaugaaaagaucaaccaaagccucgcuuucauucggaaguccgaugagcugcugcacaaugugaacgccggaaaaagcacaaccaauaucaugauuacgaccaucauuaucguuaucauugucauccuccugucucuuauugccgugggccugcuccuguacugcaaggcucgcugaggacuagucccuguucccagagcccacuuuuuuuucuuuuuuugaaauaaaauagccugucuuucagaucuaaaaaaaaaaaaaaaaaaaaaaaaaaaaaaaaaaaaaaaaaaaaaaaaaaaaaaaaaaaaaaaaugcaucccccccccccccccccccccccccccccccaaaggcucuuuucagagccaccagaauu

SEQ ID NO: 7202 - RNA, 1918 nt, Artificial Sequence
  mRNA product Design a-3 comprising derived and/or modified sequence from HRSV(A2)__F-del_DSCav1_mut7 (opt6)
gggagagggcgcuuggcuugcaaggacccugagcugcggcauugaagcacacccaacccaacucgacugaagucagccucacugaaccggaucugagaaucuucucucucugggcuugccagggcucuccgaaccuagcuagcauccucuucaauuccaacuagaaagcuuaccauggaauuacuaauccucaaagcaaacgcaauuacaaccauacuaaccgcugucaccuuuuguuuugccucaggacaaaacauaacugaagaauuuuaccaaucaacaugcuccgcaguaucuaaaggauaccucagcgcguuaagaacaggaugguacacaucgguaauaaccaucgaauuauccaacauaaaagaaaauaaaugcaauggaacagacgcaaaagucaaauuaauuaaacaagaacuagacaaauauaaaaacgcaguaaccgaauuacaaaugcuaauguguucaacaccagcaacaggaucaggaucagcuauagcuucaggaguugccguaugcaaagugcuacacuuagaaggagaagugaauaaaauaaaaucagcucuauuaucaacgaacaaagccguaguaucucuaucaaauggcguaucaguacucacauucaaaguacucgaccuaaaaaacuauauagauaaacaacuauuacccauccuaaauaaacaaagcugcucuauaucaaacaucgaaacaguaauggaauuucaacaaaaaaacaacagacuacuagaaauaacccgagaguucucaguuaaugcaggaguaacaacaccagucucaacauacaugcucacaaacucagaacuccuaucacuaauaaaugacaugccaauaacaaacgaccaaaaaaaacucaugucuaacaacguccaaauaguaagacaacaauccuacagcauaauguguauaauaaaagaagaaguuuuagcauacgucguacaacuacccuuauauggcguaauagauacaccaugcuggaaacuccauaccucaccucuauguacaacaaauaccaaagaagguucuaauauaugccuaacacgaacugaccgaggaugguacugugacaacgcaggaucagucucuuucuuuccacaagcagaaaccugcaaaguaugcaguaaccgcguauuuugcgacacaaugaacucccuaaccuuaccaucagaaguaaacuuauguaacguagacauauucaauccaaaauaugacugcaaaauaaugacaucaaaaacagacguaagcucaucaguaauaacuucacuaggcgcaauuguaucaugcuauggaaaaaccaaauguaccgcauccaacaaaaauaaaggaauaauaaaaaccuucucuaacggaugcgacuacguaucaaacaaagguguagauacaguuucuguaggaaacacacucuacuauguaaauaaacaagaaggaaaaucacuauacguaaaaggagaaccaauaauaaacuucuaugacccacuuguauuuccaucugaugaauuugaugcaagcauaucacaaguaaacgaaaaaauaaaccaaucucuagccuuuauacgaaaaagcgacgaauuacuacauaacgucaacgcuggaaaaucaacaacaaacauaaugauaacaacaauaauaauaguaauaauagucauccuauuaucacuaaucgccguaggacuacuccuauacugcaaagcuagauaaggacuagucccuguucccagagcccacuuuuuuuucuuuuuuugaaauaaaauagccugucuuucagaucuaaaaaaaaaaaaaaaaaaaaaaaaaaaaaaaaaaaaaaaaaaaaaaaaaaaaaaaaaaaaaaaaugcaucccccccccccccccccccccccccccccccaaaggcucuuuucagagccaccagaauu

SEQ ID NO: 7203 - RNA, 1918 nt, Artificial Sequence
  mRNA product Design a-3 comprising derived and/or modified sequence from HRSV(A2)__F-del_DSCav1_mut7 (opt11)
gggagagggcgcuuggcuugcaaggacccugagcugcggcauugaagcacacccaacccaacucgacugaagucagccucacugaaccggaucugagaaucuucucucucugggcuugccagggcucuccgaaccuagcuagcauccucuucaauuccaacuagaaagcuuaccauggaacuccucauccucaaagccaacgccauaaccacuauccucacagcagucacuuucugcuucgccucaggacaaaacauaaccgaagaguucuaccaauccacaugcuccgccgucuccaaaggcuaccucucagcgcuccgcaccggcugguacacauccgucaucaccaucgaacuaagcaacauaaaagaaaacaaaugcaacggcaccgacgccaaaguuaaacucaucaagcaagaacucgacaaauacaaaaacgcagucacagaacuucaaaugcucaugugcuccacacccgccacagguucuggcucagcaaucgcaagcggcgucgccguaugcaaaguccuucaccucgaaggcgaagucaacaaaaucaaauccgcccuccucuccaccaauaaagcugucgucucacucuccaacggcgucagcguccucacauucaaaguccucgaccucaaaaacuacauagacaagcaacuccucccgauacucaacaaacaaagcugcucuaucuccaacaucgaaaccgucauggaguuccaacagaaaaacaaucgucuccucgaaaucacccgcgaguucucaguaaacgccggggucaccacaccagucuccaccuacaugcucaccaacuccgaacuccuuagccucauaaacgacaugcccauaaccaacgaccaaaagaaacucaugagcaacaacguacaaauaguccgacaacaauccuauuccaucauguguaucaucaaagaagaaguccucgcauacguaguccaacucccccuauacggcguaaucgacaccccauguuggaaacuccacaccucaccacucuguaccaccaacaccaaagaaggcucaaacaucugccucacccgcacagaccgcggcugguacugcgacaacgcgggcuccgucagcuucuuuccccaagcggaaaccugcaaagucugcagcaacagagucuucugcgacacuaugaacucccucacccuccccucagaagucaaccucugcaacgucgacaucuucaacccgaaauacgacugcaaaaucaugaccagcaaaacugacgucuccucguccgucaucaccucacucggcgcaaucgugagcugcuacggcaaaaccaaaugcaccgccuccaacaaaaacaaaggcaucauaaaaacauucagcaacggcugcgacuacgucucgaacaaaggagucgacaccguaucagugggcaacacccuauacuacguaaacaagcaagaaggcaaaucacucuacguaaaaggcgaacccaucaucaacuucuacgacccccucgucuuccccuccgacgaguucgacgccuccaucucucaagucaacgagaaaaucaaccaaucccuugccuucauacguaaaagcgacgaacuccuucacaacguaaacgccgggaaauccaccacuaacauaaugaucaccaccaucaucaucguuaucauagucauccuccucucucucauagcagucggccuacuccuguacugcaaagcgcgcuaaggacuagucccuguucccagagcccacuuuuuuuucuuuuuuugaaauaaaauagccugucuuucagaucuaaaaaaaaaaaaaaaaaaaaaaaaaaaaaaaaaaaaaaaaaaaaaaaaaaaaaaaaaaaaaaaaugcaucccccccccccccccccccccccccccccccaaaggcucuuuucagagccaccagaauu

SEQ ID NO: 7204 - RNA, 1867 nt, Artificial Sequence
  mRNA product Design a-4 comprising derived and/or modified sequence from HRSV(A2)__F-del_DSCav1_mut7 (opt1)
gggagacuccugucgggcggaaguaggaggaguagaguuuaaaaacaguacucuuuuuccgguucgggacguaguugaagcaacgacaagccggauaaccgcucuugagacaggaagcuuaccauggagcugcucauccugaaggccaacgccaucaccaccauccugacggcggugaccuucugcuucgccagcggccagaacaucaccgaggaguucuaccaguccacgugcagcgccgucuccaagggguaccucagcgcccugcggaccggcugguacaccuccgugaucaccaucgagcugagcaacaucaaggagaacaagugcaacgggaccgacgccaaggugaagcucaucaagcaggagcuggacaaguacaagaacgcggucacggagcugcagaugcugaugugcuccaccccggcaaccggcuccggcuccgccaucgcgagcggcgucgccgugugcaaggugcugcaccucgagggggaggucaacaagaucaagagcgcccugcuguccaccaacaaggccguggugagccucuccaacggcgucagcgugcugaccuucaaggugcuggaccucaagaacuacaucgacaagcagcugcugcccauccugaacaagcagagcugcuccaucagcaacaucgagacggugauggaguuccagcagaagaacaaccggcuccuggagaucacccgcgaguucagcgugaacgccggggucaccacccccguguccacguacaugcugaccaacagcgagcuccugucccugaucaacgacaugccgaucaccaacgaccagaagaagcucaugagcaacaacgugcagaucguccggcagcaguccuacagcaucaugugcaucaucaaggaggaggugcuggcguacgugguccagcugccccucuacggcgugaucgacacccccugcuggaagcugcacacgagcccccugugcaccaccaacaccaaggagggguccaacaucugccucacgcgcaccgaccggggcugguacugcgacaacgccggcagcgucuccuucuucccgcaggccgagaccugcaaggugugcagcaaccgcguguucugcgacaccaugaacucccugacgcugcccagcgagguaaaccucugcaacgucgacaucuucaaccccaaguacgacugcaagaucaugaccuccaagaccgacgugagcuccagcgugaucaccucccugggggccaucgucagcugcuacggcaagacgaagugcaccgccagcaacaagaacaaggggaucaucaagaccuucuccaacggcugcgacuacgugagcaacaagggcguggacaccguguccgucgggaacacccuguacuacgugaacaagcaggagggcaagagccucuacgugaagggggagcccaucaucaacuucuacgacccgcuggucuuccccuccgacgaguucgacgcgagcaucucccaggugaacgagaagaucaaccagagccuggccuucauccgcaaguccgacgagcugcuccacaacgugaacgccggcaagagcacgaccaacaucaugaucaccaccaucaucaucgucaucaucgugauccugcugucccucaucgccguggggcugcugcucuacugcaaggcccggugaggacuagucccuguucccagagcccacuuuuuuuucuuuuuuugaaauaaaauagccugucuuucagaucuaaaaaaaaaaaaaaaaaaaaaaaaaaaaaaaaaaaaaaaaaaaaaaaaaaaaaaaaaaaaaaaaugcaucccccccccccccccccccccccccccccccaaaggcucuuuucagagccaccagaauu

SEQ ID NO: 7205 - RNA, 1867 nt, Artificial Sequence
  mRNA product Design a-4 comprising derived and/or modified sequence from HRSV(A2)__F-del_DSCav1_mut7 (opt1)
gggagacuccugucgggcggaaguaggaggaguagaguuuaaaaacaguacucuuuuuccgguucgggacguaguugaagcaacgacaagccggauaaccgcucuugagacaggaagcuuaccauggagcugcucauccugaaggccaacgccaucaccaccauccugacggcggugaccuucugcuucgccagcggccagaacaucaccgaggaguucuaccaguccacgugcagcgccgucuccaagggguaccucagcgcccugcgcaccggcugguacaccuccgugaucaccaucgagcugagcaacaucaaggagaacaagugcaacgggaccgacgccaaggugaagcucaucaagcaggagcuggacaaguacaagaacgcggucacggagcugcagaugcucaugugcuccacccccgccaccggcagcggguccgccaucgccagcggcguggcggugugcaagguccugcaccuggagggcgaggugaacaagaucaaguccgcccuccugagcaccaacaaggccguggucucccugagcaacgggguguccgugcucacguucaagguccuggaccugaagaacuacaucgacaagcagcuccugccgauccugaacaagcagagcugcuccaucagcaacaucgagaccgugauggaguuccagcagaagaacaaccggcuccuggagaucacccgcgaguucuccgugaacgccggcgucaccacgcccgugagcaccuacaugcugaccaacagcgagcuccugucccugaucaacgacaugcccaucaccaacgaccagaagaagcucaugagcaacaacgugcagaucguccggcagcaguccuacagcaucaugugcaucaucaaggaggaggugcuggccuacgugguccagcugccccucuacggggugaucgacacgccgugcuggaagcugcacaccagcccccugugcaccaccaacacgaaggagggcagcaacaucugccucacccgcaccgaccgggggugguacugcgacaacgcgggcuccgugagcuucuucccccaggccgagaccugcaaggucugcuccaaccgcguguucugcgacacgaugaacagccugacccugcccuccgaggucaaccucugcaacguggacaucuucaacccgaaguacgacugcaagaucaugaccagcaagaccgacguguccagcuccgucaucacgagccugggcgccaucguguccugcuacgggaagaccaagugcaccgccagcaacaagaacaagggcaucaucaagaccuucuccaacgggugcgacuacgugagcaacaagggcgucgacacggugagcgugggcaacacccuguacuacgucaacaagcaggaggggaagucccucuacgugaagggcgagcccaucaucaacuucuacgacccccugguguuccccagcgacgaguucgacgccuccaucagccaggucaacgagaagaucaaccagucccuggcguucauccggaaguccgacgagcuccugcacaacgugaacgccgggaaguccaccaccaacaucaugaucaccacgaucaucaucgugaucaucgucauccugcucagccugaucgccgugggccugcuccuguacugcaaggcccgcugaggacuagucccuguucccagagcccacuuuuuuuucuuuuuuugaaauaaaauagccugucuuucagaucuaaaaaaaaaaaaaaaaaaaaaaaaaaaaaaaaaaaaaaaaaaaaaaaaaaaaaaaaaaaaaaaaugcaucccccccccccccccccccccccccccccccaaaggcucuuuucagagccaccagaauu

SEQ ID NO: 7206 - RNA, 1867 nt, Artificial Sequence
  mRNA product Design a-4 comprising derived and/or modified sequence from HRSV(A2)__F-del_DSCav1_mut7 (opt2)
gggagacuccugucgggcggaaguaggaggaguagaguuuaaaaacaguacucuuuuuccgguucgggacguaguugaagcaacgacaagccggauaaccgcucuugagacaggaagcuuaccauggagcuccucauccucaaggccaacgccaucaccaccauccucaccgccgucaccuucugcuucgccuccggccagaacaucaccgaggaguucuaccaguccaccugcuccgccgucuccaagggcuaccucuccgcccuccgcaccggcugguacaccuccgucaucaccaucgagcucuccaacaucaaggagaacaagugcaacggcaccgacgccaaggucaagcucaucaagcaggagcucgacaaguacaagaacgccgucaccgagcuccagaugcucaugugcuccacccccgccaccggcuccggcuccgccaucgccuccggcgucgccgucugcaagguccuccaccucgagggcgaggucaacaagaucaaguccgcccuccucuccaccaacaaggccgucgucucccucuccaacggcgucuccguccucaccuucaagguccucgaccucaagaacuacaucgacaagcagcuccuccccauccucaacaagcaguccugcuccaucuccaacaucgagaccgucauggaguuccagcagaagaacaaccgccuccucgagaucacccgcgaguucuccgucaacgccggcgucaccacccccgucuccaccuacaugcucaccaacuccgagcuccucucccucaucaacgacaugcccaucaccaacgaccagaagaagcucauguccaacaacguccagaucguccgccagcaguccuacuccaucaugugcaucaucaaggaggagguccucgccuacgucguccagcucccccucuacggcgucaucgacacccccugcuggaagcuccacaccuccccccucugcaccaccaacaccaaggagggcuccaacaucugccucacccgcaccgaccgcggcugguacugcgacaacgccggcuccgucuccuucuucccccaggccgagaccugcaaggucugcuccaaccgcgucuucugcgacaccaugaacucccucacccuccccuccgaggucaaccucugcaacgucgacaucuucaaccccaaguacgacugcaagaucaugaccuccaagaccgacgucuccuccuccgucaucaccucccucggcgccaucgucuccugcuacggcaagaccaagugcaccgccuccaacaagaacaagggcaucaucaagaccuucuccaacggcugcgacuacgucuccaacaagggcgucgacaccgucuccgucggcaacacccucuacuacgucaacaagcaggagggcaagucccucuacgucaagggcgagcccaucaucaacuucuacgacccccucgucuuccccuccgacgaguucgacgccuccaucucccaggucaacgagaagaucaaccagucccucgccuucauccgcaaguccgacgagcuccuccacaacgucaacgccggcaaguccaccaccaacaucaugaucaccaccaucaucaucgucaucaucgucauccuccucucccucaucgccgucggccuccuccucuacugcaaggcccgcugaggacuagucccuguucccagagcccacuuuuuuuucuuuuuuugaaauaaaauagccugucuuucagaucuaaaaaaaaaaaaaaaaaaaaaaaaaaaaaaaaaaaaaaaaaaaaaaaaaaaaaaaaaaaaaaaaugcaucccccccccccccccccccccccccccccccaaaggcucuuuucagagccaccagaauu

SEQ ID NO: 7207 - RNA, 1867 nt, Artificial Sequence
  mRNA product Design a-4 comprising derived and/or modified sequence from HRSV(A2)__F-del_DSCav1_mut7 (opt3)
gggagacuccugucgggcggaaguaggaggaguagaguuuaaaaacaguacucuuuuuccgguucgggacguaguugaagcaacgacaagccggauaaccgcucuugagacaggaagcuuaccauggagcugcucauccuuaaggccaacgcuauuaccacaauacugacugcagugacguucugcuuugccagcggccagaauaucaccgaagaguucuaccaauccacauguucugcggucucaaaaggguauuugagugcuuuaagaacuggaugguacaccagcguuauuacaaucgaacuguccaacauuaaggagaauaaaugcaacgguaccgacgccaaggugaaacuaaucaagcaggaacucgauaaguauaaaaaugcaguaacugagcugcagaugcuuauguguucuacacccgccaccggcucggggucagcuauagcaagcggaguggccgucugcaaggugcugcacuuggagggcgaaguuaacaaaaucaagagugcucuccuguccacgaauaaagccguggucucucugagcaacgguguguccguacucacuuuuaagguuuuagaccugaagaauuacauugauaaacagcuuuugccuauccugaacaagcaaucauguaguauuagcaauaucgagaccgugauggaguuccagcagaaaaacaauaggcuacucgaaauaacacgggaguuuucugucaacgcgggggugacuaccccaguguccacauauaugcugaccaauucagaacuucugagcuugauuaacgacaugccgaucacgaacgaucagaagaaacucaugaguaauaacguccaaauuguucgccagcagucuuacuccaucaugugcaucauuaaggaggaagugcuggcauauguagugcaguuaccccuguacggagucauagacacuccuuguuggaaacuccauacaagcccacuuugcaccacuaauacaaaggagggcucgaacaucugucugacccgaacggaucguggcugguacugcgacaaugccgggucuguguccuucuuuccccaagcugaaaccuguaagguuugcucaaacagaguguucugcgauacaaugaauaguuugacucuaccuagcgaggucaaccuguguaauguggacauuuuuaacccaaaauaugauugcaagaucaugaccuccaaaacagacguaucuagcucaguuauaacuagccucggagccauuguguccuguuacgguaagaccaaaugcacagcaagcaauaagaacaagggcaucaucaaaaccuucucuaaugggugugauuaugucucaaacaagggaguggacacugucagugugggcaauacgcuguacuauguuaacaaacaggaggguaagagccuuuacgugaaaggggaacccauuaucaacuuuuaugacccucugguauucccauccgaugaguuugacgcuucuauuucgcaggucaaugaaaagauaaaccaaaguuuggccuucaucaggaaguccgaugagcuccugcacaaugugaacgcgggaaaaucaacaaccaauauuaugaucacuaccaucauuauaguuaucauugugaucuuacugagucuaauugccgucggccuccugcuuuacugcaaggcacggugaggacuagucccuguucccagagcccacuuuuuuuucuuuuuuugaaauaaaauagccugucuuucagaucuaaaaaaaaaaaaaaaaaaaaaaaaaaaaaaaaaaaaaaaaaaaaaaaaaaaaaaaaaaaaaaaaugcaucccccccccccccccccccccccccccccccaaaggcucuuuucagagccaccagaauu

SEQ ID NO: 7208 - RNA, 1867 nt, Artificial Sequence
  mRNA product Design a-4 comprising derived and/or modified sequence from HRSV(A2)__F-del_DSCav1_mut7 (opt4)
gggagacuccugucgggcggaaguaggaggaguagaguuuaaaaacaguacucuuuuuccgguucgggacguaguugaagcaacgacaagccggauaaccgcucuugagacaggaagcuuaccauggagcugcugauccugaaggccaacgccaucaccaccauccugaccgccgugaccuucugcuucgccagcggccagaacaucaccgaggaguucuaccagagcaccugcagcgccgugagcaagggcuaccugagcgcccugagaaccggcugguacaccagcgugaucaccaucgagcugagcaacaucaaggagaacaagugcaacggcaccgacgccaaggugaagcugaucaagcaggagcuggacaaguacaagaacgccgugaccgagcugcagaugcugaugugcagcacccccgccaccggcagcggcagcgccaucgccagcggcguggccgugugcaaggugcugcaccuggagggcgaggugaacaagaucaagagcgcccugcugagcaccaacaaggccguggugagccugagcaacggcgugagcgugcugaccuucaaggugcuggaccugaagaacuacaucgacaagcagcugcugcccauccugaacaagcagagcugcagcaucagcaacaucgagaccgugauggaguuccagcagaagaacaacagacugcuggagaucaccagagaguucagcgugaacgccggcgugaccacccccgugagcaccuacaugcugaccaacagcgagcugcugagccugaucaacgacaugcccaucaccaacgaccagaagaagcugaugagcaacaacgugcagaucgugagacagcagagcuacagcaucaugugcaucaucaaggaggaggugcuggccuacguggugcagcugccccuguacggcgugaucgacacccccugcuggaagcugcacaccagcccccugugcaccaccaacaccaaggagggcagcaacaucugccugaccagaaccgacagaggcugguacugcgacaacgccggcagcgugagcuucuucccccaggccgagaccugcaaggugugcagcaacagaguguucugcgacaccaugaacagccugacccugcccagcgaggugaaccugugcaacguggacaucuucaaccccaaguacgacugcaagaucaugaccagcaagaccgacgugagcagcagcgugaucaccagccugggcgccaucgugagcugcuacggcaagaccaagugcaccgccagcaacaagaacaagggcaucaucaagaccuucagcaacggcugcgacuacgugagcaacaagggcguggacaccgugagcgugggcaacacccuguacuacgugaacaagcaggagggcaagagccuguacgugaagggcgagcccaucaucaacuucuacgacccccugguguuccccagcgacgaguucgacgccagcaucagccaggugaacgagaagaucaaccagagccuggccuucaucagaaagagcgacgagcugcugcacaacgugaacgccggcaagagcaccaccaacaucaugaucaccaccaucaucaucgugaucaucgugauccugcugagccugaucgccgugggccugcugcuguacugcaaggccagaugaggacuagucccuguucccagagcccacuuuuuuuucuuuuuuugaaauaaaauagccugucuuucagaucuaaaaaaaaaaaaaaaaaaaaaaaaaaaaaaaaaaaaaaaaaaaaaaaaaaaaaaaaaaaaaaaaugcaucccccccccccccccccccccccccccccccaaaggcucuuuucagagccaccagaauu

SEQ ID NO: 7209 - RNA, 1867 nt, Artificial Sequence
  mRNA product Design a-4 comprising derived and/or modified sequence from HRSV(A2)__F-del_DSCav1_mut7 (opt5)
gggagacuccugucgggcggaaguaggaggaguagaguuuaaaaacaguacucuuuuuccgguucgggacguaguugaagcaacgacaagccggauaaccgcucuugagacaggaagcuuaccauggagcugcucauccugaaggccaacgcuauuaccacaauccuuacggccgugaccuucugcuuugcgagcggccagaauauuacagaagaguucuaccaauccaccuguucugcugucagcaaaggguaucuguccgcccucagaacaggaugguacaccucuguuaucacaauugaacugagcaacaucaaggagaauaaaugcaacggcaccgacgccaaggugaaacuuaucaagcaggaacuggauaaguauaaaaaugcugugacggagcuccagaugcugauguguuccacccccgccacagggucuggaagcgcuauugccuccggcgucgcggugugcaagguucugcaccucgagggggaagugaacaaaaucaagagcgcccugcuuucuaccaauaaagcugucgugucccugagcaacggaguuucugugcucacauuuaagguccuggaccuuaagaauuacauugauaaacagcugcucccuauccugaacaagcaauccuguagcauuucuaauaucgagaccgugauggaguuccagcagaaaaacaaucggcugcucgaaauuacgcgcgaguuuuccgugaacgccggcgucacaaccccgguuagcacauauaugcugaccaauuccgaacuucugucucucaucaacgacaugcccaucaccaacgaucagaagaaacugaugagcaauaacgugcaaauugugagacagcaguccuacagcaucaugugcauuaucaaggaggaaguccuugcuuaugugguucagcugccucucuacggcgugauugacacacccuguuggaaacugcauacgucuccucugugcaccacaaauaccaaggagggguccaacaucugucucacacggaccgaucgcggaugguacugcgacaaugccggcagcgucucuuucuuuccccaagcggaaacguguaaggugugcagcaacagaguuuucugcgauacaaugaacucccugacccuuccuucugaggugaaucuguguaaugucgacaucuuuaacccgaaauaugauugcaagauuaugaccagcaaaacagacguguccagcucugucaucaccucccucggggccauugugagcuguuacggaaagacaaaaugcacggcuucuaauaagaacaagggcaucauuaaaaccuucuccaaugggugugauuauguuagcaacaagggaguggacacagucuccgugggcaauacccuguacuauguuaacaaacaggagggcaagucucuuuacgugaaaggggaacccaucaucaacuuuuaugacccucuggucuuccccagcgaugaguuugacgccuccauuucucaggugaaugaaaagaucaaccaaagccucgcuuucauucggaaguccgaugagcugcugcacaaugugaacgccggaaaaagcacaaccaauaucaugauuacgaccaucauuaucguuaucauugucauccuccugucucuuauugccgugggccugcuccuguacugcaaggcucgcugaggacuagucccuguucccagagcccacuuuuuuuucuuuuuuugaaauaaaauagccugucuuucagaucuaaaaaaaaaaaaaaaaaaaaaaaaaaaaaaaaaaaaaaaaaaaaaaaaaaaaaaaaaaaaaaaaugcaucccccccccccccccccccccccccccccccaaaggcucuuuucagagccaccagaauu

SEQ ID NO: 7210 - RNA, 1867 nt, Artificial Sequence
  mRNA product Design a-4 comprising derived and/or modified sequence from HRSV(A2)__F-del_DSCav1_mut7 (opt6)
gggagacuccugucgggcggaaguaggaggaguagaguuuaaaaacaguacucuuuuuccgguucgggacguaguugaagcaacgacaagccggauaaccgcucuugagacaggaagcuuaccauggaauuacuaauccucaaagcaaacgcaauuacaaccauacuaaccgcugucaccuuuuguuuugccucaggacaaaacauaacugaagaauuuuaccaaucaacaugcuccgcaguaucuaaaggauaccucagcgcguuaagaacaggaugguacacaucgguaauaaccaucgaauuauccaacauaaaagaaaauaaaugcaauggaacagacgcaaaagucaaauuaauuaaacaagaacuagacaaauauaaaaacgcaguaaccgaauuacaaaugcuaauguguucaacaccagcaacaggaucaggaucagcuauagcuucaggaguugccguaugcaaagugcuacacuuagaaggagaagugaauaaaauaaaaucagcucuauuaucaacgaacaaagccguaguaucucuaucaaauggcguaucaguacucacauucaaaguacucgaccuaaaaaacuauauagauaaacaacuauuacccauccuaaauaaacaaagcugcucuauaucaaacaucgaaacaguaauggaauuucaacaaaaaaacaacagacuacuagaaauaacccgagaguucucaguuaaugcaggaguaacaacaccagucucaacauacaugcucacaaacucagaacuccuaucacuaauaaaugacaugccaauaacaaacgaccaaaaaaaacucaugucuaacaacguccaaauaguaagacaacaauccuacagcauaauguguauaauaaaagaagaaguuuuagcauacgucguacaacuacccuuauauggcguaauagauacaccaugcuggaaacuccauaccucaccucuauguacaacaaauaccaaagaagguucuaauauaugccuaacacgaacugaccgaggaugguacugugacaacgcaggaucagucucuuucuuuccacaagcagaaaccugcaaaguaugcaguaaccgcguauuuugcgacacaaugaacucccuaaccuuaccaucagaaguaaacuuauguaacguagacauauucaauccaaaauaugacugcaaaauaaugacaucaaaaacagacguaagcucaucaguaauaacuucacuaggcgcaauuguaucaugcuauggaaaaaccaaauguaccgcauccaacaaaaauaaaggaauaauaaaaaccuucucuaacggaugcgacuacguaucaaacaaagguguagauacaguuucuguaggaaacacacucuacuauguaaauaaacaagaaggaaaaucacuauacguaaaaggagaaccaauaauaaacuucuaugacccacuuguauuuccaucugaugaauuugaugcaagcauaucacaaguaaacgaaaaaauaaaccaaucucuagccuuuauacgaaaaagcgacgaauuacuacauaacgucaacgcuggaaaaucaacaacaaacauaaugauaacaacaauaauaauaguaauaauagucauccuauuaucacuaaucgccguaggacuacuccuauacugcaaagcuagauaaggacuagucccuguucccagagcccacuuuuuuuucuuuuuuugaaauaaaauagccugucuuucagaucuaaaaaaaaaaaaaaaaaaaaaaaaaaaaaaaaaaaaaaaaaaaaaaaaaaaaaaaaaaaaaaaaugcaucccccccccccccccccccccccccccccccaaaggcucuuuucagagccaccagaauu

SEQ ID NO: 7211 - RNA, 1867 nt, Artificial Sequence
  mRNA product Design a-4 comprising derived and/or modified sequence from HRSV(A2)__F-del_DSCav1_mut7 (opt11)
gggagacuccugucgggcggaaguaggaggaguagaguuuaaaaacaguacucuuuuuccgguucgggacguaguugaagcaacgacaagccggauaaccgcucuugagacaggaagcuuaccauggaacuccucauccucaaagccaacgccauaaccacuauccucacagcagucacuuucugcuucgccucaggacaaaacauaaccgaagaguucuaccaauccacaugcuccgccgucuccaaaggcuaccucucagcgcuccgcaccggcugguacacauccgucaucaccaucgaacuaagcaacauaaaagaaaacaaaugcaacggcaccgacgccaaaguuaaacucaucaagcaagaacucgacaaauacaaaaacgcagucacagaacuucaaaugcucaugugcuccacacccgccacagguucuggcucagcaaucgcaagcggcgucgccguaugcaaaguccuucaccucgaaggcgaagucaacaaaaucaaauccgcccuccucuccaccaauaaagcugucgucucacucuccaacggcgucagcguccucacauucaaaguccucgaccucaaaaacuacauagacaagcaacuccucccgauacucaacaaacaaagcugcucuaucuccaacaucgaaaccgucauggaguuccaacagaaaaacaaucgucuccucgaaaucacccgcgaguucucaguaaacgccggggucaccacaccagucuccaccuacaugcucaccaacuccgaacuccuuagccucauaaacgacaugcccauaaccaacgaccaaaagaaacucaugagcaacaacguacaaauaguccgacaacaauccuauuccaucauguguaucaucaaagaagaaguccucgcauacguaguccaacucccccuauacggcguaaucgacaccccauguuggaaacuccacaccucaccacucuguaccaccaacaccaaagaaggcucaaacaucugccucacccgcacagaccgcggcugguacugcgacaacgcgggcuccgucagcuucuuuccccaagcggaaaccugcaaagucugcagcaacagagucuucugcgacacuaugaacucccucacccuccccucagaagucaaccucugcaacgucgacaucuucaacccgaaauacgacugcaaaaucaugaccagcaaaacugacgucuccucguccgucaucaccucacucggcgcaaucgugagcugcuacggcaaaaccaaaugcaccgccuccaacaaaaacaaaggcaucauaaaaacauucagcaacggcugcgacuacgucucgaacaaaggagucgacaccguaucagugggcaacacccuauacuacguaaacaagcaagaaggcaaaucacucuacguaaaaggcgaacccaucaucaacuucuacgacccccucgucuuccccuccgacgaguucgacgccuccaucucucaagucaacgagaaaaucaaccaaucccuugccuucauacguaaaagcgacgaacuccuucacaacguaaacgccgggaaauccaccacuaacauaaugaucaccaccaucaucaucguuaucauagucauccuccucucucucauagcagucggccuacuccuguacugcaaagcgcgcuaaggacuagucccuguucccagagcccacuuuuuuuucuuuuuuugaaauaaaauagccugucuuucagaucuaaaaaaaaaaaaaaaaaaaaaaaaaaaaaaaaaaaaaaaaaaaaaaaaaaaaaaaaaaaaaaaaugcaucccccccccccccccccccccccccccccccaaaggcucuuuucagagccaccagaauu

SEQ ID NO: 7212 - RNA, 1813 nt, Artificial Sequence
  mRNA product Design a-5 comprising derived and/or modified sequence from HRSV(A2)__F-del_DSCav1_mut7 (opt1)
gggagacuuucccauucuguagcagaauuugguguugccuguggucuuggucccgcggagaagcuuaccauggagcugcucauccugaaggccaacgccaucaccaccauccugacggcggugaccuucugcuucgccagcggccagaacaucaccgaggaguucuaccaguccacgugcagcgccgucuccaagggguaccucagcgcccugcggaccggcugguacaccuccgugaucaccaucgagcugagcaacaucaaggagaacaagugcaacgggaccgacgccaaggugaagcucaucaagcaggagcuggacaaguacaagaacgcggucacggagcugcagaugcugaugugcuccaccccggcaaccggcuccggcuccgccaucgcgagcggcgucgccgugugcaaggugcugcaccucgagggggaggucaacaagaucaagagcgcccugcuguccaccaacaaggccguggugagccucuccaacggcgucagcgugcugaccuucaaggugcuggaccucaagaacuacaucgacaagcagcugcugcccauccugaacaagcagagcugcuccaucagcaacaucgagacggugauggaguuccagcagaagaacaaccggcuccuggagaucacccgcgaguucagcgugaacgccggggucaccacccccguguccacguacaugcugaccaacagcgagcuccugucccugaucaacgacaugccgaucaccaacgaccagaagaagcucaugagcaacaacgugcagaucguccggcagcaguccuacagcaucaugugcaucaucaaggaggaggugcuggcguacgugguccagcugccccucuacggcgugaucgacacccccugcuggaagcugcacacgagcccccugugcaccaccaacaccaaggagggguccaacaucugccucacgcgcaccgaccggggcugguacugcgacaacgccggcagcgucuccuucuucccgcaggccgagaccugcaaggugugcagcaaccgcguguucugcgacaccaugaacucccugacgcugcccagcgagguaaaccucugcaacgucgacaucuucaaccccaaguacgacugcaagaucaugaccuccaagaccgacgugagcuccagcgugaucaccucccugggggccaucgucagcugcuacggcaagacgaagugcaccgccagcaacaagaacaaggggaucaucaagaccuucuccaacggcugcgacuacgugagcaacaagggcguggacaccguguccgucgggaacacccuguacuacgugaacaagcaggagggcaagagccucuacgugaagggggagcccaucaucaacuucuacgacccgcuggucuuccccuccgacgaguucgacgcgagcaucucccaggugaacgagaagaucaaccagagccuggccuucauccgcaaguccgacgagcugcuccacaacgugaacgccggcaagagcacgaccaacaucaugaucaccaccaucaucaucgucaucaucgugauccugcugucccucaucgccguggggcugcugcucuacugcaaggcccggugaggacuagucccuguucccagagcccacuuuuuuuucuuuuuuugaaauaaaauagccugucuuucagaucuaaaaaaaaaaaaaaaaaaaaaaaaaaaaaaaaaaaaaaaaaaaaaaaaaaaaaaaaaaaaaaaaugcaucccccccccccccccccccccccccccccccaaaggcucuuuucagagccaccagaauu

SEQ ID NO: 7213 - RNA, 1813 nt, Artificial Sequence
  mRNA product Design a-5 comprising derived and/or modified sequence from HRSV(A2)__F-del_DSCav1_mut7 (opt1)
gggagacuuucccauucuguagcagaauuugguguugccuguggucuuggucccgcggagaagcuuaccauggagcugcucauccugaaggccaacgccaucaccaccauccugacggcggugaccuucugcuucgccagcggccagaacaucaccgaggaguucuaccaguccacgugcagcgccgucuccaagggguaccucagcgcccugcgcaccggcugguacaccuccgugaucaccaucgagcugagcaacaucaaggagaacaagugcaacgggaccgacgccaaggugaagcucaucaagcaggagcuggacaaguacaagaacgcggucacggagcugcagaugcucaugugcuccacccccgccaccggcagcggguccgccaucgccagcggcguggcggugugcaagguccugcaccuggagggcgaggugaacaagaucaaguccgcccuccugagcaccaacaaggccguggucucccugagcaacgggguguccgugcucacguucaagguccuggaccugaagaacuacaucgacaagcagcuccugccgauccugaacaagcagagcugcuccaucagcaacaucgagaccgugauggaguuccagcagaagaacaaccggcuccuggagaucacccgcgaguucuccgugaacgccggcgucaccacgcccgugagcaccuacaugcugaccaacagcgagcuccugucccugaucaacgacaugcccaucaccaacgaccagaagaagcucaugagcaacaacgugcagaucguccggcagcaguccuacagcaucaugugcaucaucaaggaggaggugcuggccuacgugguccagcugccccucuacggggugaucgacacgccgugcuggaagcugcacaccagcccccugugcaccaccaacacgaaggagggcagcaacaucugccucacccgcaccgaccgggggugguacugcgacaacgcgggcuccgugagcuucuucccccaggccgagaccugcaaggucugcuccaaccgcguguucugcgacacgaugaacagccugacccugcccuccgaggucaaccucugcaacguggacaucuucaacccgaaguacgacugcaagaucaugaccagcaagaccgacguguccagcuccgucaucacgagccugggcgccaucguguccugcuacgggaagaccaagugcaccgccagcaacaagaacaagggcaucaucaagaccuucuccaacgggugcgacuacgugagcaacaagggcgucgacacggugagcgugggcaacacccuguacuacgucaacaagcaggaggggaagucccucuacgugaagggcgagcccaucaucaacuucuacgacccccugguguuccccagcgacgaguucgacgccuccaucagccaggucaacgagaagaucaaccagucccuggcguucauccggaaguccgacgagcuccugcacaacgugaacgccgggaaguccaccaccaacaucaugaucaccacgaucaucaucgugaucaucgucauccugcucagccugaucgccgugggccugcuccuguacugcaaggcccgcugaggacuagucccuguucccagagcccacuuuuuuuucuuuuuuugaaauaaaauagccugucuuucagaucuaaaaaaaaaaaaaaaaaaaaaaaaaaaaaaaaaaaaaaaaaaaaaaaaaaaaaaaaaaaaaaaaugcaucccccccccccccccccccccccccccccccaaaggcucuuuucagagccaccagaauu

SEQ ID NO: 7214 - RNA, 1813 nt, Artificial Sequence
  mRNA product Design a-5 comprising derived and/or modified sequence from HRSV(A2)__F-del_DSCav1_mut7 (opt2)
gggagacuuucccauucuguagcagaauuugguguugccuguggucuuggucccgcggagaagcuuaccauggagcuccucauccucaaggccaacgccaucaccaccauccucaccgccgucaccuucugcuucgccuccggccagaacaucaccgaggaguucuaccaguccaccugcuccgccgucuccaagggcuaccucuccgcccuccgcaccggcugguacaccuccgucaucaccaucgagcucuccaacaucaaggagaacaagugcaacggcaccgacgccaaggucaagcucaucaagcaggagcucgacaaguacaagaacgccgucaccgagcuccagaugcucaugugcuccacccccgccaccggcuccggcuccgccaucgccuccggcgucgccgucugcaagguccuccaccucgagggcgaggucaacaagaucaaguccgcccuccucuccaccaacaaggccgucgucucccucuccaacggcgucuccguccucaccuucaagguccucgaccucaagaacuacaucgacaagcagcuccuccccauccucaacaagcaguccugcuccaucuccaacaucgagaccgucauggaguuccagcagaagaacaaccgccuccucgagaucacccgcgaguucuccgucaacgccggcgucaccacccccgucuccaccuacaugcucaccaacuccgagcuccucucccucaucaacgacaugcccaucaccaacgaccagaagaagcucauguccaacaacguccagaucguccgccagcaguccuacuccaucaugugcaucaucaaggaggagguccucgccuacgucguccagcucccccucuacggcgucaucgacacccccugcuggaagcuccacaccuccccccucugcaccaccaacaccaaggagggcuccaacaucugccucacccgcaccgaccgcggcugguacugcgacaacgccggcuccgucuccuucuucccccaggccgagaccugcaaggucugcuccaaccgcgucuucugcgacaccaugaacucccucacccuccccuccgaggucaaccucugcaacgucgacaucuucaaccccaaguacgacugcaagaucaugaccuccaagaccgacgucuccuccuccgucaucaccucccucggcgccaucgucuccugcuacggcaagaccaagugcaccgccuccaacaagaacaagggcaucaucaagaccuucuccaacggcugcgacuacgucuccaacaagggcgucgacaccgucuccgucggcaacacccucuacuacgucaacaagcaggagggcaagucccucuacgucaagggcgagcccaucaucaacuucuacgacccccucgucuuccccuccgacgaguucgacgccuccaucucccaggucaacgagaagaucaaccagucccucgccuucauccgcaaguccgacgagcuccuccacaacgucaacgccggcaaguccaccaccaacaucaugaucaccaccaucaucaucgucaucaucgucauccuccucucccucaucgccgucggccuccuccucuacugcaaggcccgcugaggacuagucccuguucccagagcccacuuuuuuuucuuuuuuugaaauaaaauagccugucuuucagaucuaaaaaaaaaaaaaaaaaaaaaaaaaaaaaaaaaaaaaaaaaaaaaaaaaaaaaaaaaaaaaaaaugcaucccccccccccccccccccccccccccccccaaaggcucuuuucagagccaccagaauu

SEQ ID NO: 7215 - RNA, 1813 nt, Artificial Sequence
  mRNA product Design a-5 comprising derived and/or modified sequence from HRSV(A2)__F-del_DSCav1_mut7 (opt3)
gggagacuuucccauucuguagcagaauuugguguugccuguggucuuggucccgcggagaagcuuaccauggagcugcucauccuuaaggccaacgcuauuaccacaauacugacugcagugacguucugcuuugccagcggccagaauaucaccgaagaguucuaccaauccacauguucugcggucucaaaaggguauuugagugcuuuaagaacuggaugguacaccagcguuauuacaaucgaacuguccaacauuaaggagaauaaaugcaacgguaccgacgccaaggugaaacuaaucaagcaggaacucgauaaguauaaaaaugcaguaacugagcugcagaugcuuauguguucuacacccgccaccggcucggggucagcuauagcaagcggaguggccgucugcaaggugcugcacuuggagggcgaaguuaacaaaaucaagagugcucuccuguccacgaauaaagccguggucucucugagcaacgguguguccguacucacuuuuaagguuuuagaccugaagaauuacauugauaaacagcuuuugccuauccugaacaagcaaucauguaguauuagcaauaucgagaccgugauggaguuccagcagaaaaacaauaggcuacucgaaauaacacgggaguuuucugucaacgcgggggugacuaccccaguguccacauauaugcugaccaauucagaacuucugagcuugauuaacgacaugccgaucacgaacgaucagaagaaacucaugaguaauaacguccaaauuguucgccagcagucuuacuccaucaugugcaucauuaaggaggaagugcuggcauauguagugcaguuaccccuguacggagucauagacacuccuuguuggaaacuccauacaagcccacuuugcaccacuaauacaaaggagggcucgaacaucugucugacccgaacggaucguggcugguacugcgacaaugccgggucuguguccuucuuuccccaagcugaaaccuguaagguuugcucaaacagaguguucugcgauacaaugaauaguuugacucuaccuagcgaggucaaccuguguaauguggacauuuuuaacccaaaauaugauugcaagaucaugaccuccaaaacagacguaucuagcucaguuauaacuagccucggagccauuguguccuguuacgguaagaccaaaugcacagcaagcaauaagaacaagggcaucaucaaaaccuucucuaaugggugugauuaugucucaaacaagggaguggacacugucagugugggcaauacgcuguacuauguuaacaaacaggaggguaagagccuuuacgugaaaggggaacccauuaucaacuuuuaugacccucugguauucccauccgaugaguuugacgcuucuauuucgcaggucaaugaaaagauaaaccaaaguuuggccuucaucaggaaguccgaugagcuccugcacaaugugaacgcgggaaaaucaacaaccaauauuaugaucacuaccaucauuauaguuaucauugugaucuuacugagucuaauugccgucggccuccugcuuuacugcaaggcacggugaggacuagucccuguucccagagcccacuuuuuuuucuuuuuuugaaauaaaauagccugucuuucagaucuaaaaaaaaaaaaaaaaaaaaaaaaaaaaaaaaaaaaaaaaaaaaaaaaaaaaaaaaaaaaaaaaugcaucccccccccccccccccccccccccccccccaaaggcucuuuucagagccaccagaauu

SEQ ID NO: 7216 - RNA, 1813 nt, Artificial Sequence
  mRNA product Design a-5 comprising derived and/or modified sequence from HRSV(A2)__F-del_DSCav1_mut7 (opt4)
gggagacuuucccauucuguagcagaauuugguguugccuguggucuuggucccgcggagaagcuuaccauggagcugcugauccugaaggccaacgccaucaccaccauccugaccgccgugaccuucugcuucgccagcggccagaacaucaccgaggaguucuaccagagcaccugcagcgccgugagcaagggcuaccugagcgcccugagaaccggcugguacaccagcgugaucaccaucgagcugagcaacaucaaggagaacaagugcaacggcaccgacgccaaggugaagcugaucaagcaggagcuggacaaguacaagaacgccgugaccgagcugcagaugcugaugugcagcacccccgccaccggcagcggcagcgccaucgccagcggcguggccgugugcaaggugcugcaccuggagggcgaggugaacaagaucaagagcgcccugcugagcaccaacaaggccguggugagccugagcaacggcgugagcgugcugaccuucaaggugcuggaccugaagaacuacaucgacaagcagcugcugcccauccugaacaagcagagcugcagcaucagcaacaucgagaccgugauggaguuccagcagaagaacaacagacugcuggagaucaccagagaguucagcgugaacgccggcgugaccacccccgugagcaccuacaugcugaccaacagcgagcugcugagccugaucaacgacaugcccaucaccaacgaccagaagaagcugaugagcaacaacgugcagaucgugagacagcagagcuacagcaucaugugcaucaucaaggaggaggugcuggccuacguggugcagcugccccuguacggcgugaucgacacccccugcuggaagcugcacaccagcccccugugcaccaccaacaccaaggagggcagcaacaucugccugaccagaaccgacagaggcugguacugcgacaacgccggcagcgugagcuucuucccccaggccgagaccugcaaggugugcagcaacagaguguucugcgacaccaugaacagccugacccugcccagcgaggugaaccugugcaacguggacaucuucaaccccaaguacgacugcaagaucaugaccagcaagaccgacgugagcagcagcgugaucaccagccugggcgccaucgugagcugcuacggcaagaccaagugcaccgccagcaacaagaacaagggcaucaucaagaccuucagcaacggcugcgacuacgugagcaacaagggcguggacaccgugagcgugggcaacacccuguacuacgugaacaagcaggagggcaagagccuguacgugaagggcgagcccaucaucaacuucuacgacccccugguguuccccagcgacgaguucgacgccagcaucagccaggugaacgagaagaucaaccagagccuggccuucaucagaaagagcgacgagcugcugcacaacgugaacgccggcaagagcaccaccaacaucaugaucaccaccaucaucaucgugaucaucgugauccugcugagccugaucgccgugggccugcugcuguacugcaaggccagaugaggacuagucccuguucccagagcccacuuuuuuuucuuuuuuugaaauaaaauagccugucuuucagaucuaaaaaaaaaaaaaaaaaaaaaaaaaaaaaaaaaaaaaaaaaaaaaaaaaaaaaaaaaaaaaaaaugcaucccccccccccccccccccccccccccccccaaaggcucuuuucagagccaccagaauu

SEQ ID NO: 7217 - RNA, 1813 nt, Artificial Sequence
  mRNA product Design a-5 comprising derived and/or modified sequence from HRSV(A2)__F-del_DSCav1_mut7 (opt5)
gggagacuuucccauucuguagcagaauuugguguugccuguggucuuggucccgcggagaagcuuaccauggagcugcucauccugaaggccaacgcuauuaccacaauccuuacggccgugaccuucugcuuugcgagcggccagaauauuacagaagaguucuaccaauccaccuguucugcugucagcaaaggguaucuguccgcccucagaacaggaugguacaccucuguuaucacaauugaacugagcaacaucaaggagaauaaaugcaacggcaccgacgccaaggugaaacuuaucaagcaggaacuggauaaguauaaaaaugcugugacggagcuccagaugcugauguguuccacccccgccacagggucuggaagcgcuauugccuccggcgucgcggugugcaagguucugcaccucgagggggaagugaacaaaaucaagagcgcccugcuuucuaccaauaaagcugucgugucccugagcaacggaguuucugugcucacauuuaagguccuggaccuuaagaauuacauugauaaacagcugcucccuauccugaacaagcaauccuguagcauuucuaauaucgagaccgugauggaguuccagcagaaaaacaaucggcugcucgaaauuacgcgcgaguuuuccgugaacgccggcgucacaaccccgguuagcacauauaugcugaccaauuccgaacuucugucucucaucaacgacaugcccaucaccaacgaucagaagaaacugaugagcaauaacgugcaaauugugagacagcaguccuacagcaucaugugcauuaucaaggaggaaguccuugcuuaugugguucagcugccucucuacggcgugauugacacacccuguuggaaacugcauacgucuccucugugcaccacaaauaccaaggagggguccaacaucugucucacacggaccgaucgcggaugguacugcgacaaugccggcagcgucucuuucuuuccccaagcggaaacguguaaggugugcagcaacagaguuuucugcgauacaaugaacucccugacccuuccuucugaggugaaucuguguaaugucgacaucuuuaacccgaaauaugauugcaagauuaugaccagcaaaacagacguguccagcucugucaucaccucccucggggccauugugagcuguuacggaaagacaaaaugcacggcuucuaauaagaacaagggcaucauuaaaaccuucuccaaugggugugauuauguuagcaacaagggaguggacacagucuccgugggcaauacccuguacuauguuaacaaacaggagggcaagucucuuuacgugaaaggggaacccaucaucaacuuuuaugacccucuggucuuccccagcgaugaguuugacgccuccauuucucaggugaaugaaaagaucaaccaaagccucgcuuucauucggaaguccgaugagcugcugcacaaugugaacgccggaaaaagcacaaccaauaucaugauuacgaccaucauuaucguuaucauugucauccuccugucucuuauugccgugggccugcuccuguacugcaaggcucgcugaggacuagucccuguucccagagcccacuuuuuuuucuuuuuuugaaauaaaauagccugucuuucagaucuaaaaaaaaaaaaaaaaaaaaaaaaaaaaaaaaaaaaaaaaaaaaaaaaaaaaaaaaaaaaaaaaugcaucccccccccccccccccccccccccccccccaaaggcucuuuucagagccaccagaauu

SEQ ID NO: 7218 - RNA, 1813 nt, Artificial Sequence
  mRNA product Design a-5 comprising derived and/or modified sequence from HRSV(A2)__F-del_DSCav1_mut7 (opt6)
gggagacuuucccauucuguagcagaauuugguguugccuguggucuuggucccgcggagaagcuuaccauggaauuacuaauccucaaagcaaacgcaauuacaaccauacuaaccgcugucaccuuuuguuuugccucaggacaaaacauaacugaagaauuuuaccaaucaacaugcuccgcaguaucuaaaggauaccucagcgcguuaagaacaggaugguacacaucgguaauaaccaucgaauuauccaacauaaaagaaaauaaaugcaauggaacagacgcaaaagucaaauuaauuaaacaagaacuagacaaauauaaaaacgcaguaaccgaauuacaaaugcuaauguguucaacaccagcaacaggaucaggaucagcuauagcuucaggaguugccguaugcaaagugcuacacuuagaaggagaagugaauaaaauaaaaucagcucuauuaucaacgaacaaagccguaguaucucuaucaaauggcguaucaguacucacauucaaaguacucgaccuaaaaaacuauauagauaaacaacuauuacccauccuaaauaaacaaagcugcucuauaucaaacaucgaaacaguaauggaauuucaacaaaaaaacaacagacuacuagaaauaacccgagaguucucaguuaaugcaggaguaacaacaccagucucaacauacaugcucacaaacucagaacuccuaucacuaauaaaugacaugccaauaacaaacgaccaaaaaaaacucaugucuaacaacguccaaauaguaagacaacaauccuacagcauaauguguauaauaaaagaagaaguuuuagcauacgucguacaacuacccuuauauggcguaauagauacaccaugcuggaaacuccauaccucaccucuauguacaacaaauaccaaagaagguucuaauauaugccuaacacgaacugaccgaggaugguacugugacaacgcaggaucagucucuuucuuuccacaagcagaaaccugcaaaguaugcaguaaccgcguauuuugcgacacaaugaacucccuaaccuuaccaucagaaguaaacuuauguaacguagacauauucaauccaaaauaugacugcaaaauaaugacaucaaaaacagacguaagcucaucaguaauaacuucacuaggcgcaauuguaucaugcuauggaaaaaccaaauguaccgcauccaacaaaaauaaaggaauaauaaaaaccuucucuaacggaugcgacuacguaucaaacaaagguguagauacaguuucuguaggaaacacacucuacuauguaaauaaacaagaaggaaaaucacuauacguaaaaggagaaccaauaauaaacuucuaugacccacuuguauuuccaucugaugaauuugaugcaagcauaucacaaguaaacgaaaaaauaaaccaaucucuagccuuuauacgaaaaagcgacgaauuacuacauaacgucaacgcuggaaaaucaacaacaaacauaaugauaacaacaauaauaauaguaauaauagucauccuauuaucacuaaucgccguaggacuacuccuauacugcaaagcuagauaaggacuagucccuguucccagagcccacuuuuuuuucuuuuuuugaaauaaaauagccugucuuucagaucuaaaaaaaaaaaaaaaaaaaaaaaaaaaaaaaaaaaaaaaaaaaaaaaaaaaaaaaaaaaaaaaaugcaucccccccccccccccccccccccccccccccaaaggcucuuuucagagccaccagaauu

SEQ ID NO: 7219 - RNA, 1813 nt, Artificial Sequence
  mRNA product Design a-5 comprising derived and/or modified sequence from HRSV(A2)__F-del_DSCav1_mut7 (opt11)
gggagacuuucccauucuguagcagaauuugguguugccuguggucuuggucccgcggagaagcuuaccauggaacuccucauccucaaagccaacgccauaaccacuauccucacagcagucacuuucugcuucgccucaggacaaaacauaaccgaagaguucuaccaauccacaugcuccgccgucuccaaaggcuaccucucagcgcuccgcaccggcugguacacauccgucaucaccaucgaacuaagcaacauaaaagaaaacaaaugcaacggcaccgacgccaaaguuaaacucaucaagcaagaacucgacaaauacaaaaacgcagucacagaacuucaaaugcucaugugcuccacacccgccacagguucuggcucagcaaucgcaagcggcgucgccguaugcaaaguccuucaccucgaaggcgaagucaacaaaaucaaauccgcccuccucuccaccaauaaagcugucgucucacucuccaacggcgucagcguccucacauucaaaguccucgaccucaaaaacuacauagacaagcaacuccucccgauacucaacaaacaaagcugcucuaucuccaacaucgaaaccgucauggaguuccaacagaaaaacaaucgucuccucgaaaucacccgcgaguucucaguaaacgccggggucaccacaccagucuccaccuacaugcucaccaacuccgaacuccuuagccucauaaacgacaugcccauaaccaacgaccaaaagaaacucaugagcaacaacguacaaauaguccgacaacaauccuauuccaucauguguaucaucaaagaagaaguccucgcauacguaguccaacucccccuauacggcguaaucgacaccccauguuggaaacuccacaccucaccacucuguaccaccaacaccaaagaaggcucaaacaucugccucacccgcacagaccgcggcugguacugcgacaacgcgggcuccgucagcuucuuuccccaagcggaaaccugcaaagucugcagcaacagagucuucugcgacacuaugaacucccucacccuccccucagaagucaaccucugcaacgucgacaucuucaacccgaaauacgacugcaaaaucaugaccagcaaaacugacgucuccucguccgucaucaccucacucggcgcaaucgugagcugcuacggcaaaaccaaaugcaccgccuccaacaaaaacaaaggcaucauaaaaacauucagcaacggcugcgacuacgucucgaacaaaggagucgacaccguaucagugggcaacacccuauacuacguaaacaagcaagaaggcaaaucacucuacguaaaaggcgaacccaucaucaacuucuacgacccccucgucuuccccuccgacgaguucgacgccuccaucucucaagucaacgagaaaaucaaccaaucccuugccuucauacguaaaagcgacgaacuccuucacaacguaaacgccgggaaauccaccacuaacauaaugaucaccaccaucaucaucguuaucauagucauccuccucucucucauagcagucggccuacuccuguacugcaaagcgcgcuaaggacuagucccuguucccagagcccacuuuuuuuucuuuuuuugaaauaaaauagccugucuuucagaucuaaaaaaaaaaaaaaaaaaaaaaaaaaaaaaaaaaaaaaaaaaaaaaaaaaaaaaaaaaaaaaaaugcaucccccccccccccccccccccccccccccccaaaggcucuuuucagagccaccagaauu

SEQ ID NO: 7220 - RNA, 1994 nt, Artificial Sequence
  mRNA product Design b-1 comprising derived and/or modified sequence from HRSV(A2)__F-del_DSCav1_mut7 (opt1)
gggagacggagacggccugcaggaccugcucucucagcccucagccgaggccuacgccgagccgagugcgcagccgacgaccgggaggagccgcagccuucaacucugagguacugugauccgcgcugcccgccgggccgccccaguccgcugcugcggcaccuccuucccucgcgcccucuucgcucgccagcgccuucccugugagccugcgucaccgcggccgccaagcuuaccauggagcugcucauccugaaggccaacgccaucaccaccauccugacggcggugaccuucugcuucgccagcggccagaacaucaccgaggaguucuaccaguccacgugcagcgccgucuccaagggguaccucagcgcccugcggaccggcugguacaccuccgugaucaccaucgagcugagcaacaucaaggagaacaagugcaacgggaccgacgccaaggugaagcucaucaagcaggagcuggacaaguacaagaacgcggucacggagcugcagaugcugaugugcuccaccccggcaaccggcuccggcuccgccaucgcgagcggcgucgccgugugcaaggugcugcaccucgagggggaggucaacaagaucaagagcgcccugcuguccaccaacaaggccguggugagccucuccaacggcgucagcgugcugaccuucaaggugcuggaccucaagaacuacaucgacaagcagcugcugcccauccugaacaagcagagcugcuccaucagcaacaucgagacggugauggaguuccagcagaagaacaaccggcuccuggagaucacccgcgaguucagcgugaacgccggggucaccacccccguguccacguacaugcugaccaacagcgagcuccugucccugaucaacgacaugccgaucaccaacgaccagaagaagcucaugagcaacaacgugcagaucguccggcagcaguccuacagcaucaugugcaucaucaaggaggaggugcuggcguacgugguccagcugccccucuacggcgugaucgacacccccugcuggaagcugcacacgagcccccugugcaccaccaacaccaaggagggguccaacaucugccucacgcgcaccgaccggggcugguacugcgacaacgccggcagcgucuccuucuucccgcaggccgagaccugcaaggugugcagcaaccgcguguucugcgacaccaugaacucccugacgcugcccagcgagguaaaccucugcaacgucgacaucuucaaccccaaguacgacugcaagaucaugaccuccaagaccgacgugagcuccagcgugaucaccucccugggggccaucgucagcugcuacggcaagacgaagugcaccgccagcaacaagaacaaggggaucaucaagaccuucuccaacggcugcgacuacgugagcaacaagggcguggacaccguguccgucgggaacacccuguacuacgugaacaagcaggagggcaagagccucuacgugaagggggagcccaucaucaacuucuacgacccgcuggucuuccccuccgacgaguucgacgcgagcaucucccaggugaacgagaagaucaaccagagccuggccuucauccgcaaguccgacgagcugcuccacaacgugaacgccggcaagagcacgaccaacaucaugaucaccaccaucaucaucgucaucaucgugauccugcugucccucaucgccguggggcugcugcucuacugcaaggcccggugaggacuaguguccaccugucccuccugggcugcuggauugucucguuuuccugccaaauaaacaggaucagcgcuuuacagaucuaaaaaaaaaaaaaaaaaaaaaaaaaaaaaaaaaaaaaaaaaaaaaaaaaaaaaaaaaaaaaaaaugcaucccccccccccccccccccccccccccccccaaaggcucuuuucagagccaccagaauu

SEQ ID NO: 7221 - RNA, 1994 nt, Artificial Sequence
  mRNA product Design b-1 comprising derived and/or modified sequence from HRSV(A2)__F-del_DSCav1_mut7 (opt1)
gggagacggagacggccugcaggaccugcucucucagcccucagccgaggccuacgccgagccgagugcgcagccgacgaccgggaggagccgcagccuucaacucugagguacugugauccgcgcugcccgccgggccgccccaguccgcugcugcggcaccuccuucccucgcgcccucuucgcucgccagcgccuucccugugagccugcgucaccgcggccgccaagcuuaccauggagcugcucauccugaaggccaacgccaucaccaccauccugacggcggugaccuucugcuucgccagcggccagaacaucaccgaggaguucuaccaguccacgugcagcgccgucuccaagggguaccucagcgcccugcgcaccggcugguacaccuccgugaucaccaucgagcugagcaacaucaaggagaacaagugcaacgggaccgacgccaaggugaagcucaucaagcaggagcuggacaaguacaagaacgcggucacggagcugcagaugcucaugugcuccacccccgccaccggcagcggguccgccaucgccagcggcguggcggugugcaagguccugcaccuggagggcgaggugaacaagaucaaguccgcccuccugagcaccaacaaggccguggucucccugagcaacgggguguccgugcucacguucaagguccuggaccugaagaacuacaucgacaagcagcuccugccgauccugaacaagcagagcugcuccaucagcaacaucgagaccgugauggaguuccagcagaagaacaaccggcuccuggagaucacccgcgaguucuccgugaacgccggcgucaccacgcccgugagcaccuacaugcugaccaacagcgagcuccugucccugaucaacgacaugcccaucaccaacgaccagaagaagcucaugagcaacaacgugcagaucguccggcagcaguccuacagcaucaugugcaucaucaaggaggaggugcuggccuacgugguccagcugccccucuacggggugaucgacacgccgugcuggaagcugcacaccagcccccugugcaccaccaacacgaaggagggcagcaacaucugccucacccgcaccgaccgggggugguacugcgacaacgcgggcuccgugagcuucuucccccaggccgagaccugcaaggucugcuccaaccgcguguucugcgacacgaugaacagccugacccugcccuccgaggucaaccucugcaacguggacaucuucaacccgaaguacgacugcaagaucaugaccagcaagaccgacguguccagcuccgucaucacgagccugggcgccaucguguccugcuacgggaagaccaagugcaccgccagcaacaagaacaagggcaucaucaagaccuucuccaacgggugcgacuacgugagcaacaagggcgucgacacggugagcgugggcaacacccuguacuacgucaacaagcaggaggggaagucccucuacgugaagggcgagcccaucaucaacuucuacgacccccugguguuccccagcgacgaguucgacgccuccaucagccaggucaacgagaagaucaaccagucccuggcguucauccggaaguccgacgagcuccugcacaacgugaacgccgggaaguccaccaccaacaucaugaucaccacgaucaucaucgugaucaucgucauccugcucagccugaucgccgugggccugcuccuguacugcaaggcccgcugaggacuaguguccaccugucccuccugggcugcuggauugucucguuuuccugccaaauaaacaggaucagcgcuuuacagaucuaaaaaaaaaaaaaaaaaaaaaaaaaaaaaaaaaaaaaaaaaaaaaaaaaaaaaaaaaaaaaaaaugcaucccccccccccccccccccccccccccccccaaaggcucuuuucagagccaccagaauu

SEQ ID NO: 7222 - RNA, 1994 nt, Artificial Sequence
  mRNA product Design b-1 comprising derived and/or modified sequence from HRSV(A2)__F-del_DSCav1_mut7 (opt2)
gggagacggagacggccugcaggaccugcucucucagcccucagccgaggccuacgccgagccgagugcgcagccgacgaccgggaggagccgcagccuucaacucugagguacugugauccgcgcugcccgccgggccgccccaguccgcugcugcggcaccuccuucccucgcgcccucuucgcucgccagcgccuucccugugagccugcgucaccgcggccgccaagcuuaccauggagcuccucauccucaaggccaacgccaucaccaccauccucaccgccgucaccuucugcuucgccuccggccagaacaucaccgaggaguucuaccaguccaccugcuccgccgucuccaagggcuaccucuccgcccuccgcaccggcugguacaccuccgucaucaccaucgagcucuccaacaucaaggagaacaagugcaacggcaccgacgccaaggucaagcucaucaagcaggagcucgacaaguacaagaacgccgucaccgagcuccagaugcucaugugcuccacccccgccaccggcuccggcuccgccaucgccuccggcgucgccgucugcaagguccuccaccucgagggcgaggucaacaagaucaaguccgcccuccucuccaccaacaaggccgucgucucccucuccaacggcgucuccguccucaccuucaagguccucgaccucaagaacuacaucgacaagcagcuccuccccauccucaacaagcaguccugcuccaucuccaacaucgagaccgucauggaguuccagcagaagaacaaccgccuccucgagaucacccgcgaguucuccgucaacgccggcgucaccacccccgucuccaccuacaugcucaccaacuccgagcuccucucccucaucaacgacaugcccaucaccaacgaccagaagaagcucauguccaacaacguccagaucguccgccagcaguccuacuccaucaugugcaucaucaaggaggagguccucgccuacgucguccagcucccccucuacggcgucaucgacacccccugcuggaagcuccacaccuccccccucugcaccaccaacaccaaggagggcuccaacaucugccucacccgcaccgaccgcggcugguacugcgacaacgccggcuccgucuccuucuucccccaggccgagaccugcaaggucugcuccaaccgcgucuucugcgacaccaugaacucccucacccuccccuccgaggucaaccucugcaacgucgacaucuucaaccccaaguacgacugcaagaucaugaccuccaagaccgacgucuccuccuccgucaucaccucccucggcgccaucgucuccugcuacggcaagaccaagugcaccgccuccaacaagaacaagggcaucaucaagaccuucuccaacggcugcgacuacgucuccaacaagggcgucgacaccgucuccgucggcaacacccucuacuacgucaacaagcaggagggcaagucccucuacgucaagggcgagcccaucaucaacuucuacgacccccucgucuuccccuccgacgaguucgacgccuccaucucccaggucaacgagaagaucaaccagucccucgccuucauccgcaaguccgacgagcuccuccacaacgucaacgccggcaaguccaccaccaacaucaugaucaccaccaucaucaucgucaucaucgucauccuccucucccucaucgccgucggccuccuccucuacugcaaggcccgcugaggacuaguguccaccugucccuccugggcugcuggauugucucguuuuccugccaaauaaacaggaucagcgcuuuacagaucuaaaaaaaaaaaaaaaaaaaaaaaaaaaaaaaaaaaaaaaaaaaaaaaaaaaaaaaaaaaaaaaaugcaucccccccccccccccccccccccccccccccaaaggcucuuuucagagccaccagaauu

SEQ ID NO: 7223 - RNA, 1994 nt, Artificial Sequence
  mRNA product Design b-1 comprising derived and/or modified sequence from HRSV(A2)__F-del_DSCav1_mut7 (opt3)
gggagacggagacggccugcaggaccugcucucucagcccucagccgaggccuacgccgagccgagugcgcagccgacgaccgggaggagccgcagccuucaacucugagguacugugauccgcgcugcccgccgggccgccccaguccgcugcugcggcaccuccuucccucgcgcccucuucgcucgccagcgccuucccugugagccugcgucaccgcggccgccaagcuuaccauggagcugcucauccuuaaggccaacgcuauuaccacaauacugacugcagugacguucugcuuugccagcggccagaauaucaccgaagaguucuaccaauccacauguucugcggucucaaaaggguauuugagugcuuuaagaacuggaugguacaccagcguuauuacaaucgaacuguccaacauuaaggagaauaaaugcaacgguaccgacgccaaggugaaacuaaucaagcaggaacucgauaaguauaaaaaugcaguaacugagcugcagaugcuuauguguucuacacccgccaccggcucggggucagcuauagcaagcggaguggccgucugcaaggugcugcacuuggagggcgaaguuaacaaaaucaagagugcucuccuguccacgaauaaagccguggucucucugagcaacgguguguccguacucacuuuuaagguuuuagaccugaagaauuacauugauaaacagcuuuugccuauccugaacaagcaaucauguaguauuagcaauaucgagaccgugauggaguuccagcagaaaaacaauaggcuacucgaaauaacacgggaguuuucugucaacgcgggggugacuaccccaguguccacauauaugcugaccaauucagaacuucugagcuugauuaacgacaugccgaucacgaacgaucagaagaaacucaugaguaauaacguccaaauuguucgccagcagucuuacuccaucaugugcaucauuaaggaggaagugcuggcauauguagugcaguuaccccuguacggagucauagacacuccuuguuggaaacuccauacaagcccacuuugcaccacuaauacaaaggagggcucgaacaucugucugacccgaacggaucguggcugguacugcgacaaugccgggucuguguccuucuuuccccaagcugaaaccuguaagguuugcucaaacagaguguucugcgauacaaugaauaguuugacucuaccuagcgaggucaaccuguguaauguggacauuuuuaacccaaaauaugauugcaagaucaugaccuccaaaacagacguaucuagcucaguuauaacuagccucggagccauuguguccuguuacgguaagaccaaaugcacagcaagcaauaagaacaagggcaucaucaaaaccuucucuaaugggugugauuaugucucaaacaagggaguggacacugucagugugggcaauacgcuguacuauguuaacaaacaggaggguaagagccuuuacgugaaaggggaacccauuaucaacuuuuaugacccucugguauucccauccgaugaguuugacgcuucuauuucgcaggucaaugaaaagauaaaccaaaguuuggccuucaucaggaaguccgaugagcuccugcacaaugugaacgcgggaaaaucaacaaccaauauuaugaucacuaccaucauuauaguuaucauugugaucuuacugagucuaauugccgucggccuccugcuuuacugcaaggcacggugaggacuaguguccaccugucccuccugggcugcuggauugucucguuuuccugccaaauaaacaggaucagcgcuuuacagaucuaaaaaaaaaaaaaaaaaaaaaaaaaaaaaaaaaaaaaaaaaaaaaaaaaaaaaaaaaaaaaaaaugcaucccccccccccccccccccccccccccccccaaaggcucuuuucagagccaccagaauu

SEQ ID NO: 7224 - RNA, 1994 nt, Artificial Sequence
  mRNA product Design b-1 comprising derived and/or modified sequence from HRSV(A2)__F-del_DSCav1_mut7 (opt4)
gggagacggagacggccugcaggaccugcucucucagcccucagccgaggccuacgccgagccgagugcgcagccgacgaccgggaggagccgcagccuucaacucugagguacugugauccgcgcugcccgccgggccgccccaguccgcugcugcggcaccuccuucccucgcgcccucuucgcucgccagcgccuucccugugagccugcgucaccgcggccgccaagcuuaccauggagcugcugauccugaaggccaacgccaucaccaccauccugaccgccgugaccuucugcuucgccagcggccagaacaucaccgaggaguucuaccagagcaccugcagcgccgugagcaagggcuaccugagcgcccugagaaccggcugguacaccagcgugaucaccaucgagcugagcaacaucaaggagaacaagugcaacggcaccgacgccaaggugaagcugaucaagcaggagcuggacaaguacaagaacgccgugaccgagcugcagaugcugaugugcagcacccccgccaccggcagcggcagcgccaucgccagcggcguggccgugugcaaggugcugcaccuggagggcgaggugaacaagaucaagagcgcccugcugagcaccaacaaggccguggugagccugagcaacggcgugagcgugcugaccuucaaggugcuggaccugaagaacuacaucgacaagcagcugcugcccauccugaacaagcagagcugcagcaucagcaacaucgagaccgugauggaguuccagcagaagaacaacagacugcuggagaucaccagagaguucagcgugaacgccggcgugaccacccccgugagcaccuacaugcugaccaacagcgagcugcugagccugaucaacgacaugcccaucaccaacgaccagaagaagcugaugagcaacaacgugcagaucgugagacagcagagcuacagcaucaugugcaucaucaaggaggaggugcuggccuacguggugcagcugccccuguacggcgugaucgacacccccugcuggaagcugcacaccagcccccugugcaccaccaacaccaaggagggcagcaacaucugccugaccagaaccgacagaggcugguacugcgacaacgccggcagcgugagcuucuucccccaggccgagaccugcaaggugugcagcaacagaguguucugcgacaccaugaacagccugacccugcccagcgaggugaaccugugcaacguggacaucuucaaccccaaguacgacugcaagaucaugaccagcaagaccgacgugagcagcagcgugaucaccagccugggcgccaucgugagcugcuacggcaagaccaagugcaccgccagcaacaagaacaagggcaucaucaagaccuucagcaacggcugcgacuacgugagcaacaagggcguggacaccgugagcgugggcaacacccuguacuacgugaacaagcaggagggcaagagccuguacgugaagggcgagcccaucaucaacuucuacgacccccugguguuccccagcgacgaguucgacgccagcaucagccaggugaacgagaagaucaaccagagccuggccuucaucagaaagagcgacgagcugcugcacaacgugaacgccggcaagagcaccaccaacaucaugaucaccaccaucaucaucgugaucaucgugauccugcugagccugaucgccgugggccugcugcuguacugcaaggccagaugaggacuaguguccaccugucccuccugggcugcuggauugucucguuuuccugccaaauaaacaggaucagcgcuuuacagaucuaaaaaaaaaaaaaaaaaaaaaaaaaaaaaaaaaaaaaaaaaaaaaaaaaaaaaaaaaaaaaaaaugcaucccccccccccccccccccccccccccccccaaaggcucuuuucagagccaccagaauu

SEQ ID NO: 7225 - RNA, 1994 nt, Artificial Sequence
  mRNA product Design b-1 comprising derived and/or modified sequence from HRSV(A2)__F-del_DSCav1_mut7 (opt5)
gggagacggagacggccugcaggaccugcucucucagcccucagccgaggccuacgccgagccgagugcgcagccgacgaccgggaggagccgcagccuucaacucugagguacugugauccgcgcugcccgccgggccgccccaguccgcugcugcggcaccuccuucccucgcgcccucuucgcucgccagcgccuucccugugagccugcgucaccgcggccgccaagcuuaccauggagcugcucauccugaaggccaacgcuauuaccacaauccuuacggccgugaccuucugcuuugcgagcggccagaauauuacagaagaguucuaccaauccaccuguucugcugucagcaaaggguaucuguccgcccucagaacaggaugguacaccucuguuaucacaauugaacugagcaacaucaaggagaauaaaugcaacggcaccgacgccaaggugaaacuuaucaagcaggaacuggauaaguauaaaaaugcugugacggagcuccagaugcugauguguuccacccccgccacagggucuggaagcgcuauugccuccggcgucgcggugugcaagguucugcaccucgagggggaagugaacaaaaucaagagcgcccugcuuucuaccaauaaagcugucgugucccugagcaacggaguuucugugcucacauuuaagguccuggaccuuaagaauuacauugauaaacagcugcucccuauccugaacaagcaauccuguagcauuucuaauaucgagaccgugauggaguuccagcagaaaaacaaucggcugcucgaaauuacgcgcgaguuuuccgugaacgccggcgucacaaccccgguuagcacauauaugcugaccaauuccgaacuucugucucucaucaacgacaugcccaucaccaacgaucagaagaaacugaugagcaauaacgugcaaauugugagacagcaguccuacagcaucaugugcauuaucaaggaggaaguccuugcuuaugugguucagcugccucucuacggcgugauugacacacccuguuggaaacugcauacgucuccucugugcaccacaaauaccaaggagggguccaacaucugucucacacggaccgaucgcggaugguacugcgacaaugccggcagcgucucuuucuuuccccaagcggaaacguguaaggugugcagcaacagaguuuucugcgauacaaugaacucccugacccuuccuucugaggugaaucuguguaaugucgacaucuuuaacccgaaauaugauugcaagauuaugaccagcaaaacagacguguccagcucugucaucaccucccucggggccauugugagcuguuacggaaagacaaaaugcacggcuucuaauaagaacaagggcaucauuaaaaccuucuccaaugggugugauuauguuagcaacaagggaguggacacagucuccgugggcaauacccuguacuauguuaacaaacaggagggcaagucucuuuacgugaaaggggaacccaucaucaacuuuuaugacccucuggucuuccccagcgaugaguuugacgccuccauuucucaggugaaugaaaagaucaaccaaagccucgcuuucauucggaaguccgaugagcugcugcacaaugugaacgccggaaaaagcacaaccaauaucaugauuacgaccaucauuaucguuaucauugucauccuccugucucuuauugccgugggccugcuccuguacugcaaggcucgcugaggacuaguguccaccugucccuccugggcugcuggauugucucguuuuccugccaaauaaacaggaucagcgcuuuacagaucuaaaaaaaaaaaaaaaaaaaaaaaaaaaaaaaaaaaaaaaaaaaaaaaaaaaaaaaaaaaaaaaaugcaucccccccccccccccccccccccccccccccaaaggcucuuuucagagccaccagaauu

SEQ ID NO: 7226 - RNA, 1994 nt, Artificial Sequence
  mRNA product Design b-1 comprising derived and/or modified sequence from HRSV(A2)__F-del_DSCav1_mut7 (opt6)
gggagacggagacggccugcaggaccugcucucucagcccucagccgaggccuacgccgagccgagugcgcagccgacgaccgggaggagccgcagccuucaacucugagguacugugauccgcgcugcccgccgggccgccccaguccgcugcugcggcaccuccuucccucgcgcccucuucgcucgccagcgccuucccugugagccugcgucaccgcggccgccaagcuuaccauggaauuacuaauccucaaagcaaacgcaauuacaaccauacuaaccgcugucaccuuuuguuuugccucaggacaaaacauaacugaagaauuuuaccaaucaacaugcuccgcaguaucuaaaggauaccucagcgcguuaagaacaggaugguacacaucgguaauaaccaucgaauuauccaacauaaaagaaaauaaaugcaauggaacagacgcaaaagucaaauuaauuaaacaagaacuagacaaauauaaaaacgcaguaaccgaauuacaaaugcuaauguguucaacaccagcaacaggaucaggaucagcuauagcuucaggaguugccguaugcaaagugcuacacuuagaaggagaagugaauaaaauaaaaucagcucuauuaucaacgaacaaagccguaguaucucuaucaaauggcguaucaguacucacauucaaaguacucgaccuaaaaaacuauauagauaaacaacuauuacccauccuaaauaaacaaagcugcucuauaucaaacaucgaaacaguaauggaauuucaacaaaaaaacaacagacuacuagaaauaacccgagaguucucaguuaaugcaggaguaacaacaccagucucaacauacaugcucacaaacucagaacuccuaucacuaauaaaugacaugccaauaacaaacgaccaaaaaaaacucaugucuaacaacguccaaauaguaagacaacaauccuacagcauaauguguauaauaaaagaagaaguuuuagcauacgucguacaacuacccuuauauggcguaauagauacaccaugcuggaaacuccauaccucaccucuauguacaacaaauaccaaagaagguucuaauauaugccuaacacgaacugaccgaggaugguacugugacaacgcaggaucagucucuuucuuuccacaagcagaaaccugcaaaguaugcaguaaccgcguauuuugcgacacaaugaacucccuaaccuuaccaucagaaguaaacuuauguaacguagacauauucaauccaaaauaugacugcaaaauaaugacaucaaaaacagacguaagcucaucaguaauaacuucacuaggcgcaauuguaucaugcuauggaaaaaccaaauguaccgcauccaacaaaaauaaaggaauaauaaaaaccuucucuaacggaugcgacuacguaucaaacaaagguguagauacaguuucuguaggaaacacacucuacuauguaaauaaacaagaaggaaaaucacuauacguaaaaggagaaccaauaauaaacuucuaugacccacuuguauuuccaucugaugaauuugaugcaagcauaucacaaguaaacgaaaaaauaaaccaaucucuagccuuuauacgaaaaagcgacgaauuacuacauaacgucaacgcuggaaaaucaacaacaaacauaaugauaacaacaauaauaauaguaauaauagucauccuauuaucacuaaucgccguaggacuacuccuauacugcaaagcuagauaaggacuaguguccaccugucccuccugggcugcuggauugucucguuuuccugccaaauaaacaggaucagcgcuuuacagaucuaaaaaaaaaaaaaaaaaaaaaaaaaaaaaaaaaaaaaaaaaaaaaaaaaaaaaaaaaaaaaaaaugcaucccccccccccccccccccccccccccccccaaaggcucuuuucagagccaccagaauu

SEQ ID NO: 7227 - RNA, 1994 nt, Artificial Sequence
  mRNA product Design b-1 comprising derived and/or modified sequence from HRSV(A2)__F-del_DSCav1_mut7 (opt11)
gggagacggagacggccugcaggaccugcucucucagcccucagccgaggccuacgccgagccgagugcgcagccgacgaccgggaggagccgcagccuucaacucugagguacugugauccgcgcugcccgccgggccgccccaguccgcugcugcggcaccuccuucccucgcgcccucuucgcucgccagcgccuucccugugagccugcgucaccgcggccgccaagcuuaccauggaacuccucauccucaaagccaacgccauaaccacuauccucacagcagucacuuucugcuucgccucaggacaaaacauaaccgaagaguucuaccaauccacaugcuccgccgucuccaaaggcuaccucucagcgcuccgcaccggcugguacacauccgucaucaccaucgaacuaagcaacauaaaagaaaacaaaugcaacggcaccgacgccaaaguuaaacucaucaagcaagaacucgacaaauacaaaaacgcagucacagaacuucaaaugcucaugugcuccacacccgccacagguucuggcucagcaaucgcaagcggcgucgccguaugcaaaguccuucaccucgaaggcgaagucaacaaaaucaaauccgcccuccucuccaccaauaaagcugucgucucacucuccaacggcgucagcguccucacauucaaaguccucgaccucaaaaacuacauagacaagcaacuccucccgauacucaacaaacaaagcugcucuaucuccaacaucgaaaccgucauggaguuccaacagaaaaacaaucgucuccucgaaaucacccgcgaguucucaguaaacgccggggucaccacaccagucuccaccuacaugcucaccaacuccgaacuccuuagccucauaaacgacaugcccauaaccaacgaccaaaagaaacucaugagcaacaacguacaaauaguccgacaacaauccuauuccaucauguguaucaucaaagaagaaguccucgcauacguaguccaacucccccuauacggcguaaucgacaccccauguuggaaacuccacaccucaccacucuguaccaccaacaccaaagaaggcucaaacaucugccucacccgcacagaccgcggcugguacugcgacaacgcgggcuccgucagcuucuuuccccaagcggaaaccugcaaagucugcagcaacagagucuucugcgacacuaugaacucccucacccuccccucagaagucaaccucugcaacgucgacaucuucaacccgaaauacgacugcaaaaucaugaccagcaaaacugacgucuccucguccgucaucaccucacucggcgcaaucgugagcugcuacggcaaaaccaaaugcaccgccuccaacaaaaacaaaggcaucauaaaaacauucagcaacggcugcgacuacgucucgaacaaaggagucgacaccguaucagugggcaacacccuauacuacguaaacaagcaagaaggcaaaucacucuacguaaaaggcgaacccaucaucaacuucuacgacccccucgucuuccccuccgacgaguucgacgccuccaucucucaagucaacgagaaaaucaaccaaucccuugccuucauacguaaaagcgacgaacuccuucacaacguaaacgccgggaaauccaccacuaacauaaugaucaccaccaucaucaucguuaucauagucauccuccucucucucauagcagucggccuacuccuguacugcaaagcgcgcuaaggacuaguguccaccugucccuccugggcugcuggauugucucguuuuccugccaaauaaacaggaucagcgcuuuacagaucuaaaaaaaaaaaaaaaaaaaaaaaaaaaaaaaaaaaaaaaaaaaaaaaaaaaaaaaaaaaaaaaaugcaucccccccccccccccccccccccccccccccaaaggcucuuuucagagccaccagaauu

SEQ ID NO: 7228 - RNA, 1814 nt, Artificial Sequence
  mRNA product Design b-2 comprising derived and/or modified sequence from HRSV(A2)__F-del_DSCav1_mut7 (opt1)
gggagagccucugcuggaguccggggaguggcguuggcugcuagagcgaagcuuaccauggagcugcucauccugaaggccaacgccaucaccaccauccugacggcggugaccuucugcuucgccagcggccagaacaucaccgaggaguucuaccaguccacgugcagcgccgucuccaagggguaccucagcgcccugcggaccggcugguacaccuccgugaucaccaucgagcugagcaacaucaaggagaacaagugcaacgggaccgacgccaaggugaagcucaucaagcaggagcuggacaaguacaagaacgcggucacggagcugcagaugcugaugugcuccaccccggcaaccggcuccggcuccgccaucgcgagcggcgucgccgugugcaaggugcugcaccucgagggggaggucaacaagaucaagagcgcccugcuguccaccaacaaggccguggugagccucuccaacggcgucagcgugcugaccuucaaggugcuggaccucaagaacuacaucgacaagcagcugcugcccauccugaacaagcagagcugcuccaucagcaacaucgagacggugauggaguuccagcagaagaacaaccggcuccuggagaucacccgcgaguucagcgugaacgccggggucaccacccccguguccacguacaugcugaccaacagcgagcuccugucccugaucaacgacaugccgaucaccaacgaccagaagaagcucaugagcaacaacgugcagaucguccggcagcaguccuacagcaucaugugcaucaucaaggaggaggugcuggcguacgugguccagcugccccucuacggcgugaucgacacccccugcuggaagcugcacacgagcccccugugcaccaccaacaccaaggagggguccaacaucugccucacgcgcaccgaccggggcugguacugcgacaacgccggcagcgucuccuucuucccgcaggccgagaccugcaaggugugcagcaaccgcguguucugcgacaccaugaacucccugacgcugcccagcgagguaaaccucugcaacgucgacaucuucaaccccaaguacgacugcaagaucaugaccuccaagaccgacgugagcuccagcgugaucaccucccugggggccaucgucagcugcuacggcaagacgaagugcaccgccagcaacaagaacaaggggaucaucaagaccuucuccaacggcugcgacuacgugagcaacaagggcguggacaccguguccgucgggaacacccuguacuacgugaacaagcaggagggcaagagccucuacgugaagggggagcccaucaucaacuucuacgacccgcuggucuuccccuccgacgaguucgacgcgagcaucucccaggugaacgagaagaucaaccagagccuggccuucauccgcaaguccgacgagcugcuccacaacgugaacgccggcaagagcacgaccaacaucaugaucaccaccaucaucaucgucaucaucgugauccugcugucccucaucgccguggggcugcugcucuacugcaaggcccggugaggacuaguguccaccugucccuccugggcugcuggauugucucguuuuccugccaaauaaacaggaucagcgcuuuacagaucuaaaaaaaaaaaaaaaaaaaaaaaaaaaaaaaaaaaaaaaaaaaaaaaaaaaaaaaaaaaaaaaaugcaucccccccccccccccccccccccccccccccaaaggcucuuuucagagccaccagaauu

SEQ ID NO: 7229 - RNA, 1814 nt, Artificial Sequence
  mRNA product Design b-2 comprising derived and/or modified sequence from HRSV(A2)__F-del_DSCav1_mut7 (opt1)
gggagagccucugcuggaguccggggaguggcguuggcugcuagagcgaagcuuaccauggagcugcucauccugaaggccaacgccaucaccaccauccugacggcggugaccuucugcuucgccagcggccagaacaucaccgaggaguucuaccaguccacgugcagcgccgucuccaagggguaccucagcgcccugcgcaccggcugguacaccuccgugaucaccaucgagcugagcaacaucaaggagaacaagugcaacgggaccgacgccaaggugaagcucaucaagcaggagcuggacaaguacaagaacgcggucacggagcugcagaugcucaugugcuccacccccgccaccggcagcggguccgccaucgccagcggcguggcggugugcaagguccugcaccuggagggcgaggugaacaagaucaaguccgcccuccugagcaccaacaaggccguggucucccugagcaacgggguguccgugcucacguucaagguccuggaccugaagaacuacaucgacaagcagcuccugccgauccugaacaagcagagcugcuccaucagcaacaucgagaccgugauggaguuccagcagaagaacaaccggcuccuggagaucacccgcgaguucuccgugaacgccggcgucaccacgcccgugagcaccuacaugcugaccaacagcgagcuccugucccugaucaacgacaugcccaucaccaacgaccagaagaagcucaugagcaacaacgugcagaucguccggcagcaguccuacagcaucaugugcaucaucaaggaggaggugcuggccuacgugguccagcugccccucuacggggugaucgacacgccgugcuggaagcugcacaccagcccccugugcaccaccaacacgaaggagggcagcaacaucugccucacccgcaccgaccgggggugguacugcgacaacgcgggcuccgugagcuucuucccccaggccgagaccugcaaggucugcuccaaccgcguguucugcgacacgaugaacagccugacccugcccuccgaggucaaccucugcaacguggacaucuucaacccgaaguacgacugcaagaucaugaccagcaagaccgacguguccagcuccgucaucacgagccugggcgccaucguguccugcuacgggaagaccaagugcaccgccagcaacaagaacaagggcaucaucaagaccuucuccaacgggugcgacuacgugagcaacaagggcgucgacacggugagcgugggcaacacccuguacuacgucaacaagcaggaggggaagucccucuacgugaagggcgagcccaucaucaacuucuacgacccccugguguuccccagcgacgaguucgacgccuccaucagccaggucaacgagaagaucaaccagucccuggcguucauccggaaguccgacgagcuccugcacaacgugaacgccgggaaguccaccaccaacaucaugaucaccacgaucaucaucgugaucaucgucauccugcucagccugaucgccgugggccugcuccuguacugcaaggcccgcugaggacuaguguccaccugucccuccugggcugcuggauugucucguuuuccugccaaauaaacaggaucagcgcuuuacagaucuaaaaaaaaaaaaaaaaaaaaaaaaaaaaaaaaaaaaaaaaaaaaaaaaaaaaaaaaaaaaaaaaugcaucccccccccccccccccccccccccccccccaaaggcucuuuucagagccaccagaauu

SEQ ID NO: 7230 - RNA, 1814 nt, Artificial Sequence
  mRNA product Design b-2 comprising derived and/or modified sequence from HRSV(A2)__F-del_DSCav1_mut7 (opt2)
gggagagccucugcuggaguccggggaguggcguuggcugcuagagcgaagcuuaccauggagcuccucauccucaaggccaacgccaucaccaccauccucaccgccgucaccuucugcuucgccuccggccagaacaucaccgaggaguucuaccaguccaccugcuccgccgucuccaagggcuaccucuccgcccuccgcaccggcugguacaccuccgucaucaccaucgagcucuccaacaucaaggagaacaagugcaacggcaccgacgccaaggucaagcucaucaagcaggagcucgacaaguacaagaacgccgucaccgagcuccagaugcucaugugcuccacccccgccaccggcuccggcuccgccaucgccuccggcgucgccgucugcaagguccuccaccucgagggcgaggucaacaagaucaaguccgcccuccucuccaccaacaaggccgucgucucccucuccaacggcgucuccguccucaccuucaagguccucgaccucaagaacuacaucgacaagcagcuccuccccauccucaacaagcaguccugcuccaucuccaacaucgagaccgucauggaguuccagcagaagaacaaccgccuccucgagaucacccgcgaguucuccgucaacgccggcgucaccacccccgucuccaccuacaugcucaccaacuccgagcuccucucccucaucaacgacaugcccaucaccaacgaccagaagaagcucauguccaacaacguccagaucguccgccagcaguccuacuccaucaugugcaucaucaaggaggagguccucgccuacgucguccagcucccccucuacggcgucaucgacacccccugcuggaagcuccacaccuccccccucugcaccaccaacaccaaggagggcuccaacaucugccucacccgcaccgaccgcggcugguacugcgacaacgccggcuccgucuccuucuucccccaggccgagaccugcaaggucugcuccaaccgcgucuucugcgacaccaugaacucccucacccuccccuccgaggucaaccucugcaacgucgacaucuucaaccccaaguacgacugcaagaucaugaccuccaagaccgacgucuccuccuccgucaucaccucccucggcgccaucgucuccugcuacggcaagaccaagugcaccgccuccaacaagaacaagggcaucaucaagaccuucuccaacggcugcgacuacgucuccaacaagggcgucgacaccgucuccgucggcaacacccucuacuacgucaacaagcaggagggcaagucccucuacgucaagggcgagcccaucaucaacuucuacgacccccucgucuuccccuccgacgaguucgacgccuccaucucccaggucaacgagaagaucaaccagucccucgccuucauccgcaaguccgacgagcuccuccacaacgucaacgccggcaaguccaccaccaacaucaugaucaccaccaucaucaucgucaucaucgucauccuccucucccucaucgccgucggccuccuccucuacugcaaggcccgcugaggacuaguguccaccugucccuccugggcugcuggauugucucguuuuccugccaaauaaacaggaucagcgcuuuacagaucuaaaaaaaaaaaaaaaaaaaaaaaaaaaaaaaaaaaaaaaaaaaaaaaaaaaaaaaaaaaaaaaaugcaucccccccccccccccccccccccccccccccaaaggcucuuuucagagccaccagaauu

SEQ ID NO: 7231 - RNA, 1814 nt, Artificial Sequence
  mRNA product Design b-2 comprising derived and/or modified sequence from HRSV(A2)__F-del_DSCav1_mut7 (opt3)
gggagagccucugcuggaguccggggaguggcguuggcugcuagagcgaagcuuaccauggagcugcucauccuuaaggccaacgcuauuaccacaauacugacugcagugacguucugcuuugccagcggccagaauaucaccgaagaguucuaccaauccacauguucugcggucucaaaaggguauuugagugcuuuaagaacuggaugguacaccagcguuauuacaaucgaacuguccaacauuaaggagaauaaaugcaacgguaccgacgccaaggugaaacuaaucaagcaggaacucgauaaguauaaaaaugcaguaacugagcugcagaugcuuauguguucuacacccgccaccggcucggggucagcuauagcaagcggaguggccgucugcaaggugcugcacuuggagggcgaaguuaacaaaaucaagagugcucuccuguccacgaauaaagccguggucucucugagcaacgguguguccguacucacuuuuaagguuuuagaccugaagaauuacauugauaaacagcuuuugccuauccugaacaagcaaucauguaguauuagcaauaucgagaccgugauggaguuccagcagaaaaacaauaggcuacucgaaauaacacgggaguuuucugucaacgcgggggugacuaccccaguguccacauauaugcugaccaauucagaacuucugagcuugauuaacgacaugccgaucacgaacgaucagaagaaacucaugaguaauaacguccaaauuguucgccagcagucuuacuccaucaugugcaucauuaaggaggaagugcuggcauauguagugcaguuaccccuguacggagucauagacacuccuuguuggaaacuccauacaagcccacuuugcaccacuaauacaaaggagggcucgaacaucugucugacccgaacggaucguggcugguacugcgacaaugccgggucuguguccuucuuuccccaagcugaaaccuguaagguuugcucaaacagaguguucugcgauacaaugaauaguuugacucuaccuagcgaggucaaccuguguaauguggacauuuuuaacccaaaauaugauugcaagaucaugaccuccaaaacagacguaucuagcucaguuauaacuagccucggagccauuguguccuguuacgguaagaccaaaugcacagcaagcaauaagaacaagggcaucaucaaaaccuucucuaaugggugugauuaugucucaaacaagggaguggacacugucagugugggcaauacgcuguacuauguuaacaaacaggaggguaagagccuuuacgugaaaggggaacccauuaucaacuuuuaugacccucugguauucccauccgaugaguuugacgcuucuauuucgcaggucaaugaaaagauaaaccaaaguuuggccuucaucaggaaguccgaugagcuccugcacaaugugaacgcgggaaaaucaacaaccaauauuaugaucacuaccaucauuauaguuaucauugugaucuuacugagucuaauugccgucggccuccugcuuuacugcaaggcacggugaggacuaguguccaccugucccuccugggcugcuggauugucucguuuuccugccaaauaaacaggaucagcgcuuuacagaucuaaaaaaaaaaaaaaaaaaaaaaaaaaaaaaaaaaaaaaaaaaaaaaaaaaaaaaaaaaaaaaaaugcaucccccccccccccccccccccccccccccccaaaggcucuuuucagagccaccagaauu

SEQ ID NO: 7232 - RNA, 1814 nt, Artificial Sequence
  mRNA product Design b-2 comprising derived and/or modified sequence from HRSV(A2)__F-del_DSCav1_mut7 (opt4)
gggagagccucugcuggaguccggggaguggcguuggcugcuagagcgaagcuuaccauggagcugcugauccugaaggccaacgccaucaccaccauccugaccgccgugaccuucugcuucgccagcggccagaacaucaccgaggaguucuaccagagcaccugcagcgccgugagcaagggcuaccugagcgcccugagaaccggcugguacaccagcgugaucaccaucgagcugagcaacaucaaggagaacaagugcaacggcaccgacgccaaggugaagcugaucaagcaggagcuggacaaguacaagaacgccgugaccgagcugcagaugcugaugugcagcacccccgccaccggcagcggcagcgccaucgccagcggcguggccgugugcaaggugcugcaccuggagggcgaggugaacaagaucaagagcgcccugcugagcaccaacaaggccguggugagccugagcaacggcgugagcgugcugaccuucaaggugcuggaccugaagaacuacaucgacaagcagcugcugcccauccugaacaagcagagcugcagcaucagcaacaucgagaccgugauggaguuccagcagaagaacaacagacugcuggagaucaccagagaguucagcgugaacgccggcgugaccacccccgugagcaccuacaugcugaccaacagcgagcugcugagccugaucaacgacaugcccaucaccaacgaccagaagaagcugaugagcaacaacgugcagaucgugagacagcagagcuacagcaucaugugcaucaucaaggaggaggugcuggccuacguggugcagcugccccuguacggcgugaucgacacccccugcuggaagcugcacaccagcccccugugcaccaccaacaccaaggagggcagcaacaucugccugaccagaaccgacagaggcugguacugcgacaacgccggcagcgugagcuucuucccccaggccgagaccugcaaggugugcagcaacagaguguucugcgacaccaugaacagccugacccugcccagcgaggugaaccugugcaacguggacaucuucaaccccaaguacgacugcaagaucaugaccagcaagaccgacgugagcagcagcgugaucaccagccugggcgccaucgugagcugcuacggcaagaccaagugcaccgccagcaacaagaacaagggcaucaucaagaccuucagcaacggcugcgacuacgugagcaacaagggcguggacaccgugagcgugggcaacacccuguacuacgugaacaagcaggagggcaagagccuguacgugaagggcgagcccaucaucaacuucuacgacccccugguguuccccagcgacgaguucgacgccagcaucagccaggugaacgagaagaucaaccagagccuggccuucaucagaaagagcgacgagcugcugcacaacgugaacgccggcaagagcaccaccaacaucaugaucaccaccaucaucaucgugaucaucgugauccugcugagccugaucgccgugggccugcugcuguacugcaaggccagaugaggacuaguguccaccugucccuccugggcugcuggauugucucguuuuccugccaaauaaacaggaucagcgcuuuacagaucuaaaaaaaaaaaaaaaaaaaaaaaaaaaaaaaaaaaaaaaaaaaaaaaaaaaaaaaaaaaaaaaaugcaucccccccccccccccccccccccccccccccaaaggcucuuuucagagccaccagaauu

SEQ ID NO: 7233 - RNA, 1814 nt, Artificial Sequence
  mRNA product Design b-2 comprising derived and/or modified sequence from HRSV(A2)__F-del_DSCav1_mut7 (opt5)
gggagagccucugcuggaguccggggaguggcguuggcugcuagagcgaagcuuaccauggagcugcucauccugaaggccaacgcuauuaccacaauccuuacggccgugaccuucugcuuugcgagcggccagaauauuacagaagaguucuaccaauccaccuguucugcugucagcaaaggguaucuguccgcccucagaacaggaugguacaccucuguuaucacaauugaacugagcaacaucaaggagaauaaaugcaacggcaccgacgccaaggugaaacuuaucaagcaggaacuggauaaguauaaaaaugcugugacggagcuccagaugcugauguguuccacccccgccacagggucuggaagcgcuauugccuccggcgucgcggugugcaagguucugcaccucgagggggaagugaacaaaaucaagagcgcccugcuuucuaccaauaaagcugucgugucccugagcaacggaguuucugugcucacauuuaagguccuggaccuuaagaauuacauugauaaacagcugcucccuauccugaacaagcaauccuguagcauuucuaauaucgagaccgugauggaguuccagcagaaaaacaaucggcugcucgaaauuacgcgcgaguuuuccgugaacgccggcgucacaaccccgguuagcacauauaugcugaccaauuccgaacuucugucucucaucaacgacaugcccaucaccaacgaucagaagaaacugaugagcaauaacgugcaaauugugagacagcaguccuacagcaucaugugcauuaucaaggaggaaguccuugcuuaugugguucagcugccucucuacggcgugauugacacacccuguuggaaacugcauacgucuccucugugcaccacaaauaccaaggagggguccaacaucugucucacacggaccgaucgcggaugguacugcgacaaugccggcagcgucucuuucuuuccccaagcggaaacguguaaggugugcagcaacagaguuuucugcgauacaaugaacucccugacccuuccuucugaggugaaucuguguaaugucgacaucuuuaacccgaaauaugauugcaagauuaugaccagcaaaacagacguguccagcucugucaucaccucccucggggccauugugagcuguuacggaaagacaaaaugcacggcuucuaauaagaacaagggcaucauuaaaaccuucuccaaugggugugauuauguuagcaacaagggaguggacacagucuccgugggcaauacccuguacuauguuaacaaacaggagggcaagucucuuuacgugaaaggggaacccaucaucaacuuuuaugacccucuggucuuccccagcgaugaguuugacgccuccauuucucaggugaaugaaaagaucaaccaaagccucgcuuucauucggaaguccgaugagcugcugcacaaugugaacgccggaaaaagcacaaccaauaucaugauuacgaccaucauuaucguuaucauugucauccuccugucucuuauugccgugggccugcuccuguacugcaaggcucgcugaggacuaguguccaccugucccuccugggcugcuggauugucucguuuuccugccaaauaaacaggaucagcgcuuuacagaucuaaaaaaaaaaaaaaaaaaaaaaaaaaaaaaaaaaaaaaaaaaaaaaaaaaaaaaaaaaaaaaaaugcaucccccccccccccccccccccccccccccccaaaggcucuuuucagagccaccagaauu

SEQ ID NO: 7234 - RNA, 1814 nt, Artificial Sequence
  mRNA product Design b-2 comprising derived and/or modified sequence from HRSV(A2)__F-del_DSCav1_mut7 (opt6)
gggagagccucugcuggaguccggggaguggcguuggcugcuagagcgaagcuuaccauggaauuacuaauccucaaagcaaacgcaauuacaaccauacuaaccgcugucaccuuuuguuuugccucaggacaaaacauaacugaagaauuuuaccaaucaacaugcuccgcaguaucuaaaggauaccucagcgcguuaagaacaggaugguacacaucgguaauaaccaucgaauuauccaacauaaaagaaaauaaaugcaauggaacagacgcaaaagucaaauuaauuaaacaagaacuagacaaauauaaaaacgcaguaaccgaauuacaaaugcuaauguguucaacaccagcaacaggaucaggaucagcuauagcuucaggaguugccguaugcaaagugcuacacuuagaaggagaagugaauaaaauaaaaucagcucuauuaucaacgaacaaagccguaguaucucuaucaaauggcguaucaguacucacauucaaaguacucgaccuaaaaaacuauauagauaaacaacuauuacccauccuaaauaaacaaagcugcucuauaucaaacaucgaaacaguaauggaauuucaacaaaaaaacaacagacuacuagaaauaacccgagaguucucaguuaaugcaggaguaacaacaccagucucaacauacaugcucacaaacucagaacuccuaucacuaauaaaugacaugccaauaacaaacgaccaaaaaaaacucaugucuaacaacguccaaauaguaagacaacaauccuacagcauaauguguauaauaaaagaagaaguuuuagcauacgucguacaacuacccuuauauggcguaauagauacaccaugcuggaaacuccauaccucaccucuauguacaacaaauaccaaagaagguucuaauauaugccuaacacgaacugaccgaggaugguacugugacaacgcaggaucagucucuuucuuuccacaagcagaaaccugcaaaguaugcaguaaccgcguauuuugcgacacaaugaacucccuaaccuuaccaucagaaguaaacuuauguaacguagacauauucaauccaaaauaugacugcaaaauaaugacaucaaaaacagacguaagcucaucaguaauaacuucacuaggcgcaauuguaucaugcuauggaaaaaccaaauguaccgcauccaacaaaaauaaaggaauaauaaaaaccuucucuaacggaugcgacuacguaucaaacaaagguguagauacaguuucuguaggaaacacacucuacuauguaaauaaacaagaaggaaaaucacuauacguaaaaggagaaccaauaauaaacuucuaugacccacuuguauuuccaucugaugaauuugaugcaagcauaucacaaguaaacgaaaaaauaaaccaaucucuagccuuuauacgaaaaagcgacgaauuacuacauaacgucaacgcuggaaaaucaacaacaaacauaaugauaacaacaauaauaauaguaauaauagucauccuauuaucacuaaucgccguaggacuacuccuauacugcaaagcuagauaaggacuaguguccaccugucccuccugggcugcuggauugucucguuuuccugccaaauaaacaggaucagcgcuuuacagaucuaaaaaaaaaaaaaaaaaaaaaaaaaaaaaaaaaaaaaaaaaaaaaaaaaaaaaaaaaaaaaaaaugcaucccccccccccccccccccccccccccccccaaaggcucuuuucagagccaccagaauu

SEQ ID NO: 7235 - RNA, 1814 nt, Artificial Sequence
  mRNA product Design b-2 comprising derived and/or modified sequence from HRSV(A2)__F-del_DSCav1_mut7 (opt11)
gggagagccucugcuggaguccggggaguggcguuggcugcuagagcgaagcuuaccauggaacuccucauccucaaagccaacgccauaaccacuauccucacagcagucacuuucugcuucgccucaggacaaaacauaaccgaagaguucuaccaauccacaugcuccgccgucuccaaaggcuaccucucagcgcuccgcaccggcugguacacauccgucaucaccaucgaacuaagcaacauaaaagaaaacaaaugcaacggcaccgacgccaaaguuaaacucaucaagcaagaacucgacaaauacaaaaacgcagucacagaacuucaaaugcucaugugcuccacacccgccacagguucuggcucagcaaucgcaagcggcgucgccguaugcaaaguccuucaccucgaaggcgaagucaacaaaaucaaauccgcccuccucuccaccaauaaagcugucgucucacucuccaacggcgucagcguccucacauucaaaguccucgaccucaaaaacuacauagacaagcaacuccucccgauacucaacaaacaaagcugcucuaucuccaacaucgaaaccgucauggaguuccaacagaaaaacaaucgucuccucgaaaucacccgcgaguucucaguaaacgccggggucaccacaccagucuccaccuacaugcucaccaacuccgaacuccuuagccucauaaacgacaugcccauaaccaacgaccaaaagaaacucaugagcaacaacguacaaauaguccgacaacaauccuauuccaucauguguaucaucaaagaagaaguccucgcauacguaguccaacucccccuauacggcguaaucgacaccccauguuggaaacuccacaccucaccacucuguaccaccaacaccaaagaaggcucaaacaucugccucacccgcacagaccgcggcugguacugcgacaacgcgggcuccgucagcuucuuuccccaagcggaaaccugcaaagucugcagcaacagagucuucugcgacacuaugaacucccucacccuccccucagaagucaaccucugcaacgucgacaucuucaacccgaaauacgacugcaaaaucaugaccagcaaaacugacgucuccucguccgucaucaccucacucggcgcaaucgugagcugcuacggcaaaaccaaaugcaccgccuccaacaaaaacaaaggcaucauaaaaacauucagcaacggcugcgacuacgucucgaacaaaggagucgacaccguaucagugggcaacacccuauacuacguaaacaagcaagaaggcaaaucacucuacguaaaaggcgaacccaucaucaacuucuacgacccccucgucuuccccuccgacgaguucgacgccuccaucucucaagucaacgagaaaaucaaccaaucccuugccuucauacguaaaagcgacgaacuccuucacaacguaaacgccgggaaauccaccacuaacauaaugaucaccaccaucaucaucguuaucauagucauccuccucucucucauagcagucggccuacuccuguacugcaaagcgcgcuaaggacuaguguccaccugucccuccugggcugcuggauugucucguuuuccugccaaauaaacaggaucagcgcuuuacagaucuaaaaaaaaaaaaaaaaaaaaaaaaaaaaaaaaaaaaaaaaaaaaaaaaaaaaaaaaaaaaaaaaugcaucccccccccccccccccccccccccccccccaaaggcucuuuucagagccaccagaauu

SEQ ID NO: 7236 - RNA, 1834 nt, Artificial Sequence
  mRNA product Design b-3 comprising derived and/or modified sequence from HRSV(A2)__F-del_DSCav1_mut7 (opt1)
gggagagucccgcagucggcguccagcggcucugcuuguucgugugugugucguugcaggccuuauucaagcuuaccauggagcugcucauccugaaggccaacgccaucaccaccauccugacggcggugaccuucugcuucgccagcggccagaacaucaccgaggaguucuaccaguccacgugcagcgccgucuccaagggguaccucagcgcccugcggaccggcugguacaccuccgugaucaccaucgagcugagcaacaucaaggagaacaagugcaacgggaccgacgccaaggugaagcucaucaagcaggagcuggacaaguacaagaacgcggucacggagcugcagaugcugaugugcuccaccccggcaaccggcuccggcuccgccaucgcgagcggcgucgccgugugcaaggugcugcaccucgagggggaggucaacaagaucaagagcgcccugcuguccaccaacaaggccguggugagccucuccaacggcgucagcgugcugaccuucaaggugcuggaccucaagaacuacaucgacaagcagcugcugcccauccugaacaagcagagcugcuccaucagcaacaucgagacggugauggaguuccagcagaagaacaaccggcuccuggagaucacccgcgaguucagcgugaacgccggggucaccacccccguguccacguacaugcugaccaacagcgagcuccugucccugaucaacgacaugccgaucaccaacgaccagaagaagcucaugagcaacaacgugcagaucguccggcagcaguccuacagcaucaugugcaucaucaaggaggaggugcuggcguacgugguccagcugccccucuacggcgugaucgacacccccugcuggaagcugcacacgagcccccugugcaccaccaacaccaaggagggguccaacaucugccucacgcgcaccgaccggggcugguacugcgacaacgccggcagcgucuccuucuucccgcaggccgagaccugcaaggugugcagcaaccgcguguucugcgacaccaugaacucccugacgcugcccagcgagguaaaccucugcaacgucgacaucuucaaccccaaguacgacugcaagaucaugaccuccaagaccgacgugagcuccagcgugaucaccucccugggggccaucgucagcugcuacggcaagacgaagugcaccgccagcaacaagaacaaggggaucaucaagaccuucuccaacggcugcgacuacgugagcaacaagggcguggacaccguguccgucgggaacacccuguacuacgugaacaagcaggagggcaagagccucuacgugaagggggagcccaucaucaacuucuacgacccgcuggucuuccccuccgacgaguucgacgcgagcaucucccaggugaacgagaagaucaaccagagccuggccuucauccgcaaguccgacgagcugcuccacaacgugaacgccggcaagagcacgaccaacaucaugaucaccaccaucaucaucgucaucaucgugauccugcugucccucaucgccguggggcugcugcucuacugcaaggcccggugaggacuaguguccaccugucccuccugggcugcuggauugucucguuuuccugccaaauaaacaggaucagcgcuuuacagaucuaaaaaaaaaaaaaaaaaaaaaaaaaaaaaaaaaaaaaaaaaaaaaaaaaaaaaaaaaaaaaaaaugcaucccccccccccccccccccccccccccccccaaaggcucuuuucagagccaccagaauu

SEQ ID NO: 7237 - RNA, 1834 nt, Artificial Sequence
  mRNA product Design b-3 comprising derived and/or modified sequence from HRSV(A2)__F-del_DSCav1_mut7 (opt1)
gggagagucccgcagucggcguccagcggcucugcuuguucgugugugugucguugcaggccuuauucaagcuuaccauggagcugcucauccugaaggccaacgccaucaccaccauccugacggcggugaccuucugcuucgccagcggccagaacaucaccgaggaguucuaccaguccacgugcagcgccgucuccaagggguaccucagcgcccugcgcaccggcugguacaccuccgugaucaccaucgagcugagcaacaucaaggagaacaagugcaacgggaccgacgccaaggugaagcucaucaagcaggagcuggacaaguacaagaacgcggucacggagcugcagaugcucaugugcuccacccccgccaccggcagcggguccgccaucgccagcggcguggcggugugcaagguccugcaccuggagggcgaggugaacaagaucaaguccgcccuccugagcaccaacaaggccguggucucccugagcaacgggguguccgugcucacguucaagguccuggaccugaagaacuacaucgacaagcagcuccugccgauccugaacaagcagagcugcuccaucagcaacaucgagaccgugauggaguuccagcagaagaacaaccggcuccuggagaucacccgcgaguucuccgugaacgccggcgucaccacgcccgugagcaccuacaugcugaccaacagcgagcuccugucccugaucaacgacaugcccaucaccaacgaccagaagaagcucaugagcaacaacgugcagaucguccggcagcaguccuacagcaucaugugcaucaucaaggaggaggugcuggccuacgugguccagcugccccucuacggggugaucgacacgccgugcuggaagcugcacaccagcccccugugcaccaccaacacgaaggagggcagcaacaucugccucacccgcaccgaccgggggugguacugcgacaacgcgggcuccgugagcuucuucccccaggccgagaccugcaaggucugcuccaaccgcguguucugcgacacgaugaacagccugacccugcccuccgaggucaaccucugcaacguggacaucuucaacccgaaguacgacugcaagaucaugaccagcaagaccgacguguccagcuccgucaucacgagccugggcgccaucguguccugcuacgggaagaccaagugcaccgccagcaacaagaacaagggcaucaucaagaccuucuccaacgggugcgacuacgugagcaacaagggcgucgacacggugagcgugggcaacacccuguacuacgucaacaagcaggaggggaagucccucuacgugaagggcgagcccaucaucaacuucuacgacccccugguguuccccagcgacgaguucgacgccuccaucagccaggucaacgagaagaucaaccagucccuggcguucauccggaaguccgacgagcuccugcacaacgugaacgccgggaaguccaccaccaacaucaugaucaccacgaucaucaucgugaucaucgucauccugcucagccugaucgccgugggccugcuccuguacugcaaggcccgcugaggacuaguguccaccugucccuccugggcugcuggauugucucguuuuccugccaaauaaacaggaucagcgcuuuacagaucuaaaaaaaaaaaaaaaaaaaaaaaaaaaaaaaaaaaaaaaaaaaaaaaaaaaaaaaaaaaaaaaaugcaucccccccccccccccccccccccccccccccaaaggcucuuuucagagccaccagaauu

SEQ ID NO: 7238 - RNA, 1834 nt, Artificial Sequence
  mRNA product Design b-3 comprising derived and/or modified sequence from HRSV(A2)__F-del_DSCav1_mut7 (opt2)
gggagagucccgcagucggcguccagcggcucugcuuguucgugugugugucguugcaggccuuauucaagcuuaccauggagcuccucauccucaaggccaacgccaucaccaccauccucaccgccgucaccuucugcuucgccuccggccagaacaucaccgaggaguucuaccaguccaccugcuccgccgucuccaagggcuaccucuccgcccuccgcaccggcugguacaccuccgucaucaccaucgagcucuccaacaucaaggagaacaagugcaacggcaccgacgccaaggucaagcucaucaagcaggagcucgacaaguacaagaacgccgucaccgagcuccagaugcucaugugcuccacccccgccaccggcuccggcuccgccaucgccuccggcgucgccgucugcaagguccuccaccucgagggcgaggucaacaagaucaaguccgcccuccucuccaccaacaaggccgucgucucccucuccaacggcgucuccguccucaccuucaagguccucgaccucaagaacuacaucgacaagcagcuccuccccauccucaacaagcaguccugcuccaucuccaacaucgagaccgucauggaguuccagcagaagaacaaccgccuccucgagaucacccgcgaguucuccgucaacgccggcgucaccacccccgucuccaccuacaugcucaccaacuccgagcuccucucccucaucaacgacaugcccaucaccaacgaccagaagaagcucauguccaacaacguccagaucguccgccagcaguccuacuccaucaugugcaucaucaaggaggagguccucgccuacgucguccagcucccccucuacggcgucaucgacacccccugcuggaagcuccacaccuccccccucugcaccaccaacaccaaggagggcuccaacaucugccucacccgcaccgaccgcggcugguacugcgacaacgccggcuccgucuccuucuucccccaggccgagaccugcaaggucugcuccaaccgcgucuucugcgacaccaugaacucccucacccuccccuccgaggucaaccucugcaacgucgacaucuucaaccccaaguacgacugcaagaucaugaccuccaagaccgacgucuccuccuccgucaucaccucccucggcgccaucgucuccugcuacggcaagaccaagugcaccgccuccaacaagaacaagggcaucaucaagaccuucuccaacggcugcgacuacgucuccaacaagggcgucgacaccgucuccgucggcaacacccucuacuacgucaacaagcaggagggcaagucccucuacgucaagggcgagcccaucaucaacuucuacgacccccucgucuuccccuccgacgaguucgacgccuccaucucccaggucaacgagaagaucaaccagucccucgccuucauccgcaaguccgacgagcuccuccacaacgucaacgccggcaaguccaccaccaacaucaugaucaccaccaucaucaucgucaucaucgucauccuccucucccucaucgccgucggccuccuccucuacugcaaggcccgcugaggacuaguguccaccugucccuccugggcugcuggauugucucguuuuccugccaaauaaacaggaucagcgcuuuacagaucuaaaaaaaaaaaaaaaaaaaaaaaaaaaaaaaaaaaaaaaaaaaaaaaaaaaaaaaaaaaaaaaaugcaucccccccccccccccccccccccccccccccaaaggcucuuuucagagccaccagaauu

SEQ ID NO: 7239 - RNA, 1834 nt, Artificial Sequence
  mRNA product Design b-3 comprising derived and/or modified sequence from HRSV(A2)__F-del_DSCav1_mut7 (opt3)
gggagagucccgcagucggcguccagcggcucugcuuguucgugugugugucguugcaggccuuauucaagcuuaccauggagcugcucauccuuaaggccaacgcuauuaccacaauacugacugcagugacguucugcuuugccagcggccagaauaucaccgaagaguucuaccaauccacauguucugcggucucaaaaggguauuugagugcuuuaagaacuggaugguacaccagcguuauuacaaucgaacuguccaacauuaaggagaauaaaugcaacgguaccgacgccaaggugaaacuaaucaagcaggaacucgauaaguauaaaaaugcaguaacugagcugcagaugcuuauguguucuacacccgccaccggcucggggucagcuauagcaagcggaguggccgucugcaaggugcugcacuuggagggcgaaguuaacaaaaucaagagugcucuccuguccacgaauaaagccguggucucucugagcaacgguguguccguacucacuuuuaagguuuuagaccugaagaauuacauugauaaacagcuuuugccuauccugaacaagcaaucauguaguauuagcaauaucgagaccgugauggaguuccagcagaaaaacaauaggcuacucgaaauaacacgggaguuuucugucaacgcgggggugacuaccccaguguccacauauaugcugaccaauucagaacuucugagcuugauuaacgacaugccgaucacgaacgaucagaagaaacucaugaguaauaacguccaaauuguucgccagcagucuuacuccaucaugugcaucauuaaggaggaagugcuggcauauguagugcaguuaccccuguacggagucauagacacuccuuguuggaaacuccauacaagcccacuuugcaccacuaauacaaaggagggcucgaacaucugucugacccgaacggaucguggcugguacugcgacaaugccgggucuguguccuucuuuccccaagcugaaaccuguaagguuugcucaaacagaguguucugcgauacaaugaauaguuugacucuaccuagcgaggucaaccuguguaauguggacauuuuuaacccaaaauaugauugcaagaucaugaccuccaaaacagacguaucuagcucaguuauaacuagccucggagccauuguguccuguuacgguaagaccaaaugcacagcaagcaauaagaacaagggcaucaucaaaaccuucucuaaugggugugauuaugucucaaacaagggaguggacacugucagugugggcaauacgcuguacuauguuaacaaacaggaggguaagagccuuuacgugaaaggggaacccauuaucaacuuuuaugacccucugguauucccauccgaugaguuugacgcuucuauuucgcaggucaaugaaaagauaaaccaaaguuuggccuucaucaggaaguccgaugagcuccugcacaaugugaacgcgggaaaaucaacaaccaauauuaugaucacuaccaucauuauaguuaucauugugaucuuacugagucuaauugccgucggccuccugcuuuacugcaaggcacggugaggacuaguguccaccugucccuccugggcugcuggauugucucguuuuccugccaaauaaacaggaucagcgcuuuacagaucuaaaaaaaaaaaaaaaaaaaaaaaaaaaaaaaaaaaaaaaaaaaaaaaaaaaaaaaaaaaaaaaaugcaucccccccccccccccccccccccccccccccaaaggcucuuuucagagccaccagaauu

SEQ ID NO: 7240 - RNA, 1834 nt, Artificial Sequence
  mRNA product Design b-3 comprising derived and/or modified sequence from HRSV(A2)__F-del_DSCav1_mut7 (opt4)
gggagagucccgcagucggcguccagcggcucugcuuguucgugugugugucguugcaggccuuauucaagcuuaccauggagcugcugauccugaaggccaacgccaucaccaccauccugaccgccgugaccuucugcuucgccagcggccagaacaucaccgaggaguucuaccagagcaccugcagcgccgugagcaagggcuaccugagcgcccugagaaccggcugguacaccagcgugaucaccaucgagcugagcaacaucaaggagaacaagugcaacggcaccgacgccaaggugaagcugaucaagcaggagcuggacaaguacaagaacgccgugaccgagcugcagaugcugaugugcagcacccccgccaccggcagcggcagcgccaucgccagcggcguggccgugugcaaggugcugcaccuggagggcgaggugaacaagaucaagagcgcccugcugagcaccaacaaggccguggugagccugagcaacggcgugagcgugcugaccuucaaggugcuggaccugaagaacuacaucgacaagcagcugcugcccauccugaacaagcagagcugcagcaucagcaacaucgagaccgugauggaguuccagcagaagaacaacagacugcuggagaucaccagagaguucagcgugaacgccggcgugaccacccccgugagcaccuacaugcugaccaacagcgagcugcugagccugaucaacgacaugcccaucaccaacgaccagaagaagcugaugagcaacaacgugcagaucgugagacagcagagcuacagcaucaugugcaucaucaaggaggaggugcuggccuacguggugcagcugccccuguacggcgugaucgacacccccugcuggaagcugcacaccagcccccugugcaccaccaacaccaaggagggcagcaacaucugccugaccagaaccgacagaggcugguacugcgacaacgccggcagcgugagcuucuucccccaggccgagaccugcaaggugugcagcaacagaguguucugcgacaccaugaacagccugacccugcccagcgaggugaaccugugcaacguggacaucuucaaccccaaguacgacugcaagaucaugaccagcaagaccgacgugagcagcagcgugaucaccagccugggcgccaucgugagcugcuacggcaagaccaagugcaccgccagcaacaagaacaagggcaucaucaagaccuucagcaacggcugcgacuacgugagcaacaagggcguggacaccgugagcgugggcaacacccuguacuacgugaacaagcaggagggcaagagccuguacgugaagggcgagcccaucaucaacuucuacgacccccugguguuccccagcgacgaguucgacgccagcaucagccaggugaacgagaagaucaaccagagccuggccuucaucagaaagagcgacgagcugcugcacaacgugaacgccggcaagagcaccaccaacaucaugaucaccaccaucaucaucgugaucaucgugauccugcugagccugaucgccgugggccugcugcuguacugcaaggccagaugaggacuaguguccaccugucccuccugggcugcuggauugucucguuuuccugccaaauaaacaggaucagcgcuuuacagaucuaaaaaaaaaaaaaaaaaaaaaaaaaaaaaaaaaaaaaaaaaaaaaaaaaaaaaaaaaaaaaaaaugcaucccccccccccccccccccccccccccccccaaaggcucuuuucagagccaccagaauu

SEQ ID NO: 7241 - RNA, 1834 nt, Artificial Sequence
  mRNA product Design b-3 comprising derived and/or modified sequence from HRSV(A2)__F-del_DSCav1_mut7 (opt5)
gggagagucccgcagucggcguccagcggcucugcuuguucgugugugugucguugcaggccuuauucaagcuuaccauggagcugcucauccugaaggccaacgcuauuaccacaauccuuacggccgugaccuucugcuuugcgagcggccagaauauuacagaagaguucuaccaauccaccuguucugcugucagcaaaggguaucuguccgcccucagaacaggaugguacaccucuguuaucacaauugaacugagcaacaucaaggagaauaaaugcaacggcaccgacgccaaggugaaacuuaucaagcaggaacuggauaaguauaaaaaugcugugacggagcuccagaugcugauguguuccacccccgccacagggucuggaagcgcuauugccuccggcgucgcggugugcaagguucugcaccucgagggggaagugaacaaaaucaagagcgcccugcuuucuaccaauaaagcugucgugucccugagcaacggaguuucugugcucacauuuaagguccuggaccuuaagaauuacauugauaaacagcugcucccuauccugaacaagcaauccuguagcauuucuaauaucgagaccgugauggaguuccagcagaaaaacaaucggcugcucgaaauuacgcgcgaguuuuccgugaacgccggcgucacaaccccgguuagcacauauaugcugaccaauuccgaacuucugucucucaucaacgacaugcccaucaccaacgaucagaagaaacugaugagcaauaacgugcaaauugugagacagcaguccuacagcaucaugugcauuaucaaggaggaaguccuugcuuaugugguucagcugccucucuacggcgugauugacacacccuguuggaaacugcauacgucuccucugugcaccacaaauaccaaggagggguccaacaucugucucacacggaccgaucgcggaugguacugcgacaaugccggcagcgucucuuucuuuccccaagcggaaacguguaaggugugcagcaacagaguuuucugcgauacaaugaacucccugacccuuccuucugaggugaaucuguguaaugucgacaucuuuaacccgaaauaugauugcaagauuaugaccagcaaaacagacguguccagcucugucaucaccucccucggggccauugugagcuguuacggaaagacaaaaugcacggcuucuaauaagaacaagggcaucauuaaaaccuucuccaaugggugugauuauguuagcaacaagggaguggacacagucuccgugggcaauacccuguacuauguuaacaaacaggagggcaagucucuuuacgugaaaggggaacccaucaucaacuuuuaugacccucuggucuuccccagcgaugaguuugacgccuccauuucucaggugaaugaaaagaucaaccaaagccucgcuuucauucggaaguccgaugagcugcugcacaaugugaacgccggaaaaagcacaaccaauaucaugauuacgaccaucauuaucguuaucauugucauccuccugucucuuauugccgugggccugcuccuguacugcaaggcucgcugaggacuaguguccaccugucccuccugggcugcuggauugucucguuuuccugccaaauaaacaggaucagcgcuuuacagaucuaaaaaaaaaaaaaaaaaaaaaaaaaaaaaaaaaaaaaaaaaaaaaaaaaaaaaaaaaaaaaaaaugcaucccccccccccccccccccccccccccccccaaaggcucuuuucagagccaccagaauu

SEQ ID NO: 7242 - RNA, 1834 nt, Artificial Sequence
  mRNA product Design b-3 comprising derived and/or modified sequence from HRSV(A2)__F-del_DSCav1_mut7 (opt6)
gggagagucccgcagucggcguccagcggcucugcuuguucgugugugugucguugcaggccuuauucaagcuuaccauggaauuacuaauccucaaagcaaacgcaauuacaaccauacuaaccgcugucaccuuuuguuuugccucaggacaaaacauaacugaagaauuuuaccaaucaacaugcuccgcaguaucuaaaggauaccucagcgcguuaagaacaggaugguacacaucgguaauaaccaucgaauuauccaacauaaaagaaaauaaaugcaauggaacagacgcaaaagucaaauuaauuaaacaagaacuagacaaauauaaaaacgcaguaaccgaauuacaaaugcuaauguguucaacaccagcaacaggaucaggaucagcuauagcuucaggaguugccguaugcaaagugcuacacuuagaaggagaagugaauaaaauaaaaucagcucuauuaucaacgaacaaagccguaguaucucuaucaaauggcguaucaguacucacauucaaaguacucgaccuaaaaaacuauauagauaaacaacuauuacccauccuaaauaaacaaagcugcucuauaucaaacaucgaaacaguaauggaauuucaacaaaaaaacaacagacuacuagaaauaacccgagaguucucaguuaaugcaggaguaacaacaccagucucaacauacaugcucacaaacucagaacuccuaucacuaauaaaugacaugccaauaacaaacgaccaaaaaaaacucaugucuaacaacguccaaauaguaagacaacaauccuacagcauaauguguauaauaaaagaagaaguuuuagcauacgucguacaacuacccuuauauggcguaauagauacaccaugcuggaaacuccauaccucaccucuauguacaacaaauaccaaagaagguucuaauauaugccuaacacgaacugaccgaggaugguacugugacaacgcaggaucagucucuuucuuuccacaagcagaaaccugcaaaguaugcaguaaccgcguauuuugcgacacaaugaacucccuaaccuuaccaucagaaguaaacuuauguaacguagacauauucaauccaaaauaugacugcaaaauaaugacaucaaaaacagacguaagcucaucaguaauaacuucacuaggcgcaauuguaucaugcuauggaaaaaccaaauguaccgcauccaacaaaaauaaaggaauaauaaaaaccuucucuaacggaugcgacuacguaucaaacaaagguguagauacaguuucuguaggaaacacacucuacuauguaaauaaacaagaaggaaaaucacuauacguaaaaggagaaccaauaauaaacuucuaugacccacuuguauuuccaucugaugaauuugaugcaagcauaucacaaguaaacgaaaaaauaaaccaaucucuagccuuuauacgaaaaagcgacgaauuacuacauaacgucaacgcuggaaaaucaacaacaaacauaaugauaacaacaauaauaauaguaauaauagucauccuauuaucacuaaucgccguaggacuacuccuauacugcaaagcuagauaaggacuaguguccaccugucccuccugggcugcuggauugucucguuuuccugccaaauaaacaggaucagcgcuuuacagaucuaaaaaaaaaaaaaaaaaaaaaaaaaaaaaaaaaaaaaaaaaaaaaaaaaaaaaaaaaaaaaaaaugcaucccccccccccccccccccccccccccccccaaaggcucuuuucagagccaccagaauu

SEQ ID NO: 7243 - RNA, 1834 nt, Artificial Sequence
  mRNA product Design b-3 comprising derived and/or modified sequence from HRSV(A2)__F-del_DSCav1_mut7 (opt11)
gggagagucccgcagucggcguccagcggcucugcuuguucgugugugugucguugcaggccuuauucaagcuuaccauggaacuccucauccucaaagccaacgccauaaccacuauccucacagcagucacuuucugcuucgccucaggacaaaacauaaccgaagaguucuaccaauccacaugcuccgccgucuccaaaggcuaccucucagcgcuccgcaccggcugguacacauccgucaucaccaucgaacuaagcaacauaaaagaaaacaaaugcaacggcaccgacgccaaaguuaaacucaucaagcaagaacucgacaaauacaaaaacgcagucacagaacuucaaaugcucaugugcuccacacccgccacagguucuggcucagcaaucgcaagcggcgucgccguaugcaaaguccuucaccucgaaggcgaagucaacaaaaucaaauccgcccuccucuccaccaauaaagcugucgucucacucuccaacggcgucagcguccucacauucaaaguccucgaccucaaaaacuacauagacaagcaacuccucccgauacucaacaaacaaagcugcucuaucuccaacaucgaaaccgucauggaguuccaacagaaaaacaaucgucuccucgaaaucacccgcgaguucucaguaaacgccggggucaccacaccagucuccaccuacaugcucaccaacuccgaacuccuuagccucauaaacgacaugcccauaaccaacgaccaaaagaaacucaugagcaacaacguacaaauaguccgacaacaauccuauuccaucauguguaucaucaaagaagaaguccucgcauacguaguccaacucccccuauacggcguaaucgacaccccauguuggaaacuccacaccucaccacucuguaccaccaacaccaaagaaggcucaaacaucugccucacccgcacagaccgcggcugguacugcgacaacgcgggcuccgucagcuucuuuccccaagcggaaaccugcaaagucugcagcaacagagucuucugcgacacuaugaacucccucacccuccccucagaagucaaccucugcaacgucgacaucuucaacccgaaauacgacugcaaaaucaugaccagcaaaacugacgucuccucguccgucaucaccucacucggcgcaaucgugagcugcuacggcaaaaccaaaugcaccgccuccaacaaaaacaaaggcaucauaaaaacauucagcaacggcugcgacuacgucucgaacaaaggagucgacaccguaucagugggcaacacccuauacuacguaaacaagcaagaaggcaaaucacucuacguaaaaggcgaacccaucaucaacuucuacgacccccucgucuuccccuccgacgaguucgacgccuccaucucucaagucaacgagaaaaucaaccaaucccuugccuucauacguaaaagcgacgaacuccuucacaacguaaacgccgggaaauccaccacuaacauaaugaucaccaccaucaucaucguuaucauagucauccuccucucucucauagcagucggccuacuccuguacugcaaagcgcgcuaaggacuaguguccaccugucccuccugggcugcuggauugucucguuuuccugccaaauaaacaggaucagcgcuuuacagaucuaaaaaaaaaaaaaaaaaaaaaaaaaaaaaaaaaaaaaaaaaaaaaaaaaaaaaaaaaaaaaaaaugcaucccccccccccccccccccccccccccccccaaaggcucuuuucagagccaccagaauu

SEQ ID NO: 7244 - RNA, 1885 nt, Artificial Sequence
  mRNA product Design b-4 comprising derived and/or modified sequence from HRSV(A2)__F-del_DSCav1_mut7 (opt1)
gggagagucccgcagucggcguccagcggcucugcuuguucgugugugugucguugcaggccuuauucaagcuuaccauggagcugcucauccugaaggccaacgccaucaccaccauccugacggcggugaccuucugcuucgccagcggccagaacaucaccgaggaguucuaccaguccacgugcagcgccgucuccaagggguaccucagcgcccugcggaccggcugguacaccuccgugaucaccaucgagcugagcaacaucaaggagaacaagugcaacgggaccgacgccaaggugaagcucaucaagcaggagcuggacaaguacaagaacgcggucacggagcugcagaugcugaugugcuccaccccggcaaccggcuccggcuccgccaucgcgagcggcgucgccgugugcaaggugcugcaccucgagggggaggucaacaagaucaagagcgcccugcuguccaccaacaaggccguggugagccucuccaacggcgucagcgugcugaccuucaaggugcuggaccucaagaacuacaucgacaagcagcugcugcccauccugaacaagcagagcugcuccaucagcaacaucgagacggugauggaguuccagcagaagaacaaccggcuccuggagaucacccgcgaguucagcgugaacgccggggucaccacccccguguccacguacaugcugaccaacagcgagcuccugucccugaucaacgacaugccgaucaccaacgaccagaagaagcucaugagcaacaacgugcagaucguccggcagcaguccuacagcaucaugugcaucaucaaggaggaggugcuggcguacgugguccagcugccccucuacggcgugaucgacacccccugcuggaagcugcacacgagcccccugugcaccaccaacaccaaggagggguccaacaucugccucacgcgcaccgaccggggcugguacugcgacaacgccggcagcgucuccuucuucccgcaggccgagaccugcaaggugugcagcaaccgcguguucugcgacaccaugaacucccugacgcugcccagcgagguaaaccucugcaacgucgacaucuucaaccccaaguacgacugcaagaucaugaccuccaagaccgacgugagcuccagcgugaucaccucccugggggccaucgucagcugcuacggcaagacgaagugcaccgccagcaacaagaacaaggggaucaucaagaccuucuccaacggcugcgacuacgugagcaacaagggcguggacaccguguccgucgggaacacccuguacuacgugaacaagcaggagggcaagagccucuacgugaagggggagcccaucaucaacuucuacgacccgcuggucuuccccuccgacgaguucgacgcgagcaucucccaggugaacgagaagaucaaccagagccuggccuucauccgcaaguccgacgagcugcuccacaacgugaacgccggcaagagcacgaccaacaucaugaucaccaccaucaucaucgucaucaucgugauccugcugucccucaucgccguggggcugcugcucuacugcaaggcccggugaggacuaguaauaaggaaacuguaugaaugucugugggcaggaagugaagagauccuucuguaaagguuuuuggaauuaugucugcugaauaauaaacuuuuuugaaauaauaaaucugguagaaaaaugagaucuaaaaaaaaaaaaaaaaaaaaaaaaaaaaaaaaaaaaaaaaaaaaaaaaaaaaaaaaaaaaaaaaugcaucccccccccccccccccccccccccccccccaaaggcucuuuucagagccaccagaauu

SEQ ID NO: 7245 - RNA, 1885 nt, Artificial Sequence
  mRNA product Design b-4 comprising derived and/or modified sequence from HRSV(A2)__F-del_DSCav1_mut7 (opt1)
gggagagucccgcagucggcguccagcggcucugcuuguucgugugugugucguugcaggccuuauucaagcuuaccauggagcugcucauccugaaggccaacgccaucaccaccauccugacggcggugaccuucugcuucgccagcggccagaacaucaccgaggaguucuaccaguccacgugcagcgccgucuccaagggguaccucagcgcccugcgcaccggcugguacaccuccgugaucaccaucgagcugagcaacaucaaggagaacaagugcaacgggaccgacgccaaggugaagcucaucaagcaggagcuggacaaguacaagaacgcggucacggagcugcagaugcucaugugcuccacccccgccaccggcagcggguccgccaucgccagcggcguggcggugugcaagguccugcaccuggagggcgaggugaacaagaucaaguccgcccuccugagcaccaacaaggccguggucucccugagcaacgggguguccgugcucacguucaagguccuggaccugaagaacuacaucgacaagcagcuccugccgauccugaacaagcagagcugcuccaucagcaacaucgagaccgugauggaguuccagcagaagaacaaccggcuccuggagaucacccgcgaguucuccgugaacgccggcgucaccacgcccgugagcaccuacaugcugaccaacagcgagcuccugucccugaucaacgacaugcccaucaccaacgaccagaagaagcucaugagcaacaacgugcagaucguccggcagcaguccuacagcaucaugugcaucaucaaggaggaggugcuggccuacgugguccagcugccccucuacggggugaucgacacgccgugcuggaagcugcacaccagcccccugugcaccaccaacacgaaggagggcagcaacaucugccucacccgcaccgaccgggggugguacugcgacaacgcgggcuccgugagcuucuucccccaggccgagaccugcaaggucugcuccaaccgcguguucugcgacacgaugaacagccugacccugcccuccgaggucaaccucugcaacguggacaucuucaacccgaaguacgacugcaagaucaugaccagcaagaccgacguguccagcuccgucaucacgagccugggcgccaucguguccugcuacgggaagaccaagugcaccgccagcaacaagaacaagggcaucaucaagaccuucuccaacgggugcgacuacgugagcaacaagggcgucgacacggugagcgugggcaacacccuguacuacgucaacaagcaggaggggaagucccucuacgugaagggcgagcccaucaucaacuucuacgacccccugguguuccccagcgacgaguucgacgccuccaucagccaggucaacgagaagaucaaccagucccuggcguucauccggaaguccgacgagcuccugcacaacgugaacgccgggaaguccaccaccaacaucaugaucaccacgaucaucaucgugaucaucgucauccugcucagccugaucgccgugggccugcuccuguacugcaaggcccgcugaggacuaguaauaaggaaacuguaugaaugucugugggcaggaagugaagagauccuucuguaaagguuuuuggaauuaugucugcugaauaauaaacuuuuuugaaauaauaaaucugguagaaaaaugagaucuaaaaaaaaaaaaaaaaaaaaaaaaaaaaaaaaaaaaaaaaaaaaaaaaaaaaaaaaaaaaaaaaugcaucccccccccccccccccccccccccccccccaaaggcucuuuucagagccaccagaauu

SEQ ID NO: 7246 - RNA, 1885 nt, Artificial Sequence
  mRNA product Design b-4 comprising derived and/or modified sequence from HRSV(A2)__F-del_DSCav1_mut7 (opt2)
gggagagucccgcagucggcguccagcggcucugcuuguucgugugugugucguugcaggccuuauucaagcuuaccauggagcuccucauccucaaggccaacgccaucaccaccauccucaccgccgucaccuucugcuucgccuccggccagaacaucaccgaggaguucuaccaguccaccugcuccgccgucuccaagggcuaccucuccgcccuccgcaccggcugguacaccuccgucaucaccaucgagcucuccaacaucaaggagaacaagugcaacggcaccgacgccaaggucaagcucaucaagcaggagcucgacaaguacaagaacgccgucaccgagcuccagaugcucaugugcuccacccccgccaccggcuccggcuccgccaucgccuccggcgucgccgucugcaagguccuccaccucgagggcgaggucaacaagaucaaguccgcccuccucuccaccaacaaggccgucgucucccucuccaacggcgucuccguccucaccuucaagguccucgaccucaagaacuacaucgacaagcagcuccuccccauccucaacaagcaguccugcuccaucuccaacaucgagaccgucauggaguuccagcagaagaacaaccgccuccucgagaucacccgcgaguucuccgucaacgccggcgucaccacccccgucuccaccuacaugcucaccaacuccgagcuccucucccucaucaacgacaugcccaucaccaacgaccagaagaagcucauguccaacaacguccagaucguccgccagcaguccuacuccaucaugugcaucaucaaggaggagguccucgccuacgucguccagcucccccucuacggcgucaucgacacccccugcuggaagcuccacaccuccccccucugcaccaccaacaccaaggagggcuccaacaucugccucacccgcaccgaccgcggcugguacugcgacaacgccggcuccgucuccuucuucccccaggccgagaccugcaaggucugcuccaaccgcgucuucugcgacaccaugaacucccucacccuccccuccgaggucaaccucugcaacgucgacaucuucaaccccaaguacgacugcaagaucaugaccuccaagaccgacgucuccuccuccgucaucaccucccucggcgccaucgucuccugcuacggcaagaccaagugcaccgccuccaacaagaacaagggcaucaucaagaccuucuccaacggcugcgacuacgucuccaacaagggcgucgacaccgucuccgucggcaacacccucuacuacgucaacaagcaggagggcaagucccucuacgucaagggcgagcccaucaucaacuucuacgacccccucgucuuccccuccgacgaguucgacgccuccaucucccaggucaacgagaagaucaaccagucccucgccuucauccgcaaguccgacgagcuccuccacaacgucaacgccggcaaguccaccaccaacaucaugaucaccaccaucaucaucgucaucaucgucauccuccucucccucaucgccgucggccuccuccucuacugcaaggcccgcugaggacuaguaauaaggaaacuguaugaaugucugugggcaggaagugaagagauccuucuguaaagguuuuuggaauuaugucugcugaauaauaaacuuuuuugaaauaauaaaucugguagaaaaaugagaucuaaaaaaaaaaaaaaaaaaaaaaaaaaaaaaaaaaaaaaaaaaaaaaaaaaaaaaaaaaaaaaaaugcaucccccccccccccccccccccccccccccccaaaggcucuuuucagagccaccagaauu

SEQ ID NO: 7247 - RNA, 1885 nt, Artificial Sequence
  mRNA product Design b-4 comprising derived and/or modified sequence from HRSV(A2)__F-del_DSCav1_mut7 (opt3)
gggagagucccgcagucggcguccagcggcucugcuuguucgugugugugucguugcaggccuuauucaagcuuaccauggagcugcucauccuuaaggccaacgcuauuaccacaauacugacugcagugacguucugcuuugccagcggccagaauaucaccgaagaguucuaccaauccacauguucugcggucucaaaaggguauuugagugcuuuaagaacuggaugguacaccagcguuauuacaaucgaacuguccaacauuaaggagaauaaaugcaacgguaccgacgccaaggugaaacuaaucaagcaggaacucgauaaguauaaaaaugcaguaacugagcugcagaugcuuauguguucuacacccgccaccggcucggggucagcuauagcaagcggaguggccgucugcaaggugcugcacuuggagggcgaaguuaacaaaaucaagagugcucuccuguccacgaauaaagccguggucucucugagcaacgguguguccguacucacuuuuaagguuuuagaccugaagaauuacauugauaaacagcuuuugccuauccugaacaagcaaucauguaguauuagcaauaucgagaccgugauggaguuccagcagaaaaacaauaggcuacucgaaauaacacgggaguuuucugucaacgcgggggugacuaccccaguguccacauauaugcugaccaauucagaacuucugagcuugauuaacgacaugccgaucacgaacgaucagaagaaacucaugaguaauaacguccaaauuguucgccagcagucuuacuccaucaugugcaucauuaaggaggaagugcuggcauauguagugcaguuaccccuguacggagucauagacacuccuuguuggaaacuccauacaagcccacuuugcaccacuaauacaaaggagggcucgaacaucugucugacccgaacggaucguggcugguacugcgacaaugccgggucuguguccuucuuuccccaagcugaaaccuguaagguuugcucaaacagaguguucugcgauacaaugaauaguuugacucuaccuagcgaggucaaccuguguaauguggacauuuuuaacccaaaauaugauugcaagaucaugaccuccaaaacagacguaucuagcucaguuauaacuagccucggagccauuguguccuguuacgguaagaccaaaugcacagcaagcaauaagaacaagggcaucaucaaaaccuucucuaaugggugugauuaugucucaaacaagggaguggacacugucagugugggcaauacgcuguacuauguuaacaaacaggaggguaagagccuuuacgugaaaggggaacccauuaucaacuuuuaugacccucugguauucccauccgaugaguuugacgcuucuauuucgcaggucaaugaaaagauaaaccaaaguuuggccuucaucaggaaguccgaugagcuccugcacaaugugaacgcgggaaaaucaacaaccaauauuaugaucacuaccaucauuauaguuaucauugugaucuuacugagucuaauugccgucggccuccugcuuuacugcaaggcacggugaggacuaguaauaaggaaacuguaugaaugucugugggcaggaagugaagagauccuucuguaaagguuuuuggaauuaugucugcugaauaauaaacuuuuuugaaauaauaaaucugguagaaaaaugagaucuaaaaaaaaaaaaaaaaaaaaaaaaaaaaaaaaaaaaaaaaaaaaaaaaaaaaaaaaaaaaaaaaugcaucccccccccccccccccccccccccccccccaaaggcucuuuucagagccaccagaauu

SEQ ID NO: 7248 - RNA, 1885 nt, Artificial Sequence
  mRNA product Design b-4 comprising derived and/or modified sequence from HRSV(A2)__F-del_DSCav1_mut7 (opt4)
gggagagucccgcagucggcguccagcggcucugcuuguucgugugugugucguugcaggccuuauucaagcuuaccauggagcugcugauccugaaggccaacgccaucaccaccauccugaccgccgugaccuucugcuucgccagcggccagaacaucaccgaggaguucuaccagagcaccugcagcgccgugagcaagggcuaccugagcgcccugagaaccggcugguacaccagcgugaucaccaucgagcugagcaacaucaaggagaacaagugcaacggcaccgacgccaaggugaagcugaucaagcaggagcuggacaaguacaagaacgccgugaccgagcugcagaugcugaugugcagcacccccgccaccggcagcggcagcgccaucgccagcggcguggccgugugcaaggugcugcaccuggagggcgaggugaacaagaucaagagcgcccugcugagcaccaacaaggccguggugagccugagcaacggcgugagcgugcugaccuucaaggugcuggaccugaagaacuacaucgacaagcagcugcugcccauccugaacaagcagagcugcagcaucagcaacaucgagaccgugauggaguuccagcagaagaacaacagacugcuggagaucaccagagaguucagcgugaacgccggcgugaccacccccgugagcaccuacaugcugaccaacagcgagcugcugagccugaucaacgacaugcccaucaccaacgaccagaagaagcugaugagcaacaacgugcagaucgugagacagcagagcuacagcaucaugugcaucaucaaggaggaggugcuggccuacguggugcagcugccccuguacggcgugaucgacacccccugcuggaagcugcacaccagcccccugugcaccaccaacaccaaggagggcagcaacaucugccugaccagaaccgacagaggcugguacugcgacaacgccggcagcgugagcuucuucccccaggccgagaccugcaaggugugcagcaacagaguguucugcgacaccaugaacagccugacccugcccagcgaggugaaccugugcaacguggacaucuucaaccccaaguacgacugcaagaucaugaccagcaagaccgacgugagcagcagcgugaucaccagccugggcgccaucgugagcugcuacggcaagaccaagugcaccgccagcaacaagaacaagggcaucaucaagaccuucagcaacggcugcgacuacgugagcaacaagggcguggacaccgugagcgugggcaacacccuguacuacgugaacaagcaggagggcaagagccuguacgugaagggcgagcccaucaucaacuucuacgacccccugguguuccccagcgacgaguucgacgccagcaucagccaggugaacgagaagaucaaccagagccuggccuucaucagaaagagcgacgagcugcugcacaacgugaacgccggcaagagcaccaccaacaucaugaucaccaccaucaucaucgugaucaucgugauccugcugagccugaucgccgugggccugcugcuguacugcaaggccagaugaggacuaguaauaaggaaacuguaugaaugucugugggcaggaagugaagagauccuucuguaaagguuuuuggaauuaugucugcugaauaauaaacuuuuuugaaauaauaaaucugguagaaaaaugagaucuaaaaaaaaaaaaaaaaaaaaaaaaaaaaaaaaaaaaaaaaaaaaaaaaaaaaaaaaaaaaaaaaugcaucccccccccccccccccccccccccccccccaaaggcucuuuucagagccaccagaauu

SEQ ID NO: 7249 - RNA, 1885 nt, Artificial Sequence
  mRNA product Design b-4 comprising derived and/or modified sequence from HRSV(A2)__F-del_DSCav1_mut7 (opt5)
gggagagucccgcagucggcguccagcggcucugcuuguucgugugugugucguugcaggccuuauucaagcuuaccauggagcugcucauccugaaggccaacgcuauuaccacaauccuuacggccgugaccuucugcuuugcgagcggccagaauauuacagaagaguucuaccaauccaccuguucugcugucagcaaaggguaucuguccgcccucagaacaggaugguacaccucuguuaucacaauugaacugagcaacaucaaggagaauaaaugcaacggcaccgacgccaaggugaaacuuaucaagcaggaacuggauaaguauaaaaaugcugugacggagcuccagaugcugauguguuccacccccgccacagggucuggaagcgcuauugccuccggcgucgcggugugcaagguucugcaccucgagggggaagugaacaaaaucaagagcgcccugcuuucuaccaauaaagcugucgugucccugagcaacggaguuucugugcucacauuuaagguccuggaccuuaagaauuacauugauaaacagcugcucccuauccugaacaagcaauccuguagcauuucuaauaucgagaccgugauggaguuccagcagaaaaacaaucggcugcucgaaauuacgcgcgaguuuuccgugaacgccggcgucacaaccccgguuagcacauauaugcugaccaauuccgaacuucugucucucaucaacgacaugcccaucaccaacgaucagaagaaacugaugagcaauaacgugcaaauugugagacagcaguccuacagcaucaugugcauuaucaaggaggaaguccuugcuuaugugguucagcugccucucuacggcgugauugacacacccuguuggaaacugcauacgucuccucugugcaccacaaauaccaaggagggguccaacaucugucucacacggaccgaucgcggaugguacugcgacaaugccggcagcgucucuuucuuuccccaagcggaaacguguaaggugugcagcaacagaguuuucugcgauacaaugaacucccugacccuuccuucugaggugaaucuguguaaugucgacaucuuuaacccgaaauaugauugcaagauuaugaccagcaaaacagacguguccagcucugucaucaccucccucggggccauugugagcuguuacggaaagacaaaaugcacggcuucuaauaagaacaagggcaucauuaaaaccuucuccaaugggugugauuauguuagcaacaagggaguggacacagucuccgugggcaauacccuguacuauguuaacaaacaggagggcaagucucuuuacgugaaaggggaacccaucaucaacuuuuaugacccucuggucuuccccagcgaugaguuugacgccuccauuucucaggugaaugaaaagaucaaccaaagccucgcuuucauucggaaguccgaugagcugcugcacaaugugaacgccggaaaaagcacaaccaauaucaugauuacgaccaucauuaucguuaucauugucauccuccugucucuuauugccgugggccugcuccuguacugcaaggcucgcugaggacuaguaauaaggaaacuguaugaaugucugugggcaggaagugaagagauccuucuguaaagguuuuuggaauuaugucugcugaauaauaaacuuuuuugaaauaauaaaucugguagaaaaaugagaucuaaaaaaaaaaaaaaaaaaaaaaaaaaaaaaaaaaaaaaaaaaaaaaaaaaaaaaaaaaaaaaaaugcaucccccccccccccccccccccccccccccccaaaggcucuuuucagagccaccagaauu

SEQ ID NO: 7250 - RNA, 1885 nt, Artificial Sequence
  mRNA product Design b-4 comprising derived and/or modified sequence from HRSV(A2)__F-del_DSCav1_mut7 (opt6)
gggagagucccgcagucggcguccagcggcucugcuuguucgugugugugucguugcaggccuuauucaagcuuaccauggaauuacuaauccucaaagcaaacgcaauuacaaccauacuaaccgcugucaccuuuuguuuugccucaggacaaaacauaacugaagaauuuuaccaaucaacaugcuccgcaguaucuaaaggauaccucagcgcguuaagaacaggaugguacacaucgguaauaaccaucgaauuauccaacauaaaagaaaauaaaugcaauggaacagacgcaaaagucaaauuaauuaaacaagaacuagacaaauauaaaaacgcaguaaccgaauuacaaaugcuaauguguucaacaccagcaacaggaucaggaucagcuauagcuucaggaguugccguaugcaaagugcuacacuuagaaggagaagugaauaaaauaaaaucagcucuauuaucaacgaacaaagccguaguaucucuaucaaauggcguaucaguacucacauucaaaguacucgaccuaaaaaacuauauagauaaacaacuauuacccauccuaaauaaacaaagcugcucuauaucaaacaucgaaacaguaauggaauuucaacaaaaaaacaacagacuacuagaaauaacccgagaguucucaguuaaugcaggaguaacaacaccagucucaacauacaugcucacaaacucagaacuccuaucacuaauaaaugacaugccaauaacaaacgaccaaaaaaaacucaugucuaacaacguccaaauaguaagacaacaauccuacagcauaauguguauaauaaaagaagaaguuuuagcauacgucguacaacuacccuuauauggcguaauagauacaccaugcuggaaacuccauaccucaccucuauguacaacaaauaccaaagaagguucuaauauaugccuaacacgaacugaccgaggaugguacugugacaacgcaggaucagucucuuucuuuccacaagcagaaaccugcaaaguaugcaguaaccgcguauuuugcgacacaaugaacucccuaaccuuaccaucagaaguaaacuuauguaacguagacauauucaauccaaaauaugacugcaaaauaaugacaucaaaaacagacguaagcucaucaguaauaacuucacuaggcgcaauuguaucaugcuauggaaaaaccaaauguaccgcauccaacaaaaauaaaggaauaauaaaaaccuucucuaacggaugcgacuacguaucaaacaaagguguagauacaguuucuguaggaaacacacucuacuauguaaauaaacaagaaggaaaaucacuauacguaaaaggagaaccaauaauaaacuucuaugacccacuuguauuuccaucugaugaauuugaugcaagcauaucacaaguaaacgaaaaaauaaaccaaucucuagccuuuauacgaaaaagcgacgaauuacuacauaacgucaacgcuggaaaaucaacaacaaacauaaugauaacaacaauaauaauaguaauaauagucauccuauuaucacuaaucgccguaggacuacuccuauacugcaaagcuagauaaggacuaguaauaaggaaacuguaugaaugucugugggcaggaagugaagagauccuucuguaaagguuuuuggaauuaugucugcugaauaauaaacuuuuuugaaauaauaaaucugguagaaaaaugagaucuaaaaaaaaaaaaaaaaaaaaaaaaaaaaaaaaaaaaaaaaaaaaaaaaaaaaaaaaaaaaaaaaugcaucccccccccccccccccccccccccccccccaaaggcucuuuucagagccaccagaauu

SEQ ID NO: 7251 - RNA, 1885 nt, Artificial Sequence
  mRNA product Design b-4 comprising derived and/or modified sequence from HRSV(A2)__F-del_DSCav1_mut7 (opt11)
gggagagucccgcagucggcguccagcggcucugcuuguucgugugugugucguugcaggccuuauucaagcuuaccauggaacuccucauccucaaagccaacgccauaaccacuauccucacagcagucacuuucugcuucgccucaggacaaaacauaaccgaagaguucuaccaauccacaugcuccgccgucuccaaaggcuaccucucagcgcuccgcaccggcugguacacauccgucaucaccaucgaacuaagcaacauaaaagaaaacaaaugcaacggcaccgacgccaaaguuaaacucaucaagcaagaacucgacaaauacaaaaacgcagucacagaacuucaaaugcucaugugcuccacacccgccacagguucuggcucagcaaucgcaagcggcgucgccguaugcaaaguccuucaccucgaaggcgaagucaacaaaaucaaauccgcccuccucuccaccaauaaagcugucgucucacucuccaacggcgucagcguccucacauucaaaguccucgaccucaaaaacuacauagacaagcaacuccucccgauacucaacaaacaaagcugcucuaucuccaacaucgaaaccgucauggaguuccaacagaaaaacaaucgucuccucgaaaucacccgcgaguucucaguaaacgccggggucaccacaccagucuccaccuacaugcucaccaacuccgaacuccuuagccucauaaacgacaugcccauaaccaacgaccaaaagaaacucaugagcaacaacguacaaauaguccgacaacaauccuauuccaucauguguaucaucaaagaagaaguccucgcauacguaguccaacucccccuauacggcguaaucgacaccccauguuggaaacuccacaccucaccacucuguaccaccaacaccaaagaaggcucaaacaucugccucacccgcacagaccgcggcugguacugcgacaacgcgggcuccgucagcuucuuuccccaagcggaaaccugcaaagucugcagcaacagagucuucugcgacacuaugaacucccucacccuccccucagaagucaaccucugcaacgucgacaucuucaacccgaaauacgacugcaaaaucaugaccagcaaaacugacgucuccucguccgucaucaccucacucggcgcaaucgugagcugcuacggcaaaaccaaaugcaccgccuccaacaaaaacaaaggcaucauaaaaacauucagcaacggcugcgacuacgucucgaacaaaggagucgacaccguaucagugggcaacacccuauacuacguaaacaagcaagaaggcaaaucacucuacguaaaaggcgaacccaucaucaacuucuacgacccccucgucuuccccuccgacgaguucgacgccuccaucucucaagucaacgagaaaaucaaccaaucccuugccuucauacguaaaagcgacgaacuccuucacaacguaaacgccgggaaauccaccacuaacauaaugaucaccaccaucaucaucguuaucauagucauccuccucucucucauagcagucggccuacuccuguacugcaaagcgcgcuaaggacuaguaauaaggaaacuguaugaaugucugugggcaggaagugaagagauccuucuguaaagguuuuuggaauuaugucugcugaauaauaaacuuuuuugaaauaauaaaucugguagaaaaaugagaucuaaaaaaaaaaaaaaaaaaaaaaaaaaaaaaaaaaaaaaaaaaaaaaaaaaaaaaaaaaaaaaaaugcaucccccccccccccccccccccccccccccccaaaggcucuuuucagagccaccagaauu

SEQ ID NO: 7252 - RNA, 1947 nt, Artificial Sequence
  mRNA product Design b-5 comprising derived and/or modified sequence from HRSV(A2)__F-del_DSCav1_mut7 (opt1)
gggagacuccugucgggcggaaguaggaggaguagaguuuaaaaacaguacucuuuuuccgguucgggacguaguugaagcaacgacaagccggauaaccgcucuugagacaggaagcuuaccauggagcugcucauccugaaggccaacgccaucaccaccauccugacggcggugaccuucugcuucgccagcggccagaacaucaccgaggaguucuaccaguccacgugcagcgccgucuccaagggguaccucagcgcccugcggaccggcugguacaccuccgugaucaccaucgagcugagcaacaucaaggagaacaagugcaacgggaccgacgccaaggugaagcucaucaagcaggagcuggacaaguacaagaacgcggucacggagcugcagaugcugaugugcuccaccccggcaaccggcuccggcuccgccaucgcgagcggcgucgccgugugcaaggugcugcaccucgagggggaggucaacaagaucaagagcgcccugcuguccaccaacaaggccguggugagccucuccaacggcgucagcgugcugaccuucaaggugcuggaccucaagaacuacaucgacaagcagcugcugcccauccugaacaagcagagcugcuccaucagcaacaucgagacggugauggaguuccagcagaagaacaaccggcuccuggagaucacccgcgaguucagcgugaacgccggggucaccacccccguguccacguacaugcugaccaacagcgagcuccugucccugaucaacgacaugccgaucaccaacgaccagaagaagcucaugagcaacaacgugcagaucguccggcagcaguccuacagcaucaugugcaucaucaaggaggaggugcuggcguacgugguccagcugccccucuacggcgugaucgacacccccugcuggaagcugcacacgagcccccugugcaccaccaacaccaaggagggguccaacaucugccucacgcgcaccgaccggggcugguacugcgacaacgccggcagcgucuccuucuucccgcaggccgagaccugcaaggugugcagcaaccgcguguucugcgacaccaugaacucccugacgcugcccagcgagguaaaccucugcaacgucgacaucuucaaccccaaguacgacugcaagaucaugaccuccaagaccgacgugagcuccagcgugaucaccucccugggggccaucgucagcugcuacggcaagacgaagugcaccgccagcaacaagaacaaggggaucaucaagaccuucuccaacggcugcgacuacgugagcaacaagggcguggacaccguguccgucgggaacacccuguacuacgugaacaagcaggagggcaagagccucuacgugaagggggagcccaucaucaacuucuacgacccgcuggucuuccccuccgacgaguucgacgcgagcaucucccaggugaacgagaagaucaaccagagccuggccuucauccgcaaguccgacgagcugcuccacaacgugaacgccggcaagagcacgaccaacaucaugaucaccaccaucaucaucgucaucaucgugauccugcugucccucaucgccguggggcugcugcucuacugcaaggcccggugaggacuaguacuggcugcaucucccuuuccucuguccuccauccuucucccaggauggugaagggggaccugguacccagugauccccaccccaggauccuaaaucaugacuuaccugcuaauaaaaacucauuggaaaagugagaagaucuaaaaaaaaaaaaaaaaaaaaaaaaaaaaaaaaaaaaaaaaaaaaaaaaaaaaaaaaaaaaaaaaugcaucccccccccccccccccccccccccccccccaaaggcucuuuucagagccaccagaauu

SEQ ID NO: 7253 - RNA, 1947 nt, Artificial Sequence
  mRNA product Design b-5 comprising derived and/or modified sequence from HRSV(A2)__F-del_DSCav1_mut7 (opt1)
gggagacuccugucgggcggaaguaggaggaguagaguuuaaaaacaguacucuuuuuccgguucgggacguaguugaagcaacgacaagccggauaaccgcucuugagacaggaagcuuaccauggagcugcucauccugaaggccaacgccaucaccaccauccugacggcggugaccuucugcuucgccagcggccagaacaucaccgaggaguucuaccaguccacgugcagcgccgucuccaagggguaccucagcgcccugcgcaccggcugguacaccuccgugaucaccaucgagcugagcaacaucaaggagaacaagugcaacgggaccgacgccaaggugaagcucaucaagcaggagcuggacaaguacaagaacgcggucacggagcugcagaugcucaugugcuccacccccgccaccggcagcggguccgccaucgccagcggcguggcggugugcaagguccugcaccuggagggcgaggugaacaagaucaaguccgcccuccugagcaccaacaaggccguggucucccugagcaacgggguguccgugcucacguucaagguccuggaccugaagaacuacaucgacaagcagcuccugccgauccugaacaagcagagcugcuccaucagcaacaucgagaccgugauggaguuccagcagaagaacaaccggcuccuggagaucacccgcgaguucuccgugaacgccggcgucaccacgcccgugagcaccuacaugcugaccaacagcgagcuccugucccugaucaacgacaugcccaucaccaacgaccagaagaagcucaugagcaacaacgugcagaucguccggcagcaguccuacagcaucaugugcaucaucaaggaggaggugcuggccuacgugguccagcugccccucuacggggugaucgacacgccgugcuggaagcugcacaccagcccccugugcaccaccaacacgaaggagggcagcaacaucugccucacccgcaccgaccgggggugguacugcgacaacgcgggcuccgugagcuucuucccccaggccgagaccugcaaggucugcuccaaccgcguguucugcgacacgaugaacagccugacccugcccuccgaggucaaccucugcaacguggacaucuucaacccgaaguacgacugcaagaucaugaccagcaagaccgacguguccagcuccgucaucacgagccugggcgccaucguguccugcuacgggaagaccaagugcaccgccagcaacaagaacaagggcaucaucaagaccuucuccaacgggugcgacuacgugagcaacaagggcgucgacacggugagcgugggcaacacccuguacuacgucaacaagcaggaggggaagucccucuacgugaagggcgagcccaucaucaacuucuacgacccccugguguuccccagcgacgaguucgacgccuccaucagccaggucaacgagaagaucaaccagucccuggcguucauccggaaguccgacgagcuccugcacaacgugaacgccgggaaguccaccaccaacaucaugaucaccacgaucaucaucgugaucaucgucauccugcucagccugaucgccgugggccugcuccuguacugcaaggcccgcugaggacuaguacuggcugcaucucccuuuccucuguccuccauccuucucccaggauggugaagggggaccugguacccagugauccccaccccaggauccuaaaucaugacuuaccugcuaauaaaaacucauuggaaaagugagaagaucuaaaaaaaaaaaaaaaaaaaaaaaaaaaaaaaaaaaaaaaaaaaaaaaaaaaaaaaaaaaaaaaaugcaucccccccccccccccccccccccccccccccaaaggcucuuuucagagccaccagaauu

SEQ ID NO: 7254 - RNA, 1947 nt, Artificial Sequence
  mRNA product Design b-5 comprising derived and/or modified sequence from HRSV(A2)__F-del_DSCav1_mut7 (opt2)
gggagacuccugucgggcggaaguaggaggaguagaguuuaaaaacaguacucuuuuuccgguucgggacguaguugaagcaacgacaagccggauaaccgcucuugagacaggaagcuuaccauggagcuccucauccucaaggccaacgccaucaccaccauccucaccgccgucaccuucugcuucgccuccggccagaacaucaccgaggaguucuaccaguccaccugcuccgccgucuccaagggcuaccucuccgcccuccgcaccggcugguacaccuccgucaucaccaucgagcucuccaacaucaaggagaacaagugcaacggcaccgacgccaaggucaagcucaucaagcaggagcucgacaaguacaagaacgccgucaccgagcuccagaugcucaugugcuccacccccgccaccggcuccggcuccgccaucgccuccggcgucgccgucugcaagguccuccaccucgagggcgaggucaacaagaucaaguccgcccuccucuccaccaacaaggccgucgucucccucuccaacggcgucuccguccucaccuucaagguccucgaccucaagaacuacaucgacaagcagcuccuccccauccucaacaagcaguccugcuccaucuccaacaucgagaccgucauggaguuccagcagaagaacaaccgccuccucgagaucacccgcgaguucuccgucaacgccggcgucaccacccccgucuccaccuacaugcucaccaacuccgagcuccucucccucaucaacgacaugcccaucaccaacgaccagaagaagcucauguccaacaacguccagaucguccgccagcaguccuacuccaucaugugcaucaucaaggaggagguccucgccuacgucguccagcucccccucuacggcgucaucgacacccccugcuggaagcuccacaccuccccccucugcaccaccaacaccaaggagggcuccaacaucugccucacccgcaccgaccgcggcugguacugcgacaacgccggcuccgucuccuucuucccccaggccgagaccugcaaggucugcuccaaccgcgucuucugcgacaccaugaacucccucacccuccccuccgaggucaaccucugcaacgucgacaucuucaaccccaaguacgacugcaagaucaugaccuccaagaccgacgucuccuccuccgucaucaccucccucggcgccaucgucuccugcuacggcaagaccaagugcaccgccuccaacaagaacaagggcaucaucaagaccuucuccaacggcugcgacuacgucuccaacaagggcgucgacaccgucuccgucggcaacacccucuacuacgucaacaagcaggagggcaagucccucuacgucaagggcgagcccaucaucaacuucuacgacccccucgucuuccccuccgacgaguucgacgccuccaucucccaggucaacgagaagaucaaccagucccucgccuucauccgcaaguccgacgagcuccuccacaacgucaacgccggcaaguccaccaccaacaucaugaucaccaccaucaucaucgucaucaucgucauccuccucucccucaucgccgucggccuccuccucuacugcaaggcccgcugaggacuaguacuggcugcaucucccuuuccucuguccuccauccuucucccaggauggugaagggggaccugguacccagugauccccaccccaggauccuaaaucaugacuuaccugcuaauaaaaacucauuggaaaagugagaagaucuaaaaaaaaaaaaaaaaaaaaaaaaaaaaaaaaaaaaaaaaaaaaaaaaaaaaaaaaaaaaaaaaugcaucccccccccccccccccccccccccccccccaaaggcucuuuucagagccaccagaauu

SEQ ID NO: 7255 - RNA, 1947 nt, Artificial Sequence
  mRNA product Design b-5 comprising derived and/or modified sequence from HRSV(A2)__F-del_DSCav1_mut7 (opt3)
gggagacuccugucgggcggaaguaggaggaguagaguuuaaaaacaguacucuuuuuccgguucgggacguaguugaagcaacgacaagccggauaaccgcucuugagacaggaagcuuaccauggagcugcucauccuuaaggccaacgcuauuaccacaauacugacugcagugacguucugcuuugccagcggccagaauaucaccgaagaguucuaccaauccacauguucugcggucucaaaaggguauuugagugcuuuaagaacuggaugguacaccagcguuauuacaaucgaacuguccaacauuaaggagaauaaaugcaacgguaccgacgccaaggugaaacuaaucaagcaggaacucgauaaguauaaaaaugcaguaacugagcugcagaugcuuauguguucuacacccgccaccggcucggggucagcuauagcaagcggaguggccgucugcaaggugcugcacuuggagggcgaaguuaacaaaaucaagagugcucuccuguccacgaauaaagccguggucucucugagcaacgguguguccguacucacuuuuaagguuuuagaccugaagaauuacauugauaaacagcuuuugccuauccugaacaagcaaucauguaguauuagcaauaucgagaccgugauggaguuccagcagaaaaacaauaggcuacucgaaauaacacgggaguuuucugucaacgcgggggugacuaccccaguguccacauauaugcugaccaauucagaacuucugagcuugauuaacgacaugccgaucacgaacgaucagaagaaacucaugaguaauaacguccaaauuguucgccagcagucuuacuccaucaugugcaucauuaaggaggaagugcuggcauauguagugcaguuaccccuguacggagucauagacacuccuuguuggaaacuccauacaagcccacuuugcaccacuaauacaaaggagggcucgaacaucugucugacccgaacggaucguggcugguacugcgacaaugccgggucuguguccuucuuuccccaagcugaaaccuguaagguuugcucaaacagaguguucugcgauacaaugaauaguuugacucuaccuagcgaggucaaccuguguaauguggacauuuuuaacccaaaauaugauugcaagaucaugaccuccaaaacagacguaucuagcucaguuauaacuagccucggagccauuguguccuguuacgguaagaccaaaugcacagcaagcaauaagaacaagggcaucaucaaaaccuucucuaaugggugugauuaugucucaaacaagggaguggacacugucagugugggcaauacgcuguacuauguuaacaaacaggaggguaagagccuuuacgugaaaggggaacccauuaucaacuuuuaugacccucugguauucccauccgaugaguuugacgcuucuauuucgcaggucaaugaaaagauaaaccaaaguuuggccuucaucaggaaguccgaugagcuccugcacaaugugaacgcgggaaaaucaacaaccaauauuaugaucacuaccaucauuauaguuaucauugugaucuuacugagucuaauugccgucggccuccugcuuuacugcaaggcacggugaggacuaguacuggcugcaucucccuuuccucuguccuccauccuucucccaggauggugaagggggaccugguacccagugauccccaccccaggauccuaaaucaugacuuaccugcuaauaaaaacucauuggaaaagugagaagaucuaaaaaaaaaaaaaaaaaaaaaaaaaaaaaaaaaaaaaaaaaaaaaaaaaaaaaaaaaaaaaaaaugcaucccccccccccccccccccccccccccccccaaaggcucuuuucagagccaccagaauu

SEQ ID NO: 7256 - RNA, 1947 nt, Artificial Sequence
  mRNA product Design b-5 comprising derived and/or modified sequence from HRSV(A2)__F-del_DSCav1_mut7 (opt4)
gggagacuccugucgggcggaaguaggaggaguagaguuuaaaaacaguacucuuuuuccgguucgggacguaguugaagcaacgacaagccggauaaccgcucuugagacaggaagcuuaccauggagcugcugauccugaaggccaacgccaucaccaccauccugaccgccgugaccuucugcuucgccagcggccagaacaucaccgaggaguucuaccagagcaccugcagcgccgugagcaagggcuaccugagcgcccugagaaccggcugguacaccagcgugaucaccaucgagcugagcaacaucaaggagaacaagugcaacggcaccgacgccaaggugaagcugaucaagcaggagcuggacaaguacaagaacgccgugaccgagcugcagaugcugaugugcagcacccccgccaccggcagcggcagcgccaucgccagcggcguggccgugugcaaggugcugcaccuggagggcgaggugaacaagaucaagagcgcccugcugagcaccaacaaggccguggugagccugagcaacggcgugagcgugcugaccuucaaggugcuggaccugaagaacuacaucgacaagcagcugcugcccauccugaacaagcagagcugcagcaucagcaacaucgagaccgugauggaguuccagcagaagaacaacagacugcuggagaucaccagagaguucagcgugaacgccggcgugaccacccccgugagcaccuacaugcugaccaacagcgagcugcugagccugaucaacgacaugcccaucaccaacgaccagaagaagcugaugagcaacaacgugcagaucgugagacagcagagcuacagcaucaugugcaucaucaaggaggaggugcuggccuacguggugcagcugccccuguacggcgugaucgacacccccugcuggaagcugcacaccagcccccugugcaccaccaacaccaaggagggcagcaacaucugccugaccagaaccgacagaggcugguacugcgacaacgccggcagcgugagcuucuucccccaggccgagaccugcaaggugugcagcaacagaguguucugcgacaccaugaacagccugacccugcccagcgaggugaaccugugcaacguggacaucuucaaccccaaguacgacugcaagaucaugaccagcaagaccgacgugagcagcagcgugaucaccagccugggcgccaucgugagcugcuacggcaagaccaagugcaccgccagcaacaagaacaagggcaucaucaagaccuucagcaacggcugcgacuacgugagcaacaagggcguggacaccgugagcgugggcaacacccuguacuacgugaacaagcaggagggcaagagccuguacgugaagggcgagcccaucaucaacuucuacgacccccugguguuccccagcgacgaguucgacgccagcaucagccaggugaacgagaagaucaaccagagccuggccuucaucagaaagagcgacgagcugcugcacaacgugaacgccggcaagagcaccaccaacaucaugaucaccaccaucaucaucgugaucaucgugauccugcugagccugaucgccgugggccugcugcuguacugcaaggccagaugaggacuaguacuggcugcaucucccuuuccucuguccuccauccuucucccaggauggugaagggggaccugguacccagugauccccaccccaggauccuaaaucaugacuuaccugcuaauaaaaacucauuggaaaagugagaagaucuaaaaaaaaaaaaaaaaaaaaaaaaaaaaaaaaaaaaaaaaaaaaaaaaaaaaaaaaaaaaaaaaugcaucccccccccccccccccccccccccccccccaaaggcucuuuucagagccaccagaauu

SEQ ID NO: 7257 - RNA, 1947 nt, Artificial Sequence
  mRNA product Design b-5 comprising derived and/or modified sequence from HRSV(A2)__F-del_DSCav1_mut7 (opt5)
gggagacuccugucgggcggaaguaggaggaguagaguuuaaaaacaguacucuuuuuccgguucgggacguaguugaagcaacgacaagccggauaaccgcucuugagacaggaagcuuaccauggagcugcucauccugaaggccaacgcuauuaccacaauccuuacggccgugaccuucugcuuugcgagcggccagaauauuacagaagaguucuaccaauccaccuguucugcugucagcaaaggguaucuguccgcccucagaacaggaugguacaccucuguuaucacaauugaacugagcaacaucaaggagaauaaaugcaacggcaccgacgccaaggugaaacuuaucaagcaggaacuggauaaguauaaaaaugcugugacggagcuccagaugcugauguguuccacccccgccacagggucuggaagcgcuauugccuccggcgucgcggugugcaagguucugcaccucgagggggaagugaacaaaaucaagagcgcccugcuuucuaccaauaaagcugucgugucccugagcaacggaguuucugugcucacauuuaagguccuggaccuuaagaauuacauugauaaacagcugcucccuauccugaacaagcaauccuguagcauuucuaauaucgagaccgugauggaguuccagcagaaaaacaaucggcugcucgaaauuacgcgcgaguuuuccgugaacgccggcgucacaaccccgguuagcacauauaugcugaccaauuccgaacuucugucucucaucaacgacaugcccaucaccaacgaucagaagaaacugaugagcaauaacgugcaaauugugagacagcaguccuacagcaucaugugcauuaucaaggaggaaguccuugcuuaugugguucagcugccucucuacggcgugauugacacacccuguuggaaacugcauacgucuccucugugcaccacaaauaccaaggagggguccaacaucugucucacacggaccgaucgcggaugguacugcgacaaugccggcagcgucucuuucuuuccccaagcggaaacguguaaggugugcagcaacagaguuuucugcgauacaaugaacucccugacccuuccuucugaggugaaucuguguaaugucgacaucuuuaacccgaaauaugauugcaagauuaugaccagcaaaacagacguguccagcucugucaucaccucccucggggccauugugagcuguuacggaaagacaaaaugcacggcuucuaauaagaacaagggcaucauuaaaaccuucuccaaugggugugauuauguuagcaacaagggaguggacacagucuccgugggcaauacccuguacuauguuaacaaacaggagggcaagucucuuuacgugaaaggggaacccaucaucaacuuuuaugacccucuggucuuccccagcgaugaguuugacgccuccauuucucaggugaaugaaaagaucaaccaaagccucgcuuucauucggaaguccgaugagcugcugcacaaugugaacgccggaaaaagcacaaccaauaucaugauuacgaccaucauuaucguuaucauugucauccuccugucucuuauugccgugggccugcuccuguacugcaaggcucgcugaggacuaguacuggcugcaucucccuuuccucuguccuccauccuucucccaggauggugaagggggaccugguacccagugauccccaccccaggauccuaaaucaugacuuaccugcuaauaaaaacucauuggaaaagugagaagaucuaaaaaaaaaaaaaaaaaaaaaaaaaaaaaaaaaaaaaaaaaaaaaaaaaaaaaaaaaaaaaaaaugcaucccccccccccccccccccccccccccccccaaaggcucuuuucagagccaccagaauu

SEQ ID NO: 7258 - RNA, 1947 nt, Artificial Sequence
  mRNA product Design b-5 comprising derived and/or modified sequence from HRSV(A2)__F-del_DSCav1_mut7 (opt6)
gggagacuccugucgggcggaaguaggaggaguagaguuuaaaaacaguacucuuuuuccgguucgggacguaguugaagcaacgacaagccggauaaccgcucuugagacaggaagcuuaccauggaauuacuaauccucaaagcaaacgcaauuacaaccauacuaaccgcugucaccuuuuguuuugccucaggacaaaacauaacugaagaauuuuaccaaucaacaugcuccgcaguaucuaaaggauaccucagcgcguuaagaacaggaugguacacaucgguaauaaccaucgaauuauccaacauaaaagaaaauaaaugcaauggaacagacgcaaaagucaaauuaauuaaacaagaacuagacaaauauaaaaacgcaguaaccgaauuacaaaugcuaauguguucaacaccagcaacaggaucaggaucagcuauagcuucaggaguugccguaugcaaagugcuacacuuagaaggagaagugaauaaaauaaaaucagcucuauuaucaacgaacaaagccguaguaucucuaucaaauggcguaucaguacucacauucaaaguacucgaccuaaaaaacuauauagauaaacaacuauuacccauccuaaauaaacaaagcugcucuauaucaaacaucgaaacaguaauggaauuucaacaaaaaaacaacagacuacuagaaauaacccgagaguucucaguuaaugcaggaguaacaacaccagucucaacauacaugcucacaaacucagaacuccuaucacuaauaaaugacaugccaauaacaaacgaccaaaaaaaacucaugucuaacaacguccaaauaguaagacaacaauccuacagcauaauguguauaauaaaagaagaaguuuuagcauacgucguacaacuacccuuauauggcguaauagauacaccaugcuggaaacuccauaccucaccucuauguacaacaaauaccaaagaagguucuaauauaugccuaacacgaacugaccgaggaugguacugugacaacgcaggaucagucucuuucuuuccacaagcagaaaccugcaaaguaugcaguaaccgcguauuuugcgacacaaugaacucccuaaccuuaccaucagaaguaaacuuauguaacguagacauauucaauccaaaauaugacugcaaaauaaugacaucaaaaacagacguaagcucaucaguaauaacuucacuaggcgcaauuguaucaugcuauggaaaaaccaaauguaccgcauccaacaaaaauaaaggaauaauaaaaaccuucucuaacggaugcgacuacguaucaaacaaagguguagauacaguuucuguaggaaacacacucuacuauguaaauaaacaagaaggaaaaucacuauacguaaaaggagaaccaauaauaaacuucuaugacccacuuguauuuccaucugaugaauuugaugcaagcauaucacaaguaaacgaaaaaauaaaccaaucucuagccuuuauacgaaaaagcgacgaauuacuacauaacgucaacgcuggaaaaucaacaacaaacauaaugauaacaacaauaauaauaguaauaauagucauccuauuaucacuaaucgccguaggacuacuccuauacugcaaagcuagauaaggacuaguacuggcugcaucucccuuuccucuguccuccauccuucucccaggauggugaagggggaccugguacccagugauccccaccccaggauccuaaaucaugacuuaccugcuaauaaaaacucauuggaaaagugagaagaucuaaaaaaaaaaaaaaaaaaaaaaaaaaaaaaaaaaaaaaaaaaaaaaaaaaaaaaaaaaaaaaaaugcaucccccccccccccccccccccccccccccccaaaggcucuuuucagagccaccagaauu

SEQ ID NO: 7259 - RNA, 1947 nt, Artificial Sequence
  mRNA product Design b-5 comprising derived and/or modified sequence from HRSV(A2)__F-del_DSCav1_mut7 (opt11)
gggagacuccugucgggcggaaguaggaggaguagaguuuaaaaacaguacucuuuuuccgguucgggacguaguugaagcaacgacaagccggauaaccgcucuugagacaggaagcuuaccauggaacuccucauccucaaagccaacgccauaaccacuauccucacagcagucacuuucugcuucgccucaggacaaaacauaaccgaagaguucuaccaauccacaugcuccgccgucuccaaaggcuaccucucagcgcuccgcaccggcugguacacauccgucaucaccaucgaacuaagcaacauaaaagaaaacaaaugcaacggcaccgacgccaaaguuaaacucaucaagcaagaacucgacaaauacaaaaacgcagucacagaacuucaaaugcucaugugcuccacacccgccacagguucuggcucagcaaucgcaagcggcgucgccguaugcaaaguccuucaccucgaaggcgaagucaacaaaaucaaauccgcccuccucuccaccaauaaagcugucgucucacucuccaacggcgucagcguccucacauucaaaguccucgaccucaaaaacuacauagacaagcaacuccucccgauacucaacaaacaaagcugcucuaucuccaacaucgaaaccgucauggaguuccaacagaaaaacaaucgucuccucgaaaucacccgcgaguucucaguaaacgccggggucaccacaccagucuccaccuacaugcucaccaacuccgaacuccuuagccucauaaacgacaugcccauaaccaacgaccaaaagaaacucaugagcaacaacguacaaauaguccgacaacaauccuauuccaucauguguaucaucaaagaagaaguccucgcauacguaguccaacucccccuauacggcguaaucgacaccccauguuggaaacuccacaccucaccacucuguaccaccaacaccaaagaaggcucaaacaucugccucacccgcacagaccgcggcugguacugcgacaacgcgggcuccgucagcuucuuuccccaagcggaaaccugcaaagucugcagcaacagagucuucugcgacacuaugaacucccucacccuccccucagaagucaaccucugcaacgucgacaucuucaacccgaaauacgacugcaaaaucaugaccagcaaaacugacgucuccucguccgucaucaccucacucggcgcaaucgugagcugcuacggcaaaaccaaaugcaccgccuccaacaaaaacaaaggcaucauaaaaacauucagcaacggcugcgacuacgucucgaacaaaggagucgacaccguaucagugggcaacacccuauacuacguaaacaagcaagaaggcaaaucacucuacguaaaaggcgaacccaucaucaacuucuacgacccccucgucuuccccuccgacgaguucgacgccuccaucucucaagucaacgagaaaaucaaccaaucccuugccuucauacguaaaagcgacgaacuccuucacaacguaaacgccgggaaauccaccacuaacauaaugaucaccaccaucaucaucguuaucauagucauccuccucucucucauagcagucggccuacuccuguacugcaaagcgcgcuaaggacuaguacuggcugcaucucccuuuccucuguccuccauccuucucccaggauggugaagggggaccugguacccagugauccccaccccaggauccuaaaucaugacuuaccugcuaauaaaaacucauuggaaaagugagaagaucuaaaaaaaaaaaaaaaaaaaaaaaaaaaaaaaaaaaaaaaaaaaaaaaaaaaaaaaaaaaaaaaaugcaucccccccccccccccccccccccccccccccaaaggcucuuuucagagccaccagaauu

SEQ ID NO: 7260 - RNA, 1853 nt, Artificial Sequence
  mRNA product Design c-1 comprising derived and/or modified sequence from HRSV(A2)__F-del_DSCav1_mut7 (opt1)
gggagaguccgcucagccagguugcagaagcggcuuagcguguguccuaaucuucucucugcguguagguaggccugugccgcaaacaagcuuaccauggagcugcucauccugaaggccaacgccaucaccaccauccugacggcggugaccuucugcuucgccagcggccagaacaucaccgaggaguucuaccaguccacgugcagcgccgucuccaagggguaccucagcgcccugcggaccggcugguacaccuccgugaucaccaucgagcugagcaacaucaaggagaacaagugcaacgggaccgacgccaaggugaagcucaucaagcaggagcuggacaaguacaagaacgcggucacggagcugcagaugcugaugugcuccaccccggcaaccggcuccggcuccgccaucgcgagcggcgucgccgugugcaaggugcugcaccucgagggggaggucaacaagaucaagagcgcccugcuguccaccaacaaggccguggugagccucuccaacggcgucagcgugcugaccuucaaggugcuggaccucaagaacuacaucgacaagcagcugcugcccauccugaacaagcagagcugcuccaucagcaacaucgagacggugauggaguuccagcagaagaacaaccggcuccuggagaucacccgcgaguucagcgugaacgccggggucaccacccccguguccacguacaugcugaccaacagcgagcuccugucccugaucaacgacaugccgaucaccaacgaccagaagaagcucaugagcaacaacgugcagaucguccggcagcaguccuacagcaucaugugcaucaucaaggaggaggugcuggcguacgugguccagcugccccucuacggcgugaucgacacccccugcuggaagcugcacacgagcccccugugcaccaccaacaccaaggagggguccaacaucugccucacgcgcaccgaccggggcugguacugcgacaacgccggcagcgucuccuucuucccgcaggccgagaccugcaaggugugcagcaaccgcguguucugcgacaccaugaacucccugacgcugcccagcgagguaaaccucugcaacgucgacaucuucaaccccaaguacgacugcaagaucaugaccuccaagaccgacgugagcuccagcgugaucaccucccugggggccaucgucagcugcuacggcaagacgaagugcaccgccagcaacaagaacaaggggaucaucaagaccuucuccaacggcugcgacuacgugagcaacaagggcguggacaccguguccgucgggaacacccuguacuacgugaacaagcaggagggcaagagccucuacgugaagggggagcccaucaucaacuucuacgacccgcuggucuuccccuccgacgaguucgacgcgagcaucucccaggugaacgagaagaucaaccagagccuggccuucauccgcaaguccgacgagcugcuccacaacgugaacgccggcaagagcacgaccaacaucaugaucaccaccaucaucaucgucaucaucgugauccugcugucccucaucgccguggggcugcugcucuacugcaaggcccggugaggacuaguguccaccugucccuccugggcugcuggauugucucguuuuccugccaaauaaacaggaucagcgcuuuacagaucuaaaaaaaaaaaaaaaaaaaaaaaaaaaaaaaaaaaaaaaaaaaaaaaaaaaaaaaaaaaaaaaaugcaucccccccccccccccccccccccccccccccaaaggcucuuuucagagccaccagaauu

SEQ ID NO: 7261 - RNA, 1853 nt, Artificial Sequence
  mRNA product Design c-1 comprising derived and/or modified sequence from HRSV(A2)__F-del_DSCav1_mut7 (opt1)
gggagaguccgcucagccagguugcagaagcggcuuagcguguguccuaaucuucucucugcguguagguaggccugugccgcaaacaagcuuaccauggagcugcucauccugaaggccaacgccaucaccaccauccugacggcggugaccuucugcuucgccagcggccagaacaucaccgaggaguucuaccaguccacgugcagcgccgucuccaagggguaccucagcgcccugcgcaccggcugguacaccuccgugaucaccaucgagcugagcaacaucaaggagaacaagugcaacgggaccgacgccaaggugaagcucaucaagcaggagcuggacaaguacaagaacgcggucacggagcugcagaugcucaugugcuccacccccgccaccggcagcggguccgccaucgccagcggcguggcggugugcaagguccugcaccuggagggcgaggugaacaagaucaaguccgcccuccugagcaccaacaaggccguggucucccugagcaacgggguguccgugcucacguucaagguccuggaccugaagaacuacaucgacaagcagcuccugccgauccugaacaagcagagcugcuccaucagcaacaucgagaccgugauggaguuccagcagaagaacaaccggcuccuggagaucacccgcgaguucuccgugaacgccggcgucaccacgcccgugagcaccuacaugcugaccaacagcgagcuccugucccugaucaacgacaugcccaucaccaacgaccagaagaagcucaugagcaacaacgugcagaucguccggcagcaguccuacagcaucaugugcaucaucaaggaggaggugcuggccuacgugguccagcugccccucuacggggugaucgacacgccgugcuggaagcugcacaccagcccccugugcaccaccaacacgaaggagggcagcaacaucugccucacccgcaccgaccgggggugguacugcgacaacgcgggcuccgugagcuucuucccccaggccgagaccugcaaggucugcuccaaccgcguguucugcgacacgaugaacagccugacccugcccuccgaggucaaccucugcaacguggacaucuucaacccgaaguacgacugcaagaucaugaccagcaagaccgacguguccagcuccgucaucacgagccugggcgccaucguguccugcuacgggaagaccaagugcaccgccagcaacaagaacaagggcaucaucaagaccuucuccaacgggugcgacuacgugagcaacaagggcgucgacacggugagcgugggcaacacccuguacuacgucaacaagcaggaggggaagucccucuacgugaagggcgagcccaucaucaacuucuacgacccccugguguuccccagcgacgaguucgacgccuccaucagccaggucaacgagaagaucaaccagucccuggcguucauccggaaguccgacgagcuccugcacaacgugaacgccgggaaguccaccaccaacaucaugaucaccacgaucaucaucgugaucaucgucauccugcucagccugaucgccgugggccugcuccuguacugcaaggcccgcugaggacuaguguccaccugucccuccugggcugcuggauugucucguuuuccugccaaauaaacaggaucagcgcuuuacagaucuaaaaaaaaaaaaaaaaaaaaaaaaaaaaaaaaaaaaaaaaaaaaaaaaaaaaaaaaaaaaaaaaugcaucccccccccccccccccccccccccccccccaaaggcucuuuucagagccaccagaauu

SEQ ID NO: 7262 - RNA, 1853 nt, Artificial Sequence
  mRNA product Design c-1 comprising derived and/or modified sequence from HRSV(A2)__F-del_DSCav1_mut7 (opt2)
gggagaguccgcucagccagguugcagaagcggcuuagcguguguccuaaucuucucucugcguguagguaggccugugccgcaaacaagcuuaccauggagcuccucauccucaaggccaacgccaucaccaccauccucaccgccgucaccuucugcuucgccuccggccagaacaucaccgaggaguucuaccaguccaccugcuccgccgucuccaagggcuaccucuccgcccuccgcaccggcugguacaccuccgucaucaccaucgagcucuccaacaucaaggagaacaagugcaacggcaccgacgccaaggucaagcucaucaagcaggagcucgacaaguacaagaacgccgucaccgagcuccagaugcucaugugcuccacccccgccaccggcuccggcuccgccaucgccuccggcgucgccgucugcaagguccuccaccucgagggcgaggucaacaagaucaaguccgcccuccucuccaccaacaaggccgucgucucccucuccaacggcgucuccguccucaccuucaagguccucgaccucaagaacuacaucgacaagcagcuccuccccauccucaacaagcaguccugcuccaucuccaacaucgagaccgucauggaguuccagcagaagaacaaccgccuccucgagaucacccgcgaguucuccgucaacgccggcgucaccacccccgucuccaccuacaugcucaccaacuccgagcuccucucccucaucaacgacaugcccaucaccaacgaccagaagaagcucauguccaacaacguccagaucguccgccagcaguccuacuccaucaugugcaucaucaaggaggagguccucgccuacgucguccagcucccccucuacggcgucaucgacacccccugcuggaagcuccacaccuccccccucugcaccaccaacaccaaggagggcuccaacaucugccucacccgcaccgaccgcggcugguacugcgacaacgccggcuccgucuccuucuucccccaggccgagaccugcaaggucugcuccaaccgcgucuucugcgacaccaugaacucccucacccuccccuccgaggucaaccucugcaacgucgacaucuucaaccccaaguacgacugcaagaucaugaccuccaagaccgacgucuccuccuccgucaucaccucccucggcgccaucgucuccugcuacggcaagaccaagugcaccgccuccaacaagaacaagggcaucaucaagaccuucuccaacggcugcgacuacgucuccaacaagggcgucgacaccgucuccgucggcaacacccucuacuacgucaacaagcaggagggcaagucccucuacgucaagggcgagcccaucaucaacuucuacgacccccucgucuuccccuccgacgaguucgacgccuccaucucccaggucaacgagaagaucaaccagucccucgccuucauccgcaaguccgacgagcuccuccacaacgucaacgccggcaaguccaccaccaacaucaugaucaccaccaucaucaucgucaucaucgucauccuccucucccucaucgccgucggccuccuccucuacugcaaggcccgcugaggacuaguguccaccugucccuccugggcugcuggauugucucguuuuccugccaaauaaacaggaucagcgcuuuacagaucuaaaaaaaaaaaaaaaaaaaaaaaaaaaaaaaaaaaaaaaaaaaaaaaaaaaaaaaaaaaaaaaaugcaucccccccccccccccccccccccccccccccaaaggcucuuuucagagccaccagaauu

SEQ ID NO: 7263 - RNA, 1853 nt, Artificial Sequence
  mRNA product Design c-1 comprising derived and/or modified sequence from HRSV(A2)__F-del_DSCav1_mut7 (opt3)
gggagaguccgcucagccagguugcagaagcggcuuagcguguguccuaaucuucucucugcguguagguaggccugugccgcaaacaagcuuaccauggagcugcucauccuuaaggccaacgcuauuaccacaauacugacugcagugacguucugcuuugccagcggccagaauaucaccgaagaguucuaccaauccacauguucugcggucucaaaaggguauuugagugcuuuaagaacuggaugguacaccagcguuauuacaaucgaacuguccaacauuaaggagaauaaaugcaacgguaccgacgccaaggugaaacuaaucaagcaggaacucgauaaguauaaaaaugcaguaacugagcugcagaugcuuauguguucuacacccgccaccggcucggggucagcuauagcaagcggaguggccgucugcaaggugcugcacuuggagggcgaaguuaacaaaaucaagagugcucuccuguccacgaauaaagccguggucucucugagcaacgguguguccguacucacuuuuaagguuuuagaccugaagaauuacauugauaaacagcuuuugccuauccugaacaagcaaucauguaguauuagcaauaucgagaccgugauggaguuccagcagaaaaacaauaggcuacucgaaauaacacgggaguuuucugucaacgcgggggugacuaccccaguguccacauauaugcugaccaauucagaacuucugagcuugauuaacgacaugccgaucacgaacgaucagaagaaacucaugaguaauaacguccaaauuguucgccagcagucuuacuccaucaugugcaucauuaaggaggaagugcuggcauauguagugcaguuaccccuguacggagucauagacacuccuuguuggaaacuccauacaagcccacuuugcaccacuaauacaaaggagggcucgaacaucugucugacccgaacggaucguggcugguacugcgacaaugccgggucuguguccuucuuuccccaagcugaaaccuguaagguuugcucaaacagaguguucugcgauacaaugaauaguuugacucuaccuagcgaggucaaccuguguaauguggacauuuuuaacccaaaauaugauugcaagaucaugaccuccaaaacagacguaucuagcucaguuauaacuagccucggagccauuguguccuguuacgguaagaccaaaugcacagcaagcaauaagaacaagggcaucaucaaaaccuucucuaaugggugugauuaugucucaaacaagggaguggacacugucagugugggcaauacgcuguacuauguuaacaaacaggaggguaagagccuuuacgugaaaggggaacccauuaucaacuuuuaugacccucugguauucccauccgaugaguuugacgcuucuauuucgcaggucaaugaaaagauaaaccaaaguuuggccuucaucaggaaguccgaugagcuccugcacaaugugaacgcgggaaaaucaacaaccaauauuaugaucacuaccaucauuauaguuaucauugugaucuuacugagucuaauugccgucggccuccugcuuuacugcaaggcacggugaggacuaguguccaccugucccuccugggcugcuggauugucucguuuuccugccaaauaaacaggaucagcgcuuuacagaucuaaaaaaaaaaaaaaaaaaaaaaaaaaaaaaaaaaaaaaaaaaaaaaaaaaaaaaaaaaaaaaaaugcaucccccccccccccccccccccccccccccccaaaggcucuuuucagagccaccagaauu

SEQ ID NO: 7264 - RNA, 1853 nt, Artificial Sequence
  mRNA product Design c-1 comprising derived and/or modified sequence from HRSV(A2)__F-del_DSCav1_mut7 (opt4)
gggagaguccgcucagccagguugcagaagcggcuuagcguguguccuaaucuucucucugcguguagguaggccugugccgcaaacaagcuuaccauggagcugcugauccugaaggccaacgccaucaccaccauccugaccgccgugaccuucugcuucgccagcggccagaacaucaccgaggaguucuaccagagcaccugcagcgccgugagcaagggcuaccugagcgcccugagaaccggcugguacaccagcgugaucaccaucgagcugagcaacaucaaggagaacaagugcaacggcaccgacgccaaggugaagcugaucaagcaggagcuggacaaguacaagaacgccgugaccgagcugcagaugcugaugugcagcacccccgccaccggcagcggcagcgccaucgccagcggcguggccgugugcaaggugcugcaccuggagggcgaggugaacaagaucaagagcgcccugcugagcaccaacaaggccguggugagccugagcaacggcgugagcgugcugaccuucaaggugcuggaccugaagaacuacaucgacaagcagcugcugcccauccugaacaagcagagcugcagcaucagcaacaucgagaccgugauggaguuccagcagaagaacaacagacugcuggagaucaccagagaguucagcgugaacgccggcgugaccacccccgugagcaccuacaugcugaccaacagcgagcugcugagccugaucaacgacaugcccaucaccaacgaccagaagaagcugaugagcaacaacgugcagaucgugagacagcagagcuacagcaucaugugcaucaucaaggaggaggugcuggccuacguggugcagcugccccuguacggcgugaucgacacccccugcuggaagcugcacaccagcccccugugcaccaccaacaccaaggagggcagcaacaucugccugaccagaaccgacagaggcugguacugcgacaacgccggcagcgugagcuucuucccccaggccgagaccugcaaggugugcagcaacagaguguucugcgacaccaugaacagccugacccugcccagcgaggugaaccugugcaacguggacaucuucaaccccaaguacgacugcaagaucaugaccagcaagaccgacgugagcagcagcgugaucaccagccugggcgccaucgugagcugcuacggcaagaccaagugcaccgccagcaacaagaacaagggcaucaucaagaccuucagcaacggcugcgacuacgugagcaacaagggcguggacaccgugagcgugggcaacacccuguacuacgugaacaagcaggagggcaagagccuguacgugaagggcgagcccaucaucaacuucuacgacccccugguguuccccagcgacgaguucgacgccagcaucagccaggugaacgagaagaucaaccagagccuggccuucaucagaaagagcgacgagcugcugcacaacgugaacgccggcaagagcaccaccaacaucaugaucaccaccaucaucaucgugaucaucgugauccugcugagccugaucgccgugggccugcugcuguacugcaaggccagaugaggacuaguguccaccugucccuccugggcugcuggauugucucguuuuccugccaaauaaacaggaucagcgcuuuacagaucuaaaaaaaaaaaaaaaaaaaaaaaaaaaaaaaaaaaaaaaaaaaaaaaaaaaaaaaaaaaaaaaaugcaucccccccccccccccccccccccccccccccaaaggcucuuuucagagccaccagaauu

SEQ ID NO: 7265 - RNA, 1853 nt, Artificial Sequence
  mRNA product Design c-1 comprising derived and/or modified sequence from HRSV(A2)__F-del_DSCav1_mut7 (opt5)
gggagaguccgcucagccagguugcagaagcggcuuagcguguguccuaaucuucucucugcguguagguaggccugugccgcaaacaagcuuaccauggagcugcucauccugaaggccaacgcuauuaccacaauccuuacggccgugaccuucugcuuugcgagcggccagaauauuacagaagaguucuaccaauccaccuguucugcugucagcaaaggguaucuguccgcccucagaacaggaugguacaccucuguuaucacaauugaacugagcaacaucaaggagaauaaaugcaacggcaccgacgccaaggugaaacuuaucaagcaggaacuggauaaguauaaaaaugcugugacggagcuccagaugcugauguguuccacccccgccacagggucuggaagcgcuauugccuccggcgucgcggugugcaagguucugcaccucgagggggaagugaacaaaaucaagagcgcccugcuuucuaccaauaaagcugucgugucccugagcaacggaguuucugugcucacauuuaagguccuggaccuuaagaauuacauugauaaacagcugcucccuauccugaacaagcaauccuguagcauuucuaauaucgagaccgugauggaguuccagcagaaaaacaaucggcugcucgaaauuacgcgcgaguuuuccgugaacgccggcgucacaaccccgguuagcacauauaugcugaccaauuccgaacuucugucucucaucaacgacaugcccaucaccaacgaucagaagaaacugaugagcaauaacgugcaaauugugagacagcaguccuacagcaucaugugcauuaucaaggaggaaguccuugcuuaugugguucagcugccucucuacggcgugauugacacacccuguuggaaacugcauacgucuccucugugcaccacaaauaccaaggagggguccaacaucugucucacacggaccgaucgcggaugguacugcgacaaugccggcagcgucucuuucuuuccccaagcggaaacguguaaggugugcagcaacagaguuuucugcgauacaaugaacucccugacccuuccuucugaggugaaucuguguaaugucgacaucuuuaacccgaaauaugauugcaagauuaugaccagcaaaacagacguguccagcucugucaucaccucccucggggccauugugagcuguuacggaaagacaaaaugcacggcuucuaauaagaacaagggcaucauuaaaaccuucuccaaugggugugauuauguuagcaacaagggaguggacacagucuccgugggcaauacccuguacuauguuaacaaacaggagggcaagucucuuuacgugaaaggggaacccaucaucaacuuuuaugacccucuggucuuccccagcgaugaguuugacgccuccauuucucaggugaaugaaaagaucaaccaaagccucgcuuucauucggaaguccgaugagcugcugcacaaugugaacgccggaaaaagcacaaccaauaucaugauuacgaccaucauuaucguuaucauugucauccuccugucucuuauugccgugggccugcuccuguacugcaaggcucgcugaggacuaguguccaccugucccuccugggcugcuggauugucucguuuuccugccaaauaaacaggaucagcgcuuuacagaucuaaaaaaaaaaaaaaaaaaaaaaaaaaaaaaaaaaaaaaaaaaaaaaaaaaaaaaaaaaaaaaaaugcaucccccccccccccccccccccccccccccccaaaggcucuuuucagagccaccagaauu

SEQ ID NO: 7266 - RNA, 1853 nt, Artificial Sequence
  mRNA product Design c-1 comprising derived and/or modified sequence from HRSV(A2)__F-del_DSCav1_mut7 (opt6)
gggagaguccgcucagccagguugcagaagcggcuuagcguguguccuaaucuucucucugcguguagguaggccugugccgcaaacaagcuuaccauggaauuacuaauccucaaagcaaacgcaauuacaaccauacuaaccgcugucaccuuuuguuuugccucaggacaaaacauaacugaagaauuuuaccaaucaacaugcuccgcaguaucuaaaggauaccucagcgcguuaagaacaggaugguacacaucgguaauaaccaucgaauuauccaacauaaaagaaaauaaaugcaauggaacagacgcaaaagucaaauuaauuaaacaagaacuagacaaauauaaaaacgcaguaaccgaauuacaaaugcuaauguguucaacaccagcaacaggaucaggaucagcuauagcuucaggaguugccguaugcaaagugcuacacuuagaaggagaagugaauaaaauaaaaucagcucuauuaucaacgaacaaagccguaguaucucuaucaaauggcguaucaguacucacauucaaaguacucgaccuaaaaaacuauauagauaaacaacuauuacccauccuaaauaaacaaagcugcucuauaucaaacaucgaaacaguaauggaauuucaacaaaaaaacaacagacuacuagaaauaacccgagaguucucaguuaaugcaggaguaacaacaccagucucaacauacaugcucacaaacucagaacuccuaucacuaauaaaugacaugccaauaacaaacgaccaaaaaaaacucaugucuaacaacguccaaauaguaagacaacaauccuacagcauaauguguauaauaaaagaagaaguuuuagcauacgucguacaacuacccuuauauggcguaauagauacaccaugcuggaaacuccauaccucaccucuauguacaacaaauaccaaagaagguucuaauauaugccuaacacgaacugaccgaggaugguacugugacaacgcaggaucagucucuuucuuuccacaagcagaaaccugcaaaguaugcaguaaccgcguauuuugcgacacaaugaacucccuaaccuuaccaucagaaguaaacuuauguaacguagacauauucaauccaaaauaugacugcaaaauaaugacaucaaaaacagacguaagcucaucaguaauaacuucacuaggcgcaauuguaucaugcuauggaaaaaccaaauguaccgcauccaacaaaaauaaaggaauaauaaaaaccuucucuaacggaugcgacuacguaucaaacaaagguguagauacaguuucuguaggaaacacacucuacuauguaaauaaacaagaaggaaaaucacuauacguaaaaggagaaccaauaauaaacuucuaugacccacuuguauuuccaucugaugaauuugaugcaagcauaucacaaguaaacgaaaaaauaaaccaaucucuagccuuuauacgaaaaagcgacgaauuacuacauaacgucaacgcuggaaaaucaacaacaaacauaaugauaacaacaauaauaauaguaauaauagucauccuauuaucacuaaucgccguaggacuacuccuauacugcaaagcuagauaaggacuaguguccaccugucccuccugggcugcuggauugucucguuuuccugccaaauaaacaggaucagcgcuuuacagaucuaaaaaaaaaaaaaaaaaaaaaaaaaaaaaaaaaaaaaaaaaaaaaaaaaaaaaaaaaaaaaaaaugcaucccccccccccccccccccccccccccccccaaaggcucuuuucagagccaccagaauu

SEQ ID NO: 7267 - RNA, 1853 nt, Artificial Sequence
  mRNA product Design c-1 comprising derived and/or modified sequence from HRSV(A2)__F-del_DSCav1_mut7 (opt11)
gggagaguccgcucagccagguugcagaagcggcuuagcguguguccuaaucuucucucugcguguagguaggccugugccgcaaacaagcuuaccauggaacuccucauccucaaagccaacgccauaaccacuauccucacagcagucacuuucugcuucgccucaggacaaaacauaaccgaagaguucuaccaauccacaugcuccgccgucuccaaaggcuaccucucagcgcuccgcaccggcugguacacauccgucaucaccaucgaacuaagcaacauaaaagaaaacaaaugcaacggcaccgacgccaaaguuaaacucaucaagcaagaacucgacaaauacaaaaacgcagucacagaacuucaaaugcucaugugcuccacacccgccacagguucuggcucagcaaucgcaagcggcgucgccguaugcaaaguccuucaccucgaaggcgaagucaacaaaaucaaauccgcccuccucuccaccaauaaagcugucgucucacucuccaacggcgucagcguccucacauucaaaguccucgaccucaaaaacuacauagacaagcaacuccucccgauacucaacaaacaaagcugcucuaucuccaacaucgaaaccgucauggaguuccaacagaaaaacaaucgucuccucgaaaucacccgcgaguucucaguaaacgccggggucaccacaccagucuccaccuacaugcucaccaacuccgaacuccuuagccucauaaacgacaugcccauaaccaacgaccaaaagaaacucaugagcaacaacguacaaauaguccgacaacaauccuauuccaucauguguaucaucaaagaagaaguccucgcauacguaguccaacucccccuauacggcguaaucgacaccccauguuggaaacuccacaccucaccacucuguaccaccaacaccaaagaaggcucaaacaucugccucacccgcacagaccgcggcugguacugcgacaacgcgggcuccgucagcuucuuuccccaagcggaaaccugcaaagucugcagcaacagagucuucugcgacacuaugaacucccucacccuccccucagaagucaaccucugcaacgucgacaucuucaacccgaaauacgacugcaaaaucaugaccagcaaaacugacgucuccucguccgucaucaccucacucggcgcaaucgugagcugcuacggcaaaaccaaaugcaccgccuccaacaaaaacaaaggcaucauaaaaacauucagcaacggcugcgacuacgucucgaacaaaggagucgacaccguaucagugggcaacacccuauacuacguaaacaagcaagaaggcaaaucacucuacguaaaaggcgaacccaucaucaacuucuacgacccccucgucuuccccuccgacgaguucgacgccuccaucucucaagucaacgagaaaaucaaccaaucccuugccuucauacguaaaagcgacgaacuccuucacaacguaaacgccgggaaauccaccacuaacauaaugaucaccaccaucaucaucguuaucauagucauccuccucucucucauagcagucggccuacuccuguacugcaaagcgcgcuaaggacuaguguccaccugucccuccugggcugcuggauugucucguuuuccugccaaauaaacaggaucagcgcuuuacagaucuaaaaaaaaaaaaaaaaaaaaaaaaaaaaaaaaaaaaaaaaaaaaaaaaaaaaaaaaaaaaaaaaugcaucccccccccccccccccccccccccccccccaaaggcucuuuucagagccaccagaauu

SEQ ID NO: 7268 - RNA, 1943 nt, Artificial Sequence
  mRNA product Design c-2 comprising derived and/or modified sequence from HRSV(A2)__F-del_DSCav1_mut7 (opt1)
gggagacuccugucgggcggaaguaggaggaguagaguuuaaaaacaguacucuuuuuccgguucgggacguaguugaagcaacgacaagccggauaaccgcucuugagacaggaagcuuaccauggagcugcucauccugaaggccaacgccaucaccaccauccugacggcggugaccuucugcuucgccagcggccagaacaucaccgaggaguucuaccaguccacgugcagcgccgucuccaagggguaccucagcgcccugcggaccggcugguacaccuccgugaucaccaucgagcugagcaacaucaaggagaacaagugcaacgggaccgacgccaaggugaagcucaucaagcaggagcuggacaaguacaagaacgcggucacggagcugcagaugcugaugugcuccaccccggcaaccggcuccggcuccgccaucgcgagcggcgucgccgugugcaaggugcugcaccucgagggggaggucaacaagaucaagagcgcccugcuguccaccaacaaggccguggugagccucuccaacggcgucagcgugcugaccuucaaggugcuggaccucaagaacuacaucgacaagcagcugcugcccauccugaacaagcagagcugcuccaucagcaacaucgagacggugauggaguuccagcagaagaacaaccggcuccuggagaucacccgcgaguucagcgugaacgccggggucaccacccccguguccacguacaugcugaccaacagcgagcuccugucccugaucaacgacaugccgaucaccaacgaccagaagaagcucaugagcaacaacgugcagaucguccggcagcaguccuacagcaucaugugcaucaucaaggaggaggugcuggcguacgugguccagcugccccucuacggcgugaucgacacccccugcuggaagcugcacacgagcccccugugcaccaccaacaccaaggagggguccaacaucugccucacgcgcaccgaccggggcugguacugcgacaacgccggcagcgucuccuucuucccgcaggccgagaccugcaaggugugcagcaaccgcguguucugcgacaccaugaacucccugacgcugcccagcgagguaaaccucugcaacgucgacaucuucaaccccaaguacgacugcaagaucaugaccuccaagaccgacgugagcuccagcgugaucaccucccugggggccaucgucagcugcuacggcaagacgaagugcaccgccagcaacaagaacaaggggaucaucaagaccuucuccaacggcugcgacuacgugagcaacaagggcguggacaccguguccgucgggaacacccuguacuacgugaacaagcaggagggcaagagccucuacgugaagggggagcccaucaucaacuucuacgacccgcuggucuuccccuccgacgaguucgacgcgagcaucucccaggugaacgagaagaucaaccagagccuggccuucauccgcaaguccgacgagcugcuccacaacgugaacgccggcaagagcacgaccaacaucaugaucaccaccaucaucaucgucaucaucgugauccugcugucccucaucgccguggggcugcugcucuacugcaaggcccggugaggacuaguggaagcauuuuccuggcugauuaaaagaaauuacucagcuauggucaucuguuccuguuagaaggcuaugcagcauauuauauacuaugcgcauguuaugaaaugcauaauaaaaaauuuuaaaaaaucuaaaagaucuaaaaaaaaaaaaaaaaaaaaaaaaaaaaaaaaaaaaaaaaaaaaaaaaaaaaaaaaaaaaaaaaugcaucccccccccccccccccccccccccccccccaaaggcucuuuucagagccaccagaauu

SEQ ID NO: 7269 - RNA, 1943 nt, Artificial Sequence
  mRNA product Design c-2 comprising derived and/or modified sequence from HRSV(A2)__F-del_DSCav1_mut7 (opt1)
gggagacuccugucgggcggaaguaggaggaguagaguuuaaaaacaguacucuuuuuccgguucgggacguaguugaagcaacgacaagccggauaaccgcucuugagacaggaagcuuaccauggagcugcucauccugaaggccaacgccaucaccaccauccugacggcggugaccuucugcuucgccagcggccagaacaucaccgaggaguucuaccaguccacgugcagcgccgucuccaagggguaccucagcgcccugcgcaccggcugguacaccuccgugaucaccaucgagcugagcaacaucaaggagaacaagugcaacgggaccgacgccaaggugaagcucaucaagcaggagcuggacaaguacaagaacgcggucacggagcugcagaugcucaugugcuccacccccgccaccggcagcggguccgccaucgccagcggcguggcggugugcaagguccugcaccuggagggcgaggugaacaagaucaaguccgcccuccugagcaccaacaaggccguggucucccugagcaacgggguguccgugcucacguucaagguccuggaccugaagaacuacaucgacaagcagcuccugccgauccugaacaagcagagcugcuccaucagcaacaucgagaccgugauggaguuccagcagaagaacaaccggcuccuggagaucacccgcgaguucuccgugaacgccggcgucaccacgcccgugagcaccuacaugcugaccaacagcgagcuccugucccugaucaacgacaugcccaucaccaacgaccagaagaagcucaugagcaacaacgugcagaucguccggcagcaguccuacagcaucaugugcaucaucaaggaggaggugcuggccuacgugguccagcugccccucuacggggugaucgacacgccgugcuggaagcugcacaccagcccccugugcaccaccaacacgaaggagggcagcaacaucugccucacccgcaccgaccgggggugguacugcgacaacgcgggcuccgugagcuucuucccccaggccgagaccugcaaggucugcuccaaccgcguguucugcgacacgaugaacagccugacccugcccuccgaggucaaccucugcaacguggacaucuucaacccgaaguacgacugcaagaucaugaccagcaagaccgacguguccagcuccgucaucacgagccugggcgccaucguguccugcuacgggaagaccaagugcaccgccagcaacaagaacaagggcaucaucaagaccuucuccaacgggugcgacuacgugagcaacaagggcgucgacacggugagcgugggcaacacccuguacuacgucaacaagcaggaggggaagucccucuacgugaagggcgagcccaucaucaacuucuacgacccccugguguuccccagcgacgaguucgacgccuccaucagccaggucaacgagaagaucaaccagucccuggcguucauccggaaguccgacgagcuccugcacaacgugaacgccgggaaguccaccaccaacaucaugaucaccacgaucaucaucgugaucaucgucauccugcucagccugaucgccgugggccugcuccuguacugcaaggcccgcugaggacuaguggaagcauuuuccuggcugauuaaaagaaauuacucagcuauggucaucuguuccuguuagaaggcuaugcagcauauuauauacuaugcgcauguuaugaaaugcauaauaaaaaauuuuaaaaaaucuaaaagaucuaaaaaaaaaaaaaaaaaaaaaaaaaaaaaaaaaaaaaaaaaaaaaaaaaaaaaaaaaaaaaaaaugcaucccccccccccccccccccccccccccccccaaaggcucuuuucagagccaccagaauu

SEQ ID NO: 7270 - RNA, 1943 nt, Artificial Sequence
  mRNA product Design c-2 comprising derived and/or modified sequence from HRSV(A2)__F-del_DSCav1_mut7 (opt2)
gggagacuccugucgggcggaaguaggaggaguagaguuuaaaaacaguacucuuuuuccgguucgggacguaguugaagcaacgacaagccggauaaccgcucuugagacaggaagcuuaccauggagcuccucauccucaaggccaacgccaucaccaccauccucaccgccgucaccuucugcuucgccuccggccagaacaucaccgaggaguucuaccaguccaccugcuccgccgucuccaagggcuaccucuccgcccuccgcaccggcugguacaccuccgucaucaccaucgagcucuccaacaucaaggagaacaagugcaacggcaccgacgccaaggucaagcucaucaagcaggagcucgacaaguacaagaacgccgucaccgagcuccagaugcucaugugcuccacccccgccaccggcuccggcuccgccaucgccuccggcgucgccgucugcaagguccuccaccucgagggcgaggucaacaagaucaaguccgcccuccucuccaccaacaaggccgucgucucccucuccaacggcgucuccguccucaccuucaagguccucgaccucaagaacuacaucgacaagcagcuccuccccauccucaacaagcaguccugcuccaucuccaacaucgagaccgucauggaguuccagcagaagaacaaccgccuccucgagaucacccgcgaguucuccgucaacgccggcgucaccacccccgucuccaccuacaugcucaccaacuccgagcuccucucccucaucaacgacaugcccaucaccaacgaccagaagaagcucauguccaacaacguccagaucguccgccagcaguccuacuccaucaugugcaucaucaaggaggagguccucgccuacgucguccagcucccccucuacggcgucaucgacacccccugcuggaagcuccacaccuccccccucugcaccaccaacaccaaggagggcuccaacaucugccucacccgcaccgaccgcggcugguacugcgacaacgccggcuccgucuccuucuucccccaggccgagaccugcaaggucugcuccaaccgcgucuucugcgacaccaugaacucccucacccuccccuccgaggucaaccucugcaacgucgacaucuucaaccccaaguacgacugcaagaucaugaccuccaagaccgacgucuccuccuccgucaucaccucccucggcgccaucgucuccugcuacggcaagaccaagugcaccgccuccaacaagaacaagggcaucaucaagaccuucuccaacggcugcgacuacgucuccaacaagggcgucgacaccgucuccgucggcaacacccucuacuacgucaacaagcaggagggcaagucccucuacgucaagggcgagcccaucaucaacuucuacgacccccucgucuuccccuccgacgaguucgacgccuccaucucccaggucaacgagaagaucaaccagucccucgccuucauccgcaaguccgacgagcuccuccacaacgucaacgccggcaaguccaccaccaacaucaugaucaccaccaucaucaucgucaucaucgucauccuccucucccucaucgccgucggccuccuccucuacugcaaggcccgcugaggacuaguggaagcauuuuccuggcugauuaaaagaaauuacucagcuauggucaucuguuccuguuagaaggcuaugcagcauauuauauacuaugcgcauguuaugaaaugcauaauaaaaaauuuuaaaaaaucuaaaagaucuaaaaaaaaaaaaaaaaaaaaaaaaaaaaaaaaaaaaaaaaaaaaaaaaaaaaaaaaaaaaaaaaugcaucccccccccccccccccccccccccccccccaaaggcucuuuucagagccaccagaauu

SEQ ID NO: 7271 - RNA, 1943 nt, Artificial Sequence
  mRNA product Design c-2 comprising derived and/or modified sequence from HRSV(A2)__F-del_DSCav1_mut7 (opt3)
gggagacuccugucgggcggaaguaggaggaguagaguuuaaaaacaguacucuuuuuccgguucgggacguaguugaagcaacgacaagccggauaaccgcucuugagacaggaagcuuaccauggagcugcucauccuuaaggccaacgcuauuaccacaauacugacugcagugacguucugcuuugccagcggccagaauaucaccgaagaguucuaccaauccacauguucugcggucucaaaaggguauuugagugcuuuaagaacuggaugguacaccagcguuauuacaaucgaacuguccaacauuaaggagaauaaaugcaacgguaccgacgccaaggugaaacuaaucaagcaggaacucgauaaguauaaaaaugcaguaacugagcugcagaugcuuauguguucuacacccgccaccggcucggggucagcuauagcaagcggaguggccgucugcaaggugcugcacuuggagggcgaaguuaacaaaaucaagagugcucuccuguccacgaauaaagccguggucucucugagcaacgguguguccguacucacuuuuaagguuuuagaccugaagaauuacauugauaaacagcuuuugccuauccugaacaagcaaucauguaguauuagcaauaucgagaccgugauggaguuccagcagaaaaacaauaggcuacucgaaauaacacgggaguuuucugucaacgcgggggugacuaccccaguguccacauauaugcugaccaauucagaacuucugagcuugauuaacgacaugccgaucacgaacgaucagaagaaacucaugaguaauaacguccaaauuguucgccagcagucuuacuccaucaugugcaucauuaaggaggaagugcuggcauauguagugcaguuaccccuguacggagucauagacacuccuuguuggaaacuccauacaagcccacuuugcaccacuaauacaaaggagggcucgaacaucugucugacccgaacggaucguggcugguacugcgacaaugccgggucuguguccuucuuuccccaagcugaaaccuguaagguuugcucaaacagaguguucugcgauacaaugaauaguuugacucuaccuagcgaggucaaccuguguaauguggacauuuuuaacccaaaauaugauugcaagaucaugaccuccaaaacagacguaucuagcucaguuauaacuagccucggagccauuguguccuguuacgguaagaccaaaugcacagcaagcaauaagaacaagggcaucaucaaaaccuucucuaaugggugugauuaugucucaaacaagggaguggacacugucagugugggcaauacgcuguacuauguuaacaaacaggaggguaagagccuuuacgugaaaggggaacccauuaucaacuuuuaugacccucugguauucccauccgaugaguuugacgcuucuauuucgcaggucaaugaaaagauaaaccaaaguuuggccuucaucaggaaguccgaugagcuccugcacaaugugaacgcgggaaaaucaacaaccaauauuaugaucacuaccaucauuauaguuaucauugugaucuuacugagucuaauugccgucggccuccugcuuuacugcaaggcacggugaggacuaguggaagcauuuuccuggcugauuaaaagaaauuacucagcuauggucaucuguuccuguuagaaggcuaugcagcauauuauauacuaugcgcauguuaugaaaugcauaauaaaaaauuuuaaaaaaucuaaaagaucuaaaaaaaaaaaaaaaaaaaaaaaaaaaaaaaaaaaaaaaaaaaaaaaaaaaaaaaaaaaaaaaaugcaucccccccccccccccccccccccccccccccaaaggcucuuuucagagccaccagaauu

SEQ ID NO: 7272 - RNA, 1943 nt, Artificial Sequence
  mRNA product Design c-2 comprising derived and/or modified sequence from HRSV(A2)__F-del_DSCav1_mut7 (opt4)
gggagacuccugucgggcggaaguaggaggaguagaguuuaaaaacaguacucuuuuuccgguucgggacguaguugaagcaacgacaagccggauaaccgcucuugagacaggaagcuuaccauggagcugcugauccugaaggccaacgccaucaccaccauccugaccgccgugaccuucugcuucgccagcggccagaacaucaccgaggaguucuaccagagcaccugcagcgccgugagcaagggcuaccugagcgcccugagaaccggcugguacaccagcgugaucaccaucgagcugagcaacaucaaggagaacaagugcaacggcaccgacgccaaggugaagcugaucaagcaggagcuggacaaguacaagaacgccgugaccgagcugcagaugcugaugugcagcacccccgccaccggcagcggcagcgccaucgccagcggcguggccgugugcaaggugcugcaccuggagggcgaggugaacaagaucaagagcgcccugcugagcaccaacaaggccguggugagccugagcaacggcgugagcgugcugaccuucaaggugcuggaccugaagaacuacaucgacaagcagcugcugcccauccugaacaagcagagcugcagcaucagcaacaucgagaccgugauggaguuccagcagaagaacaacagacugcuggagaucaccagagaguucagcgugaacgccggcgugaccacccccgugagcaccuacaugcugaccaacagcgagcugcugagccugaucaacgacaugcccaucaccaacgaccagaagaagcugaugagcaacaacgugcagaucgugagacagcagagcuacagcaucaugugcaucaucaaggaggaggugcuggccuacguggugcagcugccccuguacggcgugaucgacacccccugcuggaagcugcacaccagcccccugugcaccaccaacaccaaggagggcagcaacaucugccugaccagaaccgacagaggcugguacugcgacaacgccggcagcgugagcuucuucccccaggccgagaccugcaaggugugcagcaacagaguguucugcgacaccaugaacagccugacccugcccagcgaggugaaccugugcaacguggacaucuucaaccccaaguacgacugcaagaucaugaccagcaagaccgacgugagcagcagcgugaucaccagccugggcgccaucgugagcugcuacggcaagaccaagugcaccgccagcaacaagaacaagggcaucaucaagaccuucagcaacggcugcgacuacgugagcaacaagggcguggacaccgugagcgugggcaacacccuguacuacgugaacaagcaggagggcaagagccuguacgugaagggcgagcccaucaucaacuucuacgacccccugguguuccccagcgacgaguucgacgccagcaucagccaggugaacgagaagaucaaccagagccuggccuucaucagaaagagcgacgagcugcugcacaacgugaacgccggcaagagcaccaccaacaucaugaucaccaccaucaucaucgugaucaucgugauccugcugagccugaucgccgugggccugcugcuguacugcaaggccagaugaggacuaguggaagcauuuuccuggcugauuaaaagaaauuacucagcuauggucaucuguuccuguuagaaggcuaugcagcauauuauauacuaugcgcauguuaugaaaugcauaauaaaaaauuuuaaaaaaucuaaaagaucuaaaaaaaaaaaaaaaaaaaaaaaaaaaaaaaaaaaaaaaaaaaaaaaaaaaaaaaaaaaaaaaaugcaucccccccccccccccccccccccccccccccaaaggcucuuuucagagccaccagaauu

SEQ ID NO: 7273 - RNA, 1943 nt, Artificial Sequence
  mRNA product Design c-2 comprising derived and/or modified sequence from HRSV(A2)__F-del_DSCav1_mut7 (opt5)
gggagacuccugucgggcggaaguaggaggaguagaguuuaaaaacaguacucuuuuuccgguucgggacguaguugaagcaacgacaagccggauaaccgcucuugagacaggaagcuuaccauggagcugcucauccugaaggccaacgcuauuaccacaauccuuacggccgugaccuucugcuuugcgagcggccagaauauuacagaagaguucuaccaauccaccuguucugcugucagcaaaggguaucuguccgcccucagaacaggaugguacaccucuguuaucacaauugaacugagcaacaucaaggagaauaaaugcaacggcaccgacgccaaggugaaacuuaucaagcaggaacuggauaaguauaaaaaugcugugacggagcuccagaugcugauguguuccacccccgccacagggucuggaagcgcuauugccuccggcgucgcggugugcaagguucugcaccucgagggggaagugaacaaaaucaagagcgcccugcuuucuaccaauaaagcugucgugucccugagcaacggaguuucugugcucacauuuaagguccuggaccuuaagaauuacauugauaaacagcugcucccuauccugaacaagcaauccuguagcauuucuaauaucgagaccgugauggaguuccagcagaaaaacaaucggcugcucgaaauuacgcgcgaguuuuccgugaacgccggcgucacaaccccgguuagcacauauaugcugaccaauuccgaacuucugucucucaucaacgacaugcccaucaccaacgaucagaagaaacugaugagcaauaacgugcaaauugugagacagcaguccuacagcaucaugugcauuaucaaggaggaaguccuugcuuaugugguucagcugccucucuacggcgugauugacacacccuguuggaaacugcauacgucuccucugugcaccacaaauaccaaggagggguccaacaucugucucacacggaccgaucgcggaugguacugcgacaaugccggcagcgucucuuucuuuccccaagcggaaacguguaaggugugcagcaacagaguuuucugcgauacaaugaacucccugacccuuccuucugaggugaaucuguguaaugucgacaucuuuaacccgaaauaugauugcaagauuaugaccagcaaaacagacguguccagcucugucaucaccucccucggggccauugugagcuguuacggaaagacaaaaugcacggcuucuaauaagaacaagggcaucauuaaaaccuucuccaaugggugugauuauguuagcaacaagggaguggacacagucuccgugggcaauacccuguacuauguuaacaaacaggagggcaagucucuuuacgugaaaggggaacccaucaucaacuuuuaugacccucuggucuuccccagcgaugaguuugacgccuccauuucucaggugaaugaaaagaucaaccaaagccucgcuuucauucggaaguccgaugagcugcugcacaaugugaacgccggaaaaagcacaaccaauaucaugauuacgaccaucauuaucguuaucauugucauccuccugucucuuauugccgugggccugcuccuguacugcaaggcucgcugaggacuaguggaagcauuuuccuggcugauuaaaagaaauuacucagcuauggucaucuguuccuguuagaaggcuaugcagcauauuauauacuaugcgcauguuaugaaaugcauaauaaaaaauuuuaaaaaaucuaaaagaucuaaaaaaaaaaaaaaaaaaaaaaaaaaaaaaaaaaaaaaaaaaaaaaaaaaaaaaaaaaaaaaaaugcaucccccccccccccccccccccccccccccccaaaggcucuuuucagagccaccagaauu

SEQ ID NO: 7274 - RNA, 1943 nt, Artificial Sequence
  mRNA product Design c-2 comprising derived and/or modified sequence from HRSV(A2)__F-del_DSCav1_mut7 (opt6)
gggagacuccugucgggcggaaguaggaggaguagaguuuaaaaacaguacucuuuuuccgguucgggacguaguugaagcaacgacaagccggauaaccgcucuugagacaggaagcuuaccauggaauuacuaauccucaaagcaaacgcaauuacaaccauacuaaccgcugucaccuuuuguuuugccucaggacaaaacauaacugaagaauuuuaccaaucaacaugcuccgcaguaucuaaaggauaccucagcgcguuaagaacaggaugguacacaucgguaauaaccaucgaauuauccaacauaaaagaaaauaaaugcaauggaacagacgcaaaagucaaauuaauuaaacaagaacuagacaaauauaaaaacgcaguaaccgaauuacaaaugcuaauguguucaacaccagcaacaggaucaggaucagcuauagcuucaggaguugccguaugcaaagugcuacacuuagaaggagaagugaauaaaauaaaaucagcucuauuaucaacgaacaaagccguaguaucucuaucaaauggcguaucaguacucacauucaaaguacucgaccuaaaaaacuauauagauaaacaacuauuacccauccuaaauaaacaaagcugcucuauaucaaacaucgaaacaguaauggaauuucaacaaaaaaacaacagacuacuagaaauaacccgagaguucucaguuaaugcaggaguaacaacaccagucucaacauacaugcucacaaacucagaacuccuaucacuaauaaaugacaugccaauaacaaacgaccaaaaaaaacucaugucuaacaacguccaaauaguaagacaacaauccuacagcauaauguguauaauaaaagaagaaguuuuagcauacgucguacaacuacccuuauauggcguaauagauacaccaugcuggaaacuccauaccucaccucuauguacaacaaauaccaaagaagguucuaauauaugccuaacacgaacugaccgaggaugguacugugacaacgcaggaucagucucuuucuuuccacaagcagaaaccugcaaaguaugcaguaaccgcguauuuugcgacacaaugaacucccuaaccuuaccaucagaaguaaacuuauguaacguagacauauucaauccaaaauaugacugcaaaauaaugacaucaaaaacagacguaagcucaucaguaauaacuucacuaggcgcaauuguaucaugcuauggaaaaaccaaauguaccgcauccaacaaaaauaaaggaauaauaaaaaccuucucuaacggaugcgacuacguaucaaacaaagguguagauacaguuucuguaggaaacacacucuacuauguaaauaaacaagaaggaaaaucacuauacguaaaaggagaaccaauaauaaacuucuaugacccacuuguauuuccaucugaugaauuugaugcaagcauaucacaaguaaacgaaaaaauaaaccaaucucuagccuuuauacgaaaaagcgacgaauuacuacauaacgucaacgcuggaaaaucaacaacaaacauaaugauaacaacaauaauaauaguaauaauagucauccuauuaucacuaaucgccguaggacuacuccuauacugcaaagcuagauaaggacuaguggaagcauuuuccuggcugauuaaaagaaauuacucagcuauggucaucuguuccuguuagaaggcuaugcagcauauuauauacuaugcgcauguuaugaaaugcauaauaaaaaauuuuaaaaaaucuaaaagaucuaaaaaaaaaaaaaaaaaaaaaaaaaaaaaaaaaaaaaaaaaaaaaaaaaaaaaaaaaaaaaaaaugcaucccccccccccccccccccccccccccccccaaaggcucuuuucagagccaccagaauu

SEQ ID NO: 7275 - RNA, 1943 nt, Artificial Sequence
  mRNA product Design c-2 comprising derived and/or modified sequence from HRSV(A2)__F-del_DSCav1_mut7 (opt11)
gggagacuccugucgggcggaaguaggaggaguagaguuuaaaaacaguacucuuuuuccgguucgggacguaguugaagcaacgacaagccggauaaccgcucuugagacaggaagcuuaccauggaacuccucauccucaaagccaacgccauaaccacuauccucacagcagucacuuucugcuucgccucaggacaaaacauaaccgaagaguucuaccaauccacaugcuccgccgucuccaaaggcuaccucucagcgcuccgcaccggcugguacacauccgucaucaccaucgaacuaagcaacauaaaagaaaacaaaugcaacggcaccgacgccaaaguuaaacucaucaagcaagaacucgacaaauacaaaaacgcagucacagaacuucaaaugcucaugugcuccacacccgccacagguucuggcucagcaaucgcaagcggcgucgccguaugcaaaguccuucaccucgaaggcgaagucaacaaaaucaaauccgcccuccucuccaccaauaaagcugucgucucacucuccaacggcgucagcguccucacauucaaaguccucgaccucaaaaacuacauagacaagcaacuccucccgauacucaacaaacaaagcugcucuaucuccaacaucgaaaccgucauggaguuccaacagaaaaacaaucgucuccucgaaaucacccgcgaguucucaguaaacgccggggucaccacaccagucuccaccuacaugcucaccaacuccgaacuccuuagccucauaaacgacaugcccauaaccaacgaccaaaagaaacucaugagcaacaacguacaaauaguccgacaacaauccuauuccaucauguguaucaucaaagaagaaguccucgcauacguaguccaacucccccuauacggcguaaucgacaccccauguuggaaacuccacaccucaccacucuguaccaccaacaccaaagaaggcucaaacaucugccucacccgcacagaccgcggcugguacugcgacaacgcgggcuccgucagcuucuuuccccaagcggaaaccugcaaagucugcagcaacagagucuucugcgacacuaugaacucccucacccuccccucagaagucaaccucugcaacgucgacaucuucaacccgaaauacgacugcaaaaucaugaccagcaaaacugacgucuccucguccgucaucaccucacucggcgcaaucgugagcugcuacggcaaaaccaaaugcaccgccuccaacaaaaacaaaggcaucauaaaaacauucagcaacggcugcgacuacgucucgaacaaaggagucgacaccguaucagugggcaacacccuauacuacguaaacaagcaagaaggcaaaucacucuacguaaaaggcgaacccaucaucaacuucuacgacccccucgucuuccccuccgacgaguucgacgccuccaucucucaagucaacgagaaaaucaaccaaucccuugccuucauacguaaaagcgacgaacuccuucacaacguaaacgccgggaaauccaccacuaacauaaugaucaccaccaucaucaucguuaucauagucauccuccucucucucauagcagucggccuacuccuguacugcaaagcgcgcuaaggacuaguggaagcauuuuccuggcugauuaaaagaaauuacucagcuauggucaucuguuccuguuagaaggcuaugcagcauauuauauacuaugcgcauguuaugaaaugcauaauaaaaaauuuuaaaaaaucuaaaagaucuaaaaaaaaaaaaaaaaaaaaaaaaaaaaaaaaaaaaaaaaaaaaaaaaaaaaaaaaaaaaaaaaugcaucccccccccccccccccccccccccccccccaaaggcucuuuucagagccaccagaauu

SEQ ID NO: 7276 - RNA, 1920 nt, Artificial Sequence
  mRNA product Design c-3 comprising derived and/or modified sequence from HRSV(A2)__F-del_DSCav1_mut7 (opt1)
gggagaguccgcucagccagguugcagaagcggcuuagcguguguccuaaucuucucucugcguguagguaggccugugccgcaaacaagcuuaccauggagcugcucauccugaaggccaacgccaucaccaccauccugacggcggugaccuucugcuucgccagcggccagaacaucaccgaggaguucuaccaguccacgugcagcgccgucuccaagggguaccucagcgcccugcggaccggcugguacaccuccgugaucaccaucgagcugagcaacaucaaggagaacaagugcaacgggaccgacgccaaggugaagcucaucaagcaggagcuggacaaguacaagaacgcggucacggagcugcagaugcugaugugcuccaccccggcaaccggcuccggcuccgccaucgcgagcggcgucgccgugugcaaggugcugcaccucgagggggaggucaacaagaucaagagcgcccugcuguccaccaacaaggccguggugagccucuccaacggcgucagcgugcugaccuucaaggugcuggaccucaagaacuacaucgacaagcagcugcugcccauccugaacaagcagagcugcuccaucagcaacaucgagacggugauggaguuccagcagaagaacaaccggcuccuggagaucacccgcgaguucagcgugaacgccggggucaccacccccguguccacguacaugcugaccaacagcgagcuccugucccugaucaacgacaugccgaucaccaacgaccagaagaagcucaugagcaacaacgugcagaucguccggcagcaguccuacagcaucaugugcaucaucaaggaggaggugcuggcguacgugguccagcugccccucuacggcgugaucgacacccccugcuggaagcugcacacgagcccccugugcaccaccaacaccaaggagggguccaacaucugccucacgcgcaccgaccggggcugguacugcgacaacgccggcagcgucuccuucuucccgcaggccgagaccugcaaggugugcagcaaccgcguguucugcgacaccaugaacucccugacgcugcccagcgagguaaaccucugcaacgucgacaucuucaaccccaaguacgacugcaagaucaugaccuccaagaccgacgugagcuccagcgugaucaccucccugggggccaucgucagcugcuacggcaagacgaagugcaccgccagcaacaagaacaaggggaucaucaagaccuucuccaacggcugcgacuacgugagcaacaagggcguggacaccguguccgucgggaacacccuguacuacgugaacaagcaggagggcaagagccucuacgugaagggggagcccaucaucaacuucuacgacccgcuggucuuccccuccgacgaguucgacgcgagcaucucccaggugaacgagaagaucaaccagagccuggccuucauccgcaaguccgacgagcugcuccacaacgugaacgccggcaagagcacgaccaacaucaugaucaccaccaucaucaucgucaucaucgugauccugcugucccucaucgccguggggcugcugcucuacugcaaggcccggugaggacuaguacuggcugcaucucccuuuccucuguccuccauccuucucccaggauggugaagggggaccugguacccagugauccccaccccaggauccuaaaucaugacuuaccugcuaauaaaaacucauuggaaaagugagaagaucuaaaaaaaaaaaaaaaaaaaaaaaaaaaaaaaaaaaaaaaaaaaaaaaaaaaaaaaaaaaaaaaaugcaucccccccccccccccccccccccccccccccaaaggcucuuuucagagccaccagaauu

SEQ ID NO: 7277 - RNA, 1920 nt, Artificial Sequence
  mRNA product Design c-3 comprising derived and/or modified sequence from HRSV(A2)__F-del_DSCav1_mut7 (opt1)
gggagaguccgcucagccagguugcagaagcggcuuagcguguguccuaaucuucucucugcguguagguaggccugugccgcaaacaagcuuaccauggagcugcucauccugaaggccaacgccaucaccaccauccugacggcggugaccuucugcuucgccagcggccagaacaucaccgaggaguucuaccaguccacgugcagcgccgucuccaagggguaccucagcgcccugcgcaccggcugguacaccuccgugaucaccaucgagcugagcaacaucaaggagaacaagugcaacgggaccgacgccaaggugaagcucaucaagcaggagcuggacaaguacaagaacgcggucacggagcugcagaugcucaugugcuccacccccgccaccggcagcggguccgccaucgccagcggcguggcggugugcaagguccugcaccuggagggcgaggugaacaagaucaaguccgcccuccugagcaccaacaaggccguggucucccugagcaacgggguguccgugcucacguucaagguccuggaccugaagaacuacaucgacaagcagcuccugccgauccugaacaagcagagcugcuccaucagcaacaucgagaccgugauggaguuccagcagaagaacaaccggcuccuggagaucacccgcgaguucuccgugaacgccggcgucaccacgcccgugagcaccuacaugcugaccaacagcgagcuccugucccugaucaacgacaugcccaucaccaacgaccagaagaagcucaugagcaacaacgugcagaucguccggcagcaguccuacagcaucaugugcaucaucaaggaggaggugcuggccuacgugguccagcugccccucuacggggugaucgacacgccgugcuggaagcugcacaccagcccccugugcaccaccaacacgaaggagggcagcaacaucugccucacccgcaccgaccgggggugguacugcgacaacgcgggcuccgugagcuucuucccccaggccgagaccugcaaggucugcuccaaccgcguguucugcgacacgaugaacagccugacccugcccuccgaggucaaccucugcaacguggacaucuucaacccgaaguacgacugcaagaucaugaccagcaagaccgacguguccagcuccgucaucacgagccugggcgccaucguguccugcuacgggaagaccaagugcaccgccagcaacaagaacaagggcaucaucaagaccuucuccaacgggugcgacuacgugagcaacaagggcgucgacacggugagcgugggcaacacccuguacuacgucaacaagcaggaggggaagucccucuacgugaagggcgagcccaucaucaacuucuacgacccccugguguuccccagcgacgaguucgacgccuccaucagccaggucaacgagaagaucaaccagucccuggcguucauccggaaguccgacgagcuccugcacaacgugaacgccgggaaguccaccaccaacaucaugaucaccacgaucaucaucgugaucaucgucauccugcucagccugaucgccgugggccugcuccuguacugcaaggcccgcugaggacuaguacuggcugcaucucccuuuccucuguccuccauccuucucccaggauggugaagggggaccugguacccagugauccccaccccaggauccuaaaucaugacuuaccugcuaauaaaaacucauuggaaaagugagaagaucuaaaaaaaaaaaaaaaaaaaaaaaaaaaaaaaaaaaaaaaaaaaaaaaaaaaaaaaaaaaaaaaaugcaucccccccccccccccccccccccccccccccaaaggcucuuuucagagccaccagaauu

SEQ ID NO: 7278 - RNA, 1920 nt, Artificial Sequence
  mRNA product Design c-3 comprising derived and/or modified sequence from HRSV(A2)__F-del_DSCav1_mut7 (opt2)
gggagaguccgcucagccagguugcagaagcggcuuagcguguguccuaaucuucucucugcguguagguaggccugugccgcaaacaagcuuaccauggagcuccucauccucaaggccaacgccaucaccaccauccucaccgccgucaccuucugcuucgccuccggccagaacaucaccgaggaguucuaccaguccaccugcuccgccgucuccaagggcuaccucuccgcccuccgcaccggcugguacaccuccgucaucaccaucgagcucuccaacaucaaggagaacaagugcaacggcaccgacgccaaggucaagcucaucaagcaggagcucgacaaguacaagaacgccgucaccgagcuccagaugcucaugugcuccacccccgccaccggcuccggcuccgccaucgccuccggcgucgccgucugcaagguccuccaccucgagggcgaggucaacaagaucaaguccgcccuccucuccaccaacaaggccgucgucucccucuccaacggcgucuccguccucaccuucaagguccucgaccucaagaacuacaucgacaagcagcuccuccccauccucaacaagcaguccugcuccaucuccaacaucgagaccgucauggaguuccagcagaagaacaaccgccuccucgagaucacccgcgaguucuccgucaacgccggcgucaccacccccgucuccaccuacaugcucaccaacuccgagcuccucucccucaucaacgacaugcccaucaccaacgaccagaagaagcucauguccaacaacguccagaucguccgccagcaguccuacuccaucaugugcaucaucaaggaggagguccucgccuacgucguccagcucccccucuacggcgucaucgacacccccugcuggaagcuccacaccuccccccucugcaccaccaacaccaaggagggcuccaacaucugccucacccgcaccgaccgcggcugguacugcgacaacgccggcuccgucuccuucuucccccaggccgagaccugcaaggucugcuccaaccgcgucuucugcgacaccaugaacucccucacccuccccuccgaggucaaccucugcaacgucgacaucuucaaccccaaguacgacugcaagaucaugaccuccaagaccgacgucuccuccuccgucaucaccucccucggcgccaucgucuccugcuacggcaagaccaagugcaccgccuccaacaagaacaagggcaucaucaagaccuucuccaacggcugcgacuacgucuccaacaagggcgucgacaccgucuccgucggcaacacccucuacuacgucaacaagcaggagggcaagucccucuacgucaagggcgagcccaucaucaacuucuacgacccccucgucuuccccuccgacgaguucgacgccuccaucucccaggucaacgagaagaucaaccagucccucgccuucauccgcaaguccgacgagcuccuccacaacgucaacgccggcaaguccaccaccaacaucaugaucaccaccaucaucaucgucaucaucgucauccuccucucccucaucgccgucggccuccuccucuacugcaaggcccgcugaggacuaguacuggcugcaucucccuuuccucuguccuccauccuucucccaggauggugaagggggaccugguacccagugauccccaccccaggauccuaaaucaugacuuaccugcuaauaaaaacucauuggaaaagugagaagaucuaaaaaaaaaaaaaaaaaaaaaaaaaaaaaaaaaaaaaaaaaaaaaaaaaaaaaaaaaaaaaaaaugcaucccccccccccccccccccccccccccccccaaaggcucuuuucagagccaccagaauu

SEQ ID NO: 7279 - RNA, 1920 nt, Artificial Sequence
  mRNA product Design c-3 comprising derived and/or modified sequence from HRSV(A2)__F-del_DSCav1_mut7 (opt3)
gggagaguccgcucagccagguugcagaagcggcuuagcguguguccuaaucuucucucugcguguagguaggccugugccgcaaacaagcuuaccauggagcugcucauccuuaaggccaacgcuauuaccacaauacugacugcagugacguucugcuuugccagcggccagaauaucaccgaagaguucuaccaauccacauguucugcggucucaaaaggguauuugagugcuuuaagaacuggaugguacaccagcguuauuacaaucgaacuguccaacauuaaggagaauaaaugcaacgguaccgacgccaaggugaaacuaaucaagcaggaacucgauaaguauaaaaaugcaguaacugagcugcagaugcuuauguguucuacacccgccaccggcucggggucagcuauagcaagcggaguggccgucugcaaggugcugcacuuggagggcgaaguuaacaaaaucaagagugcucuccuguccacgaauaaagccguggucucucugagcaacgguguguccguacucacuuuuaagguuuuagaccugaagaauuacauugauaaacagcuuuugccuauccugaacaagcaaucauguaguauuagcaauaucgagaccgugauggaguuccagcagaaaaacaauaggcuacucgaaauaacacgggaguuuucugucaacgcgggggugacuaccccaguguccacauauaugcugaccaauucagaacuucugagcuugauuaacgacaugccgaucacgaacgaucagaagaaacucaugaguaauaacguccaaauuguucgccagcagucuuacuccaucaugugcaucauuaaggaggaagugcuggcauauguagugcaguuaccccuguacggagucauagacacuccuuguuggaaacuccauacaagcccacuuugcaccacuaauacaaaggagggcucgaacaucugucugacccgaacggaucguggcugguacugcgacaaugccgggucuguguccuucuuuccccaagcugaaaccuguaagguuugcucaaacagaguguucugcgauacaaugaauaguuugacucuaccuagcgaggucaaccuguguaauguggacauuuuuaacccaaaauaugauugcaagaucaugaccuccaaaacagacguaucuagcucaguuauaacuagccucggagccauuguguccuguuacgguaagaccaaaugcacagcaagcaauaagaacaagggcaucaucaaaaccuucucuaaugggugugauuaugucucaaacaagggaguggacacugucagugugggcaauacgcuguacuauguuaacaaacaggaggguaagagccuuuacgugaaaggggaacccauuaucaacuuuuaugacccucugguauucccauccgaugaguuugacgcuucuauuucgcaggucaaugaaaagauaaaccaaaguuuggccuucaucaggaaguccgaugagcuccugcacaaugugaacgcgggaaaaucaacaaccaauauuaugaucacuaccaucauuauaguuaucauugugaucuuacugagucuaauugccgucggccuccugcuuuacugcaaggcacggugaggacuaguacuggcugcaucucccuuuccucuguccuccauccuucucccaggauggugaagggggaccugguacccagugauccccaccccaggauccuaaaucaugacuuaccugcuaauaaaaacucauuggaaaagugagaagaucuaaaaaaaaaaaaaaaaaaaaaaaaaaaaaaaaaaaaaaaaaaaaaaaaaaaaaaaaaaaaaaaaugcaucccccccccccccccccccccccccccccccaaaggcucuuuucagagccaccagaauu

SEQ ID NO: 7280 - RNA, 1920 nt, Artificial Sequence
  mRNA product Design c-3 comprising derived and/or modified sequence from HRSV(A2)__F-del_DSCav1_mut7 (opt4)
gggagaguccgcucagccagguugcagaagcggcuuagcguguguccuaaucuucucucugcguguagguaggccugugccgcaaacaagcuuaccauggagcugcugauccugaaggccaacgccaucaccaccauccugaccgccgugaccuucugcuucgccagcggccagaacaucaccgaggaguucuaccagagcaccugcagcgccgugagcaagggcuaccugagcgcccugagaaccggcugguacaccagcgugaucaccaucgagcugagcaacaucaaggagaacaagugcaacggcaccgacgccaaggugaagcugaucaagcaggagcuggacaaguacaagaacgccgugaccgagcugcagaugcugaugugcagcacccccgccaccggcagcggcagcgccaucgccagcggcguggccgugugcaaggugcugcaccuggagggcgaggugaacaagaucaagagcgcccugcugagcaccaacaaggccguggugagccugagcaacggcgugagcgugcugaccuucaaggugcuggaccugaagaacuacaucgacaagcagcugcugcccauccugaacaagcagagcugcagcaucagcaacaucgagaccgugauggaguuccagcagaagaacaacagacugcuggagaucaccagagaguucagcgugaacgccggcgugaccacccccgugagcaccuacaugcugaccaacagcgagcugcugagccugaucaacgacaugcccaucaccaacgaccagaagaagcugaugagcaacaacgugcagaucgugagacagcagagcuacagcaucaugugcaucaucaaggaggaggugcuggccuacguggugcagcugccccuguacggcgugaucgacacccccugcuggaagcugcacaccagcccccugugcaccaccaacaccaaggagggcagcaacaucugccugaccagaaccgacagaggcugguacugcgacaacgccggcagcgugagcuucuucccccaggccgagaccugcaaggugugcagcaacagaguguucugcgacaccaugaacagccugacccugcccagcgaggugaaccugugcaacguggacaucuucaaccccaaguacgacugcaagaucaugaccagcaagaccgacgugagcagcagcgugaucaccagccugggcgccaucgugagcugcuacggcaagaccaagugcaccgccagcaacaagaacaagggcaucaucaagaccuucagcaacggcugcgacuacgugagcaacaagggcguggacaccgugagcgugggcaacacccuguacuacgugaacaagcaggagggcaagagccuguacgugaagggcgagcccaucaucaacuucuacgacccccugguguuccccagcgacgaguucgacgccagcaucagccaggugaacgagaagaucaaccagagccuggccuucaucagaaagagcgacgagcugcugcacaacgugaacgccggcaagagcaccaccaacaucaugaucaccaccaucaucaucgugaucaucgugauccugcugagccugaucgccgugggccugcugcuguacugcaaggccagaugaggacuaguacuggcugcaucucccuuuccucuguccuccauccuucucccaggauggugaagggggaccugguacccagugauccccaccccaggauccuaaaucaugacuuaccugcuaauaaaaacucauuggaaaagugagaagaucuaaaaaaaaaaaaaaaaaaaaaaaaaaaaaaaaaaaaaaaaaaaaaaaaaaaaaaaaaaaaaaaaugcaucccccccccccccccccccccccccccccccaaaggcucuuuucagagccaccagaauu

SEQ ID NO: 7281 - RNA, 1920 nt, Artificial Sequence
  mRNA product Design c-3 comprising derived and/or modified sequence from HRSV(A2)__F-del_DSCav1_mut7 (opt5)
gggagaguccgcucagccagguugcagaagcggcuuagcguguguccuaaucuucucucugcguguagguaggccugugccgcaaacaagcuuaccauggagcugcucauccugaaggccaacgcuauuaccacaauccuuacggccgugaccuucugcuuugcgagcggccagaauauuacagaagaguucuaccaauccaccuguucugcugucagcaaaggguaucuguccgcccucagaacaggaugguacaccucuguuaucacaauugaacugagcaacaucaaggagaauaaaugcaacggcaccgacgccaaggugaaacuuaucaagcaggaacuggauaaguauaaaaaugcugugacggagcuccagaugcugauguguuccacccccgccacagggucuggaagcgcuauugccuccggcgucgcggugugcaagguucugcaccucgagggggaagugaacaaaaucaagagcgcccugcuuucuaccaauaaagcugucgugucccugagcaacggaguuucugugcucacauuuaagguccuggaccuuaagaauuacauugauaaacagcugcucccuauccugaacaagcaauccuguagcauuucuaauaucgagaccgugauggaguuccagcagaaaaacaaucggcugcucgaaauuacgcgcgaguuuuccgugaacgccggcgucacaaccccgguuagcacauauaugcugaccaauuccgaacuucugucucucaucaacgacaugcccaucaccaacgaucagaagaaacugaugagcaauaacgugcaaauugugagacagcaguccuacagcaucaugugcauuaucaaggaggaaguccuugcuuaugugguucagcugccucucuacggcgugauugacacacccuguuggaaacugcauacgucuccucugugcaccacaaauaccaaggagggguccaacaucugucucacacggaccgaucgcggaugguacugcgacaaugccggcagcgucucuuucuuuccccaagcggaaacguguaaggugugcagcaacagaguuuucugcgauacaaugaacucccugacccuuccuucugaggugaaucuguguaaugucgacaucuuuaacccgaaauaugauugcaagauuaugaccagcaaaacagacguguccagcucugucaucaccucccucggggccauugugagcuguuacggaaagacaaaaugcacggcuucuaauaagaacaagggcaucauuaaaaccuucuccaaugggugugauuauguuagcaacaagggaguggacacagucuccgugggcaauacccuguacuauguuaacaaacaggagggcaagucucuuuacgugaaaggggaacccaucaucaacuuuuaugacccucuggucuuccccagcgaugaguuugacgccuccauuucucaggugaaugaaaagaucaaccaaagccucgcuuucauucggaaguccgaugagcugcugcacaaugugaacgccggaaaaagcacaaccaauaucaugauuacgaccaucauuaucguuaucauugucauccuccugucucuuauugccgugggccugcuccuguacugcaaggcucgcugaggacuaguacuggcugcaucucccuuuccucuguccuccauccuucucccaggauggugaagggggaccugguacccagugauccccaccccaggauccuaaaucaugacuuaccugcuaauaaaaacucauuggaaaagugagaagaucuaaaaaaaaaaaaaaaaaaaaaaaaaaaaaaaaaaaaaaaaaaaaaaaaaaaaaaaaaaaaaaaaugcaucccccccccccccccccccccccccccccccaaaggcucuuuucagagccaccagaauu

SEQ ID NO: 7282 - RNA, 1920 nt, Artificial Sequence
  mRNA product Design c-3 comprising derived and/or modified sequence from HRSV(A2)__F-del_DSCav1_mut7 (opt6)
gggagaguccgcucagccagguugcagaagcggcuuagcguguguccuaaucuucucucugcguguagguaggccugugccgcaaacaagcuuaccauggaauuacuaauccucaaagcaaacgcaauuacaaccauacuaaccgcugucaccuuuuguuuugccucaggacaaaacauaacugaagaauuuuaccaaucaacaugcuccgcaguaucuaaaggauaccucagcgcguuaagaacaggaugguacacaucgguaauaaccaucgaauuauccaacauaaaagaaaauaaaugcaauggaacagacgcaaaagucaaauuaauuaaacaagaacuagacaaauauaaaaacgcaguaaccgaauuacaaaugcuaauguguucaacaccagcaacaggaucaggaucagcuauagcuucaggaguugccguaugcaaagugcuacacuuagaaggagaagugaauaaaauaaaaucagcucuauuaucaacgaacaaagccguaguaucucuaucaaauggcguaucaguacucacauucaaaguacucgaccuaaaaaacuauauagauaaacaacuauuacccauccuaaauaaacaaagcugcucuauaucaaacaucgaaacaguaauggaauuucaacaaaaaaacaacagacuacuagaaauaacccgagaguucucaguuaaugcaggaguaacaacaccagucucaacauacaugcucacaaacucagaacuccuaucacuaauaaaugacaugccaauaacaaacgaccaaaaaaaacucaugucuaacaacguccaaauaguaagacaacaauccuacagcauaauguguauaauaaaagaagaaguuuuagcauacgucguacaacuacccuuauauggcguaauagauacaccaugcuggaaacuccauaccucaccucuauguacaacaaauaccaaagaagguucuaauauaugccuaacacgaacugaccgaggaugguacugugacaacgcaggaucagucucuuucuuuccacaagcagaaaccugcaaaguaugcaguaaccgcguauuuugcgacacaaugaacucccuaaccuuaccaucagaaguaaacuuauguaacguagacauauucaauccaaaauaugacugcaaaauaaugacaucaaaaacagacguaagcucaucaguaauaacuucacuaggcgcaauuguaucaugcuauggaaaaaccaaauguaccgcauccaacaaaaauaaaggaauaauaaaaaccuucucuaacggaugcgacuacguaucaaacaaagguguagauacaguuucuguaggaaacacacucuacuauguaaauaaacaagaaggaaaaucacuauacguaaaaggagaaccaauaauaaacuucuaugacccacuuguauuuccaucugaugaauuugaugcaagcauaucacaaguaaacgaaaaaauaaaccaaucucuagccuuuauacgaaaaagcgacgaauuacuacauaacgucaacgcuggaaaaucaacaacaaacauaaugauaacaacaauaauaauaguaauaauagucauccuauuaucacuaaucgccguaggacuacuccuauacugcaaagcuagauaaggacuaguacuggcugcaucucccuuuccucuguccuccauccuucucccaggauggugaagggggaccugguacccagugauccccaccccaggauccuaaaucaugacuuaccugcuaauaaaaacucauuggaaaagugagaagaucuaaaaaaaaaaaaaaaaaaaaaaaaaaaaaaaaaaaaaaaaaaaaaaaaaaaaaaaaaaaaaaaaugcaucccccccccccccccccccccccccccccccaaaggcucuuuucagagccaccagaauu

SEQ ID NO: 7283 - RNA, 1920 nt, Artificial Sequence
  mRNA product Design c-3 comprising derived and/or modified sequence from HRSV(A2)__F-del_DSCav1_mut7 (opt11)
gggagaguccgcucagccagguugcagaagcggcuuagcguguguccuaaucuucucucugcguguagguaggccugugccgcaaacaagcuuaccauggaacuccucauccucaaagccaacgccauaaccacuauccucacagcagucacuuucugcuucgccucaggacaaaacauaaccgaagaguucuaccaauccacaugcuccgccgucuccaaaggcuaccucucagcgcuccgcaccggcugguacacauccgucaucaccaucgaacuaagcaacauaaaagaaaacaaaugcaacggcaccgacgccaaaguuaaacucaucaagcaagaacucgacaaauacaaaaacgcagucacagaacuucaaaugcucaugugcuccacacccgccacagguucuggcucagcaaucgcaagcggcgucgccguaugcaaaguccuucaccucgaaggcgaagucaacaaaaucaaauccgcccuccucuccaccaauaaagcugucgucucacucuccaacggcgucagcguccucacauucaaaguccucgaccucaaaaacuacauagacaagcaacuccucccgauacucaacaaacaaagcugcucuaucuccaacaucgaaaccgucauggaguuccaacagaaaaacaaucgucuccucgaaaucacccgcgaguucucaguaaacgccggggucaccacaccagucuccaccuacaugcucaccaacuccgaacuccuuagccucauaaacgacaugcccauaaccaacgaccaaaagaaacucaugagcaacaacguacaaauaguccgacaacaauccuauuccaucauguguaucaucaaagaagaaguccucgcauacguaguccaacucccccuauacggcguaaucgacaccccauguuggaaacuccacaccucaccacucuguaccaccaacaccaaagaaggcucaaacaucugccucacccgcacagaccgcggcugguacugcgacaacgcgggcuccgucagcuucuuuccccaagcggaaaccugcaaagucugcagcaacagagucuucugcgacacuaugaacucccucacccuccccucagaagucaaccucugcaacgucgacaucuucaacccgaaauacgacugcaaaaucaugaccagcaaaacugacgucuccucguccgucaucaccucacucggcgcaaucgugagcugcuacggcaaaaccaaaugcaccgccuccaacaaaaacaaaggcaucauaaaaacauucagcaacggcugcgacuacgucucgaacaaaggagucgacaccguaucagugggcaacacccuauacuacguaaacaagcaagaaggcaaaucacucuacguaaaaggcgaacccaucaucaacuucuacgacccccucgucuuccccuccgacgaguucgacgccuccaucucucaagucaacgagaaaaucaaccaaucccuugccuucauacguaaaagcgacgaacuccuucacaacguaaacgccgggaaauccaccacuaacauaaugaucaccaccaucaucaucguuaucauagucauccuccucucucucauagcagucggccuacuccuguacugcaaagcgcgcuaaggacuaguacuggcugcaucucccuuuccucuguccuccauccuucucccaggauggugaagggggaccugguacccagugauccccaccccaggauccuaaaucaugacuuaccugcuaauaaaaacucauuggaaaagugagaagaucuaaaaaaaaaaaaaaaaaaaaaaaaaaaaaaaaaaaaaaaaaaaaaaaaaaaaaaaaaaaaaaaaugcaucccccccccccccccccccccccccccccccaaaggcucuuuucagagccaccagaauu

SEQ ID NO: 7284 - RNA, 1916 nt, Artificial Sequence
  mRNA product Design c-4 comprising derived and/or modified sequence from HRSV(A2)__F-del_DSCav1_mut7 (opt1)
gggagaguccgcucagccagguugcagaagcggcuuagcguguguccuaaucuucucucugcguguagguaggccugugccgcaaacaagcuuaccauggagcugcucauccugaaggccaacgccaucaccaccauccugacggcggugaccuucugcuucgccagcggccagaacaucaccgaggaguucuaccaguccacgugcagcgccgucuccaagggguaccucagcgcccugcggaccggcugguacaccuccgugaucaccaucgagcugagcaacaucaaggagaacaagugcaacgggaccgacgccaaggugaagcucaucaagcaggagcuggacaaguacaagaacgcggucacggagcugcagaugcugaugugcuccaccccggcaaccggcuccggcuccgccaucgcgagcggcgucgccgugugcaaggugcugcaccucgagggggaggucaacaagaucaagagcgcccugcuguccaccaacaaggccguggugagccucuccaacggcgucagcgugcugaccuucaaggugcuggaccucaagaacuacaucgacaagcagcugcugcccauccugaacaagcagagcugcuccaucagcaacaucgagacggugauggaguuccagcagaagaacaaccggcuccuggagaucacccgcgaguucagcgugaacgccggggucaccacccccguguccacguacaugcugaccaacagcgagcuccugucccugaucaacgacaugccgaucaccaacgaccagaagaagcucaugagcaacaacgugcagaucguccggcagcaguccuacagcaucaugugcaucaucaaggaggaggugcuggcguacgugguccagcugccccucuacggcgugaucgacacccccugcuggaagcugcacacgagcccccugugcaccaccaacaccaaggagggguccaacaucugccucacgcgcaccgaccggggcugguacugcgacaacgccggcagcgucuccuucuucccgcaggccgagaccugcaaggugugcagcaaccgcguguucugcgacaccaugaacucccugacgcugcccagcgagguaaaccucugcaacgucgacaucuucaaccccaaguacgacugcaagaucaugaccuccaagaccgacgugagcuccagcgugaucaccucccugggggccaucgucagcugcuacggcaagacgaagugcaccgccagcaacaagaacaaggggaucaucaagaccuucuccaacggcugcgacuacgugagcaacaagggcguggacaccguguccgucgggaacacccuguacuacgugaacaagcaggagggcaagagccucuacgugaagggggagcccaucaucaacuucuacgacccgcuggucuuccccuccgacgaguucgacgcgagcaucucccaggugaacgagaagaucaaccagagccuggccuucauccgcaaguccgacgagcugcuccacaacgugaacgccggcaagagcacgaccaacaucaugaucaccaccaucaucaucgucaucaucgugauccugcugucccucaucgccguggggcugcugcucuacugcaaggcccggugaggacuaguggaagcauuuuccuggcugauuaaaagaaauuacucagcuauggucaucuguuccuguuagaaggcuaugcagcauauuauauacuaugcgcauguuaugaaaugcauaauaaaaaauuuuaaaaaaucuaaaagaucuaaaaaaaaaaaaaaaaaaaaaaaaaaaaaaaaaaaaaaaaaaaaaaaaaaaaaaaaaaaaaaaaugcaucccccccccccccccccccccccccccccccaaaggcucuuuucagagccaccagaauu

SEQ ID NO: 7285 - RNA, 1916 nt, Artificial Sequence
  mRNA product Design c-4 comprising derived and/or modified sequence from HRSV(A2)__F-del_DSCav1_mut7 (opt1)
gggagaguccgcucagccagguugcagaagcggcuuagcguguguccuaaucuucucucugcguguagguaggccugugccgcaaacaagcuuaccauggagcugcucauccugaaggccaacgccaucaccaccauccugacggcggugaccuucugcuucgccagcggccagaacaucaccgaggaguucuaccaguccacgugcagcgccgucuccaagggguaccucagcgcccugcgcaccggcugguacaccuccgugaucaccaucgagcugagcaacaucaaggagaacaagugcaacgggaccgacgccaaggugaagcucaucaagcaggagcuggacaaguacaagaacgcggucacggagcugcagaugcucaugugcuccacccccgccaccggcagcggguccgccaucgccagcggcguggcggugugcaagguccugcaccuggagggcgaggugaacaagaucaaguccgcccuccugagcaccaacaaggccguggucucccugagcaacgggguguccgugcucacguucaagguccuggaccugaagaacuacaucgacaagcagcuccugccgauccugaacaagcagagcugcuccaucagcaacaucgagaccgugauggaguuccagcagaagaacaaccggcuccuggagaucacccgcgaguucuccgugaacgccggcgucaccacgcccgugagcaccuacaugcugaccaacagcgagcuccugucccugaucaacgacaugcccaucaccaacgaccagaagaagcucaugagcaacaacgugcagaucguccggcagcaguccuacagcaucaugugcaucaucaaggaggaggugcuggccuacgugguccagcugccccucuacggggugaucgacacgccgugcuggaagcugcacaccagcccccugugcaccaccaacacgaaggagggcagcaacaucugccucacccgcaccgaccgggggugguacugcgacaacgcgggcuccgugagcuucuucccccaggccgagaccugcaaggucugcuccaaccgcguguucugcgacacgaugaacagccugacccugcccuccgaggucaaccucugcaacguggacaucuucaacccgaaguacgacugcaagaucaugaccagcaagaccgacguguccagcuccgucaucacgagccugggcgccaucguguccugcuacgggaagaccaagugcaccgccagcaacaagaacaagggcaucaucaagaccuucuccaacgggugcgacuacgugagcaacaagggcgucgacacggugagcgugggcaacacccuguacuacgucaacaagcaggaggggaagucccucuacgugaagggcgagcccaucaucaacuucuacgacccccugguguuccccagcgacgaguucgacgccuccaucagccaggucaacgagaagaucaaccagucccuggcguucauccggaaguccgacgagcuccugcacaacgugaacgccgggaaguccaccaccaacaucaugaucaccacgaucaucaucgugaucaucgucauccugcucagccugaucgccgugggccugcuccuguacugcaaggcccgcugaggacuaguggaagcauuuuccuggcugauuaaaagaaauuacucagcuauggucaucuguuccuguuagaaggcuaugcagcauauuauauacuaugcgcauguuaugaaaugcauaauaaaaaauuuuaaaaaaucuaaaagaucuaaaaaaaaaaaaaaaaaaaaaaaaaaaaaaaaaaaaaaaaaaaaaaaaaaaaaaaaaaaaaaaaugcaucccccccccccccccccccccccccccccccaaaggcucuuuucagagccaccagaauu

SEQ ID NO: 7286 - RNA, 1916 nt, Artificial Sequence
  mRNA product Design c-4 comprising derived and/or modified sequence from HRSV(A2)__F-del_DSCav1_mut7 (opt2)
gggagaguccgcucagccagguugcagaagcggcuuagcguguguccuaaucuucucucugcguguagguaggccugugccgcaaacaagcuuaccauggagcuccucauccucaaggccaacgccaucaccaccauccucaccgccgucaccuucugcuucgccuccggccagaacaucaccgaggaguucuaccaguccaccugcuccgccgucuccaagggcuaccucuccgcccuccgcaccggcugguacaccuccgucaucaccaucgagcucuccaacaucaaggagaacaagugcaacggcaccgacgccaaggucaagcucaucaagcaggagcucgacaaguacaagaacgccgucaccgagcuccagaugcucaugugcuccacccccgccaccggcuccggcuccgccaucgccuccggcgucgccgucugcaagguccuccaccucgagggcgaggucaacaagaucaaguccgcccuccucuccaccaacaaggccgucgucucccucuccaacggcgucuccguccucaccuucaagguccucgaccucaagaacuacaucgacaagcagcuccuccccauccucaacaagcaguccugcuccaucuccaacaucgagaccgucauggaguuccagcagaagaacaaccgccuccucgagaucacccgcgaguucuccgucaacgccggcgucaccacccccgucuccaccuacaugcucaccaacuccgagcuccucucccucaucaacgacaugcccaucaccaacgaccagaagaagcucauguccaacaacguccagaucguccgccagcaguccuacuccaucaugugcaucaucaaggaggagguccucgccuacgucguccagcucccccucuacggcgucaucgacacccccugcuggaagcuccacaccuccccccucugcaccaccaacaccaaggagggcuccaacaucugccucacccgcaccgaccgcggcugguacugcgacaacgccggcuccgucuccuucuucccccaggccgagaccugcaaggucugcuccaaccgcgucuucugcgacaccaugaacucccucacccuccccuccgaggucaaccucugcaacgucgacaucuucaaccccaaguacgacugcaagaucaugaccuccaagaccgacgucuccuccuccgucaucaccucccucggcgccaucgucuccugcuacggcaagaccaagugcaccgccuccaacaagaacaagggcaucaucaagaccuucuccaacggcugcgacuacgucuccaacaagggcgucgacaccgucuccgucggcaacacccucuacuacgucaacaagcaggagggcaagucccucuacgucaagggcgagcccaucaucaacuucuacgacccccucgucuuccccuccgacgaguucgacgccuccaucucccaggucaacgagaagaucaaccagucccucgccuucauccgcaaguccgacgagcuccuccacaacgucaacgccggcaaguccaccaccaacaucaugaucaccaccaucaucaucgucaucaucgucauccuccucucccucaucgccgucggccuccuccucuacugcaaggcccgcugaggacuaguggaagcauuuuccuggcugauuaaaagaaauuacucagcuauggucaucuguuccuguuagaaggcuaugcagcauauuauauacuaugcgcauguuaugaaaugcauaauaaaaaauuuuaaaaaaucuaaaagaucuaaaaaaaaaaaaaaaaaaaaaaaaaaaaaaaaaaaaaaaaaaaaaaaaaaaaaaaaaaaaaaaaugcaucccccccccccccccccccccccccccccccaaaggcucuuuucagagccaccagaauu

SEQ ID NO: 7287 - RNA, 1916 nt, Artificial Sequence
  mRNA product Design c-4 comprising derived and/or modified sequence from HRSV(A2)__F-del_DSCav1_mut7 (opt3)
gggagaguccgcucagccagguugcagaagcggcuuagcguguguccuaaucuucucucugcguguagguaggccugugccgcaaacaagcuuaccauggagcugcucauccuuaaggccaacgcuauuaccacaauacugacugcagugacguucugcuuugccagcggccagaauaucaccgaagaguucuaccaauccacauguucugcggucucaaaaggguauuugagugcuuuaagaacuggaugguacaccagcguuauuacaaucgaacuguccaacauuaaggagaauaaaugcaacgguaccgacgccaaggugaaacuaaucaagcaggaacucgauaaguauaaaaaugcaguaacugagcugcagaugcuuauguguucuacacccgccaccggcucggggucagcuauagcaagcggaguggccgucugcaaggugcugcacuuggagggcgaaguuaacaaaaucaagagugcucuccuguccacgaauaaagccguggucucucugagcaacgguguguccguacucacuuuuaagguuuuagaccugaagaauuacauugauaaacagcuuuugccuauccugaacaagcaaucauguaguauuagcaauaucgagaccgugauggaguuccagcagaaaaacaauaggcuacucgaaauaacacgggaguuuucugucaacgcgggggugacuaccccaguguccacauauaugcugaccaauucagaacuucugagcuugauuaacgacaugccgaucacgaacgaucagaagaaacucaugaguaauaacguccaaauuguucgccagcagucuuacuccaucaugugcaucauuaaggaggaagugcuggcauauguagugcaguuaccccuguacggagucauagacacuccuuguuggaaacuccauacaagcccacuuugcaccacuaauacaaaggagggcucgaacaucugucugacccgaacggaucguggcugguacugcgacaaugccgggucuguguccuucuuuccccaagcugaaaccuguaagguuugcucaaacagaguguucugcgauacaaugaauaguuugacucuaccuagcgaggucaaccuguguaauguggacauuuuuaacccaaaauaugauugcaagaucaugaccuccaaaacagacguaucuagcucaguuauaacuagccucggagccauuguguccuguuacgguaagaccaaaugcacagcaagcaauaagaacaagggcaucaucaaaaccuucucuaaugggugugauuaugucucaaacaagggaguggacacugucagugugggcaauacgcuguacuauguuaacaaacaggaggguaagagccuuuacgugaaaggggaacccauuaucaacuuuuaugacccucugguauucccauccgaugaguuugacgcuucuauuucgcaggucaaugaaaagauaaaccaaaguuuggccuucaucaggaaguccgaugagcuccugcacaaugugaacgcgggaaaaucaacaaccaauauuaugaucacuaccaucauuauaguuaucauugugaucuuacugagucuaauugccgucggccuccugcuuuacugcaaggcacggugaggacuaguggaagcauuuuccuggcugauuaaaagaaauuacucagcuauggucaucuguuccuguuagaaggcuaugcagcauauuauauacuaugcgcauguuaugaaaugcauaauaaaaaauuuuaaaaaaucuaaaagaucuaaaaaaaaaaaaaaaaaaaaaaaaaaaaaaaaaaaaaaaaaaaaaaaaaaaaaaaaaaaaaaaaugcaucccccccccccccccccccccccccccccccaaaggcucuuuucagagccaccagaauu

SEQ ID NO: 7288 - RNA, 1916 nt, Artificial Sequence
  mRNA product Design c-4 comprising derived and/or modified sequence from HRSV(A2)__F-del_DSCav1_mut7 (opt4)
gggagaguccgcucagccagguugcagaagcggcuuagcguguguccuaaucuucucucugcguguagguaggccugugccgcaaacaagcuuaccauggagcugcugauccugaaggccaacgccaucaccaccauccugaccgccgugaccuucugcuucgccagcggccagaacaucaccgaggaguucuaccagagcaccugcagcgccgugagcaagggcuaccugagcgcccugagaaccggcugguacaccagcgugaucaccaucgagcugagcaacaucaaggagaacaagugcaacggcaccgacgccaaggugaagcugaucaagcaggagcuggacaaguacaagaacgccgugaccgagcugcagaugcugaugugcagcacccccgccaccggcagcggcagcgccaucgccagcggcguggccgugugcaaggugcugcaccuggagggcgaggugaacaagaucaagagcgcccugcugagcaccaacaaggccguggugagccugagcaacggcgugagcgugcugaccuucaaggugcuggaccugaagaacuacaucgacaagcagcugcugcccauccugaacaagcagagcugcagcaucagcaacaucgagaccgugauggaguuccagcagaagaacaacagacugcuggagaucaccagagaguucagcgugaacgccggcgugaccacccccgugagcaccuacaugcugaccaacagcgagcugcugagccugaucaacgacaugcccaucaccaacgaccagaagaagcugaugagcaacaacgugcagaucgugagacagcagagcuacagcaucaugugcaucaucaaggaggaggugcuggccuacguggugcagcugccccuguacggcgugaucgacacccccugcuggaagcugcacaccagcccccugugcaccaccaacaccaaggagggcagcaacaucugccugaccagaaccgacagaggcugguacugcgacaacgccggcagcgugagcuucuucccccaggccgagaccugcaaggugugcagcaacagaguguucugcgacaccaugaacagccugacccugcccagcgaggugaaccugugcaacguggacaucuucaaccccaaguacgacugcaagaucaugaccagcaagaccgacgugagcagcagcgugaucaccagccugggcgccaucgugagcugcuacggcaagaccaagugcaccgccagcaacaagaacaagggcaucaucaagaccuucagcaacggcugcgacuacgugagcaacaagggcguggacaccgugagcgugggcaacacccuguacuacgugaacaagcaggagggcaagagccuguacgugaagggcgagcccaucaucaacuucuacgacccccugguguuccccagcgacgaguucgacgccagcaucagccaggugaacgagaagaucaaccagagccuggccuucaucagaaagagcgacgagcugcugcacaacgugaacgccggcaagagcaccaccaacaucaugaucaccaccaucaucaucgugaucaucgugauccugcugagccugaucgccgugggccugcugcuguacugcaaggccagaugaggacuaguggaagcauuuuccuggcugauuaaaagaaauuacucagcuauggucaucuguuccuguuagaaggcuaugcagcauauuauauacuaugcgcauguuaugaaaugcauaauaaaaaauuuuaaaaaaucuaaaagaucuaaaaaaaaaaaaaaaaaaaaaaaaaaaaaaaaaaaaaaaaaaaaaaaaaaaaaaaaaaaaaaaaugcaucccccccccccccccccccccccccccccccaaaggcucuuuucagagccaccagaauu

SEQ ID NO: 7289 - RNA, 1916 nt, Artificial Sequence
  mRNA product Design c-4 comprising derived and/or modified sequence from HRSV(A2)__F-del_DSCav1_mut7 (opt5)
gggagaguccgcucagccagguugcagaagcggcuuagcguguguccuaaucuucucucugcguguagguaggccugugccgcaaacaagcuuaccauggagcugcucauccugaaggccaacgcuauuaccacaauccuuacggccgugaccuucugcuuugcgagcggccagaauauuacagaagaguucuaccaauccaccuguucugcugucagcaaaggguaucuguccgcccucagaacaggaugguacaccucuguuaucacaauugaacugagcaacaucaaggagaauaaaugcaacggcaccgacgccaaggugaaacuuaucaagcaggaacuggauaaguauaaaaaugcugugacggagcuccagaugcugauguguuccacccccgccacagggucuggaagcgcuauugccuccggcgucgcggugugcaagguucugcaccucgagggggaagugaacaaaaucaagagcgcccugcuuucuaccaauaaagcugucgugucccugagcaacggaguuucugugcucacauuuaagguccuggaccuuaagaauuacauugauaaacagcugcucccuauccugaacaagcaauccuguagcauuucuaauaucgagaccgugauggaguuccagcagaaaaacaaucggcugcucgaaauuacgcgcgaguuuuccgugaacgccggcgucacaaccccgguuagcacauauaugcugaccaauuccgaacuucugucucucaucaacgacaugcccaucaccaacgaucagaagaaacugaugagcaauaacgugcaaauugugagacagcaguccuacagcaucaugugcauuaucaaggaggaaguccuugcuuaugugguucagcugccucucuacggcgugauugacacacccuguuggaaacugcauacgucuccucugugcaccacaaauaccaaggagggguccaacaucugucucacacggaccgaucgcggaugguacugcgacaaugccggcagcgucucuuucuuuccccaagcggaaacguguaaggugugcagcaacagaguuuucugcgauacaaugaacucccugacccuuccuucugaggugaaucuguguaaugucgacaucuuuaacccgaaauaugauugcaagauuaugaccagcaaaacagacguguccagcucugucaucaccucccucggggccauugugagcuguuacggaaagacaaaaugcacggcuucuaauaagaacaagggcaucauuaaaaccuucuccaaugggugugauuauguuagcaacaagggaguggacacagucuccgugggcaauacccuguacuauguuaacaaacaggagggcaagucucuuuacgugaaaggggaacccaucaucaacuuuuaugacccucuggucuuccccagcgaugaguuugacgccuccauuucucaggugaaugaaaagaucaaccaaagccucgcuuucauucggaaguccgaugagcugcugcacaaugugaacgccggaaaaagcacaaccaauaucaugauuacgaccaucauuaucguuaucauugucauccuccugucucuuauugccgugggccugcuccuguacugcaaggcucgcugaggacuaguggaagcauuuuccuggcugauuaaaagaaauuacucagcuauggucaucuguuccuguuagaaggcuaugcagcauauuauauacuaugcgcauguuaugaaaugcauaauaaaaaauuuuaaaaaaucuaaaagaucuaaaaaaaaaaaaaaaaaaaaaaaaaaaaaaaaaaaaaaaaaaaaaaaaaaaaaaaaaaaaaaaaugcaucccccccccccccccccccccccccccccccaaaggcucuuuucagagccaccagaauu

SEQ ID NO: 7290 - RNA, 1916 nt, Artificial Sequence
  mRNA product Design c-4 comprising derived and/or modified sequence from HRSV(A2)__F-del_DSCav1_mut7 (opt6)
gggagaguccgcucagccagguugcagaagcggcuuagcguguguccuaaucuucucucugcguguagguaggccugugccgcaaacaagcuuaccauggaauuacuaauccucaaagcaaacgcaauuacaaccauacuaaccgcugucaccuuuuguuuugccucaggacaaaacauaacugaagaauuuuaccaaucaacaugcuccgcaguaucuaaaggauaccucagcgcguuaagaacaggaugguacacaucgguaauaaccaucgaauuauccaacauaaaagaaaauaaaugcaauggaacagacgcaaaagucaaauuaauuaaacaagaacuagacaaauauaaaaacgcaguaaccgaauuacaaaugcuaauguguucaacaccagcaacaggaucaggaucagcuauagcuucaggaguugccguaugcaaagugcuacacuuagaaggagaagugaauaaaauaaaaucagcucuauuaucaacgaacaaagccguaguaucucuaucaaauggcguaucaguacucacauucaaaguacucgaccuaaaaaacuauauagauaaacaacuauuacccauccuaaauaaacaaagcugcucuauaucaaacaucgaaacaguaauggaauuucaacaaaaaaacaacagacuacuagaaauaacccgagaguucucaguuaaugcaggaguaacaacaccagucucaacauacaugcucacaaacucagaacuccuaucacuaauaaaugacaugccaauaacaaacgaccaaaaaaaacucaugucuaacaacguccaaauaguaagacaacaauccuacagcauaauguguauaauaaaagaagaaguuuuagcauacgucguacaacuacccuuauauggcguaauagauacaccaugcuggaaacuccauaccucaccucuauguacaacaaauaccaaagaagguucuaauauaugccuaacacgaacugaccgaggaugguacugugacaacgcaggaucagucucuuucuuuccacaagcagaaaccugcaaaguaugcaguaaccgcguauuuugcgacacaaugaacucccuaaccuuaccaucagaaguaaacuuauguaacguagacauauucaauccaaaauaugacugcaaaauaaugacaucaaaaacagacguaagcucaucaguaauaacuucacuaggcgcaauuguaucaugcuauggaaaaaccaaauguaccgcauccaacaaaaauaaaggaauaauaaaaaccuucucuaacggaugcgacuacguaucaaacaaagguguagauacaguuucuguaggaaacacacucuacuauguaaauaaacaagaaggaaaaucacuauacguaaaaggagaaccaauaauaaacuucuaugacccacuuguauuuccaucugaugaauuugaugcaagcauaucacaaguaaacgaaaaaauaaaccaaucucuagccuuuauacgaaaaagcgacgaauuacuacauaacgucaacgcuggaaaaucaacaacaaacauaaugauaacaacaauaauaauaguaauaauagucauccuauuaucacuaaucgccguaggacuacuccuauacugcaaagcuagauaaggacuaguggaagcauuuuccuggcugauuaaaagaaauuacucagcuauggucaucuguuccuguuagaaggcuaugcagcauauuauauacuaugcgcauguuaugaaaugcauaauaaaaaauuuuaaaaaaucuaaaagaucuaaaaaaaaaaaaaaaaaaaaaaaaaaaaaaaaaaaaaaaaaaaaaaaaaaaaaaaaaaaaaaaaugcaucccccccccccccccccccccccccccccccaaaggcucuuuucagagccaccagaauu

SEQ ID NO: 7291 - RNA, 1916 nt, Artificial Sequence
  mRNA product Design c-4 comprising derived and/or modified sequence from HRSV(A2)__F-del_DSCav1_mut7 (opt11)
gggagaguccgcucagccagguugcagaagcggcuuagcguguguccuaaucuucucucugcguguagguaggccugugccgcaaacaagcuuaccauggaacuccucauccucaaagccaacgccauaaccacuauccucacagcagucacuuucugcuucgccucaggacaaaacauaaccgaagaguucuaccaauccacaugcuccgccgucuccaaaggcuaccucucagcgcuccgcaccggcugguacacauccgucaucaccaucgaacuaagcaacauaaaagaaaacaaaugcaacggcaccgacgccaaaguuaaacucaucaagcaagaacucgacaaauacaaaaacgcagucacagaacuucaaaugcucaugugcuccacacccgccacagguucuggcucagcaaucgcaagcggcgucgccguaugcaaaguccuucaccucgaaggcgaagucaacaaaaucaaauccgcccuccucuccaccaauaaagcugucgucucacucuccaacggcgucagcguccucacauucaaaguccucgaccucaaaaacuacauagacaagcaacuccucccgauacucaacaaacaaagcugcucuaucuccaacaucgaaaccgucauggaguuccaacagaaaaacaaucgucuccucgaaaucacccgcgaguucucaguaaacgccggggucaccacaccagucuccaccuacaugcucaccaacuccgaacuccuuagccucauaaacgacaugcccauaaccaacgaccaaaagaaacucaugagcaacaacguacaaauaguccgacaacaauccuauuccaucauguguaucaucaaagaagaaguccucgcauacguaguccaacucccccuauacggcguaaucgacaccccauguuggaaacuccacaccucaccacucuguaccaccaacaccaaagaaggcucaaacaucugccucacccgcacagaccgcggcugguacugcgacaacgcgggcuccgucagcuucuuuccccaagcggaaaccugcaaagucugcagcaacagagucuucugcgacacuaugaacucccucacccuccccucagaagucaaccucugcaacgucgacaucuucaacccgaaauacgacugcaaaaucaugaccagcaaaacugacgucuccucguccgucaucaccucacucggcgcaaucgugagcugcuacggcaaaaccaaaugcaccgccuccaacaaaaacaaaggcaucauaaaaacauucagcaacggcugcgacuacgucucgaacaaaggagucgacaccguaucagugggcaacacccuauacuacguaaacaagcaagaaggcaaaucacucuacguaaaaggcgaacccaucaucaacuucuacgacccccucgucuuccccuccgacgaguucgacgccuccaucucucaagucaacgagaaaaucaaccaaucccuugccuucauacguaaaagcgacgaacuccuucacaacguaaacgccgggaaauccaccacuaacauaaugaucaccaccaucaucaucguuaucauagucauccuccucucucucauagcagucggccuacuccuguacugcaaagcgcgcuaaggacuaguggaagcauuuuccuggcugauuaaaagaaauuacucagcuauggucaucuguuccuguuagaaggcuaugcagcauauuauauacuaugcgcauguuaugaaaugcauaauaaaaaauuuuaaaaaaucuaaaagaucuaaaaaaaaaaaaaaaaaaaaaaaaaaaaaaaaaaaaaaaaaaaaaaaaaaaaaaaaaaaaaaaaugcaucccccccccccccccccccccccccccccccaaaggcucuuuucagagccaccagaauu

SEQ ID NO: 7292 - RNA, 1834 nt, Artificial Sequence
  mRNA product Design c-5 comprising derived and/or modified sequence from HRSV(A2)__F-del_DSCav1_mut7 (opt1)
gggagagcggcucggccauuuugucccagucaguccggaggcugcggcugcagaaguaccgccugcggaguaacugcaaagaagcuuaccauggagcugcucauccugaaggccaacgccaucaccaccauccugacggcggugaccuucugcuucgccagcggccagaacaucaccgaggaguucuaccaguccacgugcagcgccgucuccaagggguaccucagcgcccugcggaccggcugguacaccuccgugaucaccaucgagcugagcaacaucaaggagaacaagugcaacgggaccgacgccaaggugaagcucaucaagcaggagcuggacaaguacaagaacgcggucacggagcugcagaugcugaugugcuccaccccggcaaccggcuccggcuccgccaucgcgagcggcgucgccgugugcaaggugcugcaccucgagggggaggucaacaagaucaagagcgcccugcuguccaccaacaaggccguggugagccucuccaacggcgucagcgugcugaccuucaaggugcuggaccucaagaacuacaucgacaagcagcugcugcccauccugaacaagcagagcugcuccaucagcaacaucgagacggugauggaguuccagcagaagaacaaccggcuccuggagaucacccgcgaguucagcgugaacgccggggucaccacccccguguccacguacaugcugaccaacagcgagcuccugucccugaucaacgacaugccgaucaccaacgaccagaagaagcucaugagcaacaacgugcagaucguccggcagcaguccuacagcaucaugugcaucaucaaggaggaggugcuggcguacgugguccagcugccccucuacggcgugaucgacacccccugcuggaagcugcacacgagcccccugugcaccaccaacaccaaggagggguccaacaucugccucacgcgcaccgaccggggcugguacugcgacaacgccggcagcgucuccuucuucccgcaggccgagaccugcaaggugugcagcaaccgcguguucugcgacaccaugaacucccugacgcugcccagcgagguaaaccucugcaacgucgacaucuucaaccccaaguacgacugcaagaucaugaccuccaagaccgacgugagcuccagcgugaucaccucccugggggccaucgucagcugcuacggcaagacgaagugcaccgccagcaacaagaacaaggggaucaucaagaccuucuccaacggcugcgacuacgugagcaacaagggcguggacaccguguccgucgggaacacccuguacuacgugaacaagcaggagggcaagagccucuacgugaagggggagcccaucaucaacuucuacgacccgcuggucuuccccuccgacgaguucgacgcgagcaucucccaggugaacgagaagaucaaccagagccuggccuucauccgcaaguccgacgagcugcuccacaacgugaacgccggcaagagcacgaccaacaucaugaucaccaccaucaucaucgucaucaucgugauccugcugucccucaucgccguggggcugcugcucuacugcaaggcccggugaggacuagucccuguucccagagcccacuuuuuuuucuuuuuuugaaauaaaauagccugucuuucagaucuaaaaaaaaaaaaaaaaaaaaaaaaaaaaaaaaaaaaaaaaaaaaaaaaaaaaaaaaaaaaaaaaugcaucccccccccccccccccccccccccccccccaaaggcucuuuucagagccaccagaauu

SEQ ID NO: 7293 - RNA, 1834 nt, Artificial Sequence
  mRNA product Design c-5 comprising derived and/or modified sequence from HRSV(A2)__F-del_DSCav1_mut7 (opt1)
gggagagcggcucggccauuuugucccagucaguccggaggcugcggcugcagaaguaccgccugcggaguaacugcaaagaagcuuaccauggagcugcucauccugaaggccaacgccaucaccaccauccugacggcggugaccuucugcuucgccagcggccagaacaucaccgaggaguucuaccaguccacgugcagcgccgucuccaagggguaccucagcgcccugcgcaccggcugguacaccuccgugaucaccaucgagcugagcaacaucaaggagaacaagugcaacgggaccgacgccaaggugaagcucaucaagcaggagcuggacaaguacaagaacgcggucacggagcugcagaugcucaugugcuccacccccgccaccggcagcggguccgccaucgccagcggcguggcggugugcaagguccugcaccuggagggcgaggugaacaagaucaaguccgcccuccugagcaccaacaaggccguggucucccugagcaacgggguguccgugcucacguucaagguccuggaccugaagaacuacaucgacaagcagcuccugccgauccugaacaagcagagcugcuccaucagcaacaucgagaccgugauggaguuccagcagaagaacaaccggcuccuggagaucacccgcgaguucuccgugaacgccggcgucaccacgcccgugagcaccuacaugcugaccaacagcgagcuccugucccugaucaacgacaugcccaucaccaacgaccagaagaagcucaugagcaacaacgugcagaucguccggcagcaguccuacagcaucaugugcaucaucaaggaggaggugcuggccuacgugguccagcugccccucuacggggugaucgacacgccgugcuggaagcugcacaccagcccccugugcaccaccaacacgaaggagggcagcaacaucugccucacccgcaccgaccgggggugguacugcgacaacgcgggcuccgugagcuucuucccccaggccgagaccugcaaggucugcuccaaccgcguguucugcgacacgaugaacagccugacccugcccuccgaggucaaccucugcaacguggacaucuucaacccgaaguacgacugcaagaucaugaccagcaagaccgacguguccagcuccgucaucacgagccugggcgccaucguguccugcuacgggaagaccaagugcaccgccagcaacaagaacaagggcaucaucaagaccuucuccaacgggugcgacuacgugagcaacaagggcgucgacacggugagcgugggcaacacccuguacuacgucaacaagcaggaggggaagucccucuacgugaagggcgagcccaucaucaacuucuacgacccccugguguuccccagcgacgaguucgacgccuccaucagccaggucaacgagaagaucaaccagucccuggcguucauccggaaguccgacgagcuccugcacaacgugaacgccgggaaguccaccaccaacaucaugaucaccacgaucaucaucgugaucaucgucauccugcucagccugaucgccgugggccugcuccuguacugcaaggcccgcugaggacuagucccuguucccagagcccacuuuuuuuucuuuuuuugaaauaaaauagccugucuuucagaucuaaaaaaaaaaaaaaaaaaaaaaaaaaaaaaaaaaaaaaaaaaaaaaaaaaaaaaaaaaaaaaaaugcaucccccccccccccccccccccccccccccccaaaggcucuuuucagagccaccagaauu

SEQ ID NO: 7294 - RNA, 1834 nt, Artificial Sequence
  mRNA product Design c-5 comprising derived and/or modified sequence from HRSV(A2)__F-del_DSCav1_mut7 (opt2)
gggagagcggcucggccauuuugucccagucaguccggaggcugcggcugcagaaguaccgccugcggaguaacugcaaagaagcuuaccauggagcuccucauccucaaggccaacgccaucaccaccauccucaccgccgucaccuucugcuucgccuccggccagaacaucaccgaggaguucuaccaguccaccugcuccgccgucuccaagggcuaccucuccgcccuccgcaccggcugguacaccuccgucaucaccaucgagcucuccaacaucaaggagaacaagugcaacggcaccgacgccaaggucaagcucaucaagcaggagcucgacaaguacaagaacgccgucaccgagcuccagaugcucaugugcuccacccccgccaccggcuccggcuccgccaucgccuccggcgucgccgucugcaagguccuccaccucgagggcgaggucaacaagaucaaguccgcccuccucuccaccaacaaggccgucgucucccucuccaacggcgucuccguccucaccuucaagguccucgaccucaagaacuacaucgacaagcagcuccuccccauccucaacaagcaguccugcuccaucuccaacaucgagaccgucauggaguuccagcagaagaacaaccgccuccucgagaucacccgcgaguucuccgucaacgccggcgucaccacccccgucuccaccuacaugcucaccaacuccgagcuccucucccucaucaacgacaugcccaucaccaacgaccagaagaagcucauguccaacaacguccagaucguccgccagcaguccuacuccaucaugugcaucaucaaggaggagguccucgccuacgucguccagcucccccucuacggcgucaucgacacccccugcuggaagcuccacaccuccccccucugcaccaccaacaccaaggagggcuccaacaucugccucacccgcaccgaccgcggcugguacugcgacaacgccggcuccgucuccuucuucccccaggccgagaccugcaaggucugcuccaaccgcgucuucugcgacaccaugaacucccucacccuccccuccgaggucaaccucugcaacgucgacaucuucaaccccaaguacgacugcaagaucaugaccuccaagaccgacgucuccuccuccgucaucaccucccucggcgccaucgucuccugcuacggcaagaccaagugcaccgccuccaacaagaacaagggcaucaucaagaccuucuccaacggcugcgacuacgucuccaacaagggcgucgacaccgucuccgucggcaacacccucuacuacgucaacaagcaggagggcaagucccucuacgucaagggcgagcccaucaucaacuucuacgacccccucgucuuccccuccgacgaguucgacgccuccaucucccaggucaacgagaagaucaaccagucccucgccuucauccgcaaguccgacgagcuccuccacaacgucaacgccggcaaguccaccaccaacaucaugaucaccaccaucaucaucgucaucaucgucauccuccucucccucaucgccgucggccuccuccucuacugcaaggcccgcugaggacuagucccuguucccagagcccacuuuuuuuucuuuuuuugaaauaaaauagccugucuuucagaucuaaaaaaaaaaaaaaaaaaaaaaaaaaaaaaaaaaaaaaaaaaaaaaaaaaaaaaaaaaaaaaaaugcaucccccccccccccccccccccccccccccccaaaggcucuuuucagagccaccagaauu

SEQ ID NO: 7295 - RNA, 1834 nt, Artificial Sequence
  mRNA product Design c-5 comprising derived and/or modified sequence from HRSV(A2)__F-del_DSCav1_mut7 (opt3)
gggagagcggcucggccauuuugucccagucaguccggaggcugcggcugcagaaguaccgccugcggaguaacugcaaagaagcuuaccauggagcugcucauccuuaaggccaacgcuauuaccacaauacugacugcagugacguucugcuuugccagcggccagaauaucaccgaagaguucuaccaauccacauguucugcggucucaaaaggguauuugagugcuuuaagaacuggaugguacaccagcguuauuacaaucgaacuguccaacauuaaggagaauaaaugcaacgguaccgacgccaaggugaaacuaaucaagcaggaacucgauaaguauaaaaaugcaguaacugagcugcagaugcuuauguguucuacacccgccaccggcucggggucagcuauagcaagcggaguggccgucugcaaggugcugcacuuggagggcgaaguuaacaaaaucaagagugcucuccuguccacgaauaaagccguggucucucugagcaacgguguguccguacucacuuuuaagguuuuagaccugaagaauuacauugauaaacagcuuuugccuauccugaacaagcaaucauguaguauuagcaauaucgagaccgugauggaguuccagcagaaaaacaauaggcuacucgaaauaacacgggaguuuucugucaacgcgggggugacuaccccaguguccacauauaugcugaccaauucagaacuucugagcuugauuaacgacaugccgaucacgaacgaucagaagaaacucaugaguaauaacguccaaauuguucgccagcagucuuacuccaucaugugcaucauuaaggaggaagugcuggcauauguagugcaguuaccccuguacggagucauagacacuccuuguuggaaacuccauacaagcccacuuugcaccacuaauacaaaggagggcucgaacaucugucugacccgaacggaucguggcugguacugcgacaaugccgggucuguguccuucuuuccccaagcugaaaccuguaagguuugcucaaacagaguguucugcgauacaaugaauaguuugacucuaccuagcgaggucaaccuguguaauguggacauuuuuaacccaaaauaugauugcaagaucaugaccuccaaaacagacguaucuagcucaguuauaacuagccucggagccauuguguccuguuacgguaagaccaaaugcacagcaagcaauaagaacaagggcaucaucaaaaccuucucuaaugggugugauuaugucucaaacaagggaguggacacugucagugugggcaauacgcuguacuauguuaacaaacaggaggguaagagccuuuacgugaaaggggaacccauuaucaacuuuuaugacccucugguauucccauccgaugaguuugacgcuucuauuucgcaggucaaugaaaagauaaaccaaaguuuggccuucaucaggaaguccgaugagcuccugcacaaugugaacgcgggaaaaucaacaaccaauauuaugaucacuaccaucauuauaguuaucauugugaucuuacugagucuaauugccgucggccuccugcuuuacugcaaggcacggugaggacuagucccuguucccagagcccacuuuuuuuucuuuuuuugaaauaaaauagccugucuuucagaucuaaaaaaaaaaaaaaaaaaaaaaaaaaaaaaaaaaaaaaaaaaaaaaaaaaaaaaaaaaaaaaaaugcaucccccccccccccccccccccccccccccccaaaggcucuuuucagagccaccagaauu

SEQ ID NO: 7296 - RNA, 1834 nt, Artificial Sequence
  mRNA product Design c-5 comprising derived and/or modified sequence from HRSV(A2)__F-del_DSCav1_mut7 (opt4)
gggagagcggcucggccauuuugucccagucaguccggaggcugcggcugcagaaguaccgccugcggaguaacugcaaagaagcuuaccauggagcugcugauccugaaggccaacgccaucaccaccauccugaccgccgugaccuucugcuucgccagcggccagaacaucaccgaggaguucuaccagagcaccugcagcgccgugagcaagggcuaccugagcgcccugagaaccggcugguacaccagcgugaucaccaucgagcugagcaacaucaaggagaacaagugcaacggcaccgacgccaaggugaagcugaucaagcaggagcuggacaaguacaagaacgccgugaccgagcugcagaugcugaugugcagcacccccgccaccggcagcggcagcgccaucgccagcggcguggccgugugcaaggugcugcaccuggagggcgaggugaacaagaucaagagcgcccugcugagcaccaacaaggccguggugagccugagcaacggcgugagcgugcugaccuucaaggugcuggaccugaagaacuacaucgacaagcagcugcugcccauccugaacaagcagagcugcagcaucagcaacaucgagaccgugauggaguuccagcagaagaacaacagacugcuggagaucaccagagaguucagcgugaacgccggcgugaccacccccgugagcaccuacaugcugaccaacagcgagcugcugagccugaucaacgacaugcccaucaccaacgaccagaagaagcugaugagcaacaacgugcagaucgugagacagcagagcuacagcaucaugugcaucaucaaggaggaggugcuggccuacguggugcagcugccccuguacggcgugaucgacacccccugcuggaagcugcacaccagcccccugugcaccaccaacaccaaggagggcagcaacaucugccugaccagaaccgacagaggcugguacugcgacaacgccggcagcgugagcuucuucccccaggccgagaccugcaaggugugcagcaacagaguguucugcgacaccaugaacagccugacccugcccagcgaggugaaccugugcaacguggacaucuucaaccccaaguacgacugcaagaucaugaccagcaagaccgacgugagcagcagcgugaucaccagccugggcgccaucgugagcugcuacggcaagaccaagugcaccgccagcaacaagaacaagggcaucaucaagaccuucagcaacggcugcgacuacgugagcaacaagggcguggacaccgugagcgugggcaacacccuguacuacgugaacaagcaggagggcaagagccuguacgugaagggcgagcccaucaucaacuucuacgacccccugguguuccccagcgacgaguucgacgccagcaucagccaggugaacgagaagaucaaccagagccuggccuucaucagaaagagcgacgagcugcugcacaacgugaacgccggcaagagcaccaccaacaucaugaucaccaccaucaucaucgugaucaucgugauccugcugagccugaucgccgugggccugcugcuguacugcaaggccagaugaggacuagucccuguucccagagcccacuuuuuuuucuuuuuuugaaauaaaauagccugucuuucagaucuaaaaaaaaaaaaaaaaaaaaaaaaaaaaaaaaaaaaaaaaaaaaaaaaaaaaaaaaaaaaaaaaugcaucccccccccccccccccccccccccccccccaaaggcucuuuucagagccaccagaauu

SEQ ID NO: 7297 - RNA, 1834 nt, Artificial Sequence
  mRNA product Design c-5 comprising derived and/or modified sequence from HRSV(A2)__F-del_DSCav1_mut7 (opt5)
gggagagcggcucggccauuuugucccagucaguccggaggcugcggcugcagaaguaccgccugcggaguaacugcaaagaagcuuaccauggagcugcucauccugaaggccaacgcuauuaccacaauccuuacggccgugaccuucugcuuugcgagcggccagaauauuacagaagaguucuaccaauccaccuguucugcugucagcaaaggguaucuguccgcccucagaacaggaugguacaccucuguuaucacaauugaacugagcaacaucaaggagaauaaaugcaacggcaccgacgccaaggugaaacuuaucaagcaggaacuggauaaguauaaaaaugcugugacggagcuccagaugcugauguguuccacccccgccacagggucuggaagcgcuauugccuccggcgucgcggugugcaagguucugcaccucgagggggaagugaacaaaaucaagagcgcccugcuuucuaccaauaaagcugucgugucccugagcaacggaguuucugugcucacauuuaagguccuggaccuuaagaauuacauugauaaacagcugcucccuauccugaacaagcaauccuguagcauuucuaauaucgagaccgugauggaguuccagcagaaaaacaaucggcugcucgaaauuacgcgcgaguuuuccgugaacgccggcgucacaaccccgguuagcacauauaugcugaccaauuccgaacuucugucucucaucaacgacaugcccaucaccaacgaucagaagaaacugaugagcaauaacgugcaaauugugagacagcaguccuacagcaucaugugcauuaucaaggaggaaguccuugcuuaugugguucagcugccucucuacggcgugauugacacacccuguuggaaacugcauacgucuccucugugcaccacaaauaccaaggagggguccaacaucugucucacacggaccgaucgcggaugguacugcgacaaugccggcagcgucucuuucuuuccccaagcggaaacguguaaggugugcagcaacagaguuuucugcgauacaaugaacucccugacccuuccuucugaggugaaucuguguaaugucgacaucuuuaacccgaaauaugauugcaagauuaugaccagcaaaacagacguguccagcucugucaucaccucccucggggccauugugagcuguuacggaaagacaaaaugcacggcuucuaauaagaacaagggcaucauuaaaaccuucuccaaugggugugauuauguuagcaacaagggaguggacacagucuccgugggcaauacccuguacuauguuaacaaacaggagggcaagucucuuuacgugaaaggggaacccaucaucaacuuuuaugacccucuggucuuccccagcgaugaguuugacgccuccauuucucaggugaaugaaaagaucaaccaaagccucgcuuucauucggaaguccgaugagcugcugcacaaugugaacgccggaaaaagcacaaccaauaucaugauuacgaccaucauuaucguuaucauugucauccuccugucucuuauugccgugggccugcuccuguacugcaaggcucgcugaggacuagucccuguucccagagcccacuuuuuuuucuuuuuuugaaauaaaauagccugucuuucagaucuaaaaaaaaaaaaaaaaaaaaaaaaaaaaaaaaaaaaaaaaaaaaaaaaaaaaaaaaaaaaaaaaugcaucccccccccccccccccccccccccccccccaaaggcucuuuucagagccaccagaauu

SEQ ID NO: 7298 - RNA, 1834 nt, Artificial Sequence
  mRNA product Design c-5 comprising derived and/or modified sequence from HRSV(A2)__F-del_DSCav1_mut7 (opt6)
gggagagcggcucggccauuuugucccagucaguccggaggcugcggcugcagaaguaccgccugcggaguaacugcaaagaagcuuaccauggaauuacuaauccucaaagcaaacgcaauuacaaccauacuaaccgcugucaccuuuuguuuugccucaggacaaaacauaacugaagaauuuuaccaaucaacaugcuccgcaguaucuaaaggauaccucagcgcguuaagaacaggaugguacacaucgguaauaaccaucgaauuauccaacauaaaagaaaauaaaugcaauggaacagacgcaaaagucaaauuaauuaaacaagaacuagacaaauauaaaaacgcaguaaccgaauuacaaaugcuaauguguucaacaccagcaacaggaucaggaucagcuauagcuucaggaguugccguaugcaaagugcuacacuuagaaggagaagugaauaaaauaaaaucagcucuauuaucaacgaacaaagccguaguaucucuaucaaauggcguaucaguacucacauucaaaguacucgaccuaaaaaacuauauagauaaacaacuauuacccauccuaaauaaacaaagcugcucuauaucaaacaucgaaacaguaauggaauuucaacaaaaaaacaacagacuacuagaaauaacccgagaguucucaguuaaugcaggaguaacaacaccagucucaacauacaugcucacaaacucagaacuccuaucacuaauaaaugacaugccaauaacaaacgaccaaaaaaaacucaugucuaacaacguccaaauaguaagacaacaauccuacagcauaauguguauaauaaaagaagaaguuuuagcauacgucguacaacuacccuuauauggcguaauagauacaccaugcuggaaacuccauaccucaccucuauguacaacaaauaccaaagaagguucuaauauaugccuaacacgaacugaccgaggaugguacugugacaacgcaggaucagucucuuucuuuccacaagcagaaaccugcaaaguaugcaguaaccgcguauuuugcgacacaaugaacucccuaaccuuaccaucagaaguaaacuuauguaacguagacauauucaauccaaaauaugacugcaaaauaaugacaucaaaaacagacguaagcucaucaguaauaacuucacuaggcgcaauuguaucaugcuauggaaaaaccaaauguaccgcauccaacaaaaauaaaggaauaauaaaaaccuucucuaacggaugcgacuacguaucaaacaaagguguagauacaguuucuguaggaaacacacucuacuauguaaauaaacaagaaggaaaaucacuauacguaaaaggagaaccaauaauaaacuucuaugacccacuuguauuuccaucugaugaauuugaugcaagcauaucacaaguaaacgaaaaaauaaaccaaucucuagccuuuauacgaaaaagcgacgaauuacuacauaacgucaacgcuggaaaaucaacaacaaacauaaugauaacaacaauaauaauaguaauaauagucauccuauuaucacuaaucgccguaggacuacuccuauacugcaaagcuagauaaggacuagucccuguucccagagcccacuuuuuuuucuuuuuuugaaauaaaauagccugucuuucagaucuaaaaaaaaaaaaaaaaaaaaaaaaaaaaaaaaaaaaaaaaaaaaaaaaaaaaaaaaaaaaaaaaugcaucccccccccccccccccccccccccccccccaaaggcucuuuucagagccaccagaauu

SEQ ID NO: 7299 - RNA, 1834 nt, Artificial Sequence
  mRNA product Design c-5 comprising derived and/or modified sequence from HRSV(A2)__F-del_DSCav1_mut7 (opt11)
gggagagcggcucggccauuuugucccagucaguccggaggcugcggcugcagaaguaccgccugcggaguaacugcaaagaagcuuaccauggaacuccucauccucaaagccaacgccauaaccacuauccucacagcagucacuuucugcuucgccucaggacaaaacauaaccgaagaguucuaccaauccacaugcuccgccgucuccaaaggcuaccucucagcgcuccgcaccggcugguacacauccgucaucaccaucgaacuaagcaacauaaaagaaaacaaaugcaacggcaccgacgccaaaguuaaacucaucaagcaagaacucgacaaauacaaaaacgcagucacagaacuucaaaugcucaugugcuccacacccgccacagguucuggcucagcaaucgcaagcggcgucgccguaugcaaaguccuucaccucgaaggcgaagucaacaaaaucaaauccgcccuccucuccaccaauaaagcugucgucucacucuccaacggcgucagcguccucacauucaaaguccucgaccucaaaaacuacauagacaagcaacuccucccgauacucaacaaacaaagcugcucuaucuccaacaucgaaaccgucauggaguuccaacagaaaaacaaucgucuccucgaaaucacccgcgaguucucaguaaacgccggggucaccacaccagucuccaccuacaugcucaccaacuccgaacuccuuagccucauaaacgacaugcccauaaccaacgaccaaaagaaacucaugagcaacaacguacaaauaguccgacaacaauccuauuccaucauguguaucaucaaagaagaaguccucgcauacguaguccaacucccccuauacggcguaaucgacaccccauguuggaaacuccacaccucaccacucuguaccaccaacaccaaagaaggcucaaacaucugccucacccgcacagaccgcggcugguacugcgacaacgcgggcuccgucagcuucuuuccccaagcggaaaccugcaaagucugcagcaacagagucuucugcgacacuaugaacucccucacccuccccucagaagucaaccucugcaacgucgacaucuucaacccgaaauacgacugcaaaaucaugaccagcaaaacugacgucuccucguccgucaucaccucacucggcgcaaucgugagcugcuacggcaaaaccaaaugcaccgccuccaacaaaaacaaaggcaucauaaaaacauucagcaacggcugcgacuacgucucgaacaaaggagucgacaccguaucagugggcaacacccuauacuacguaaacaagcaagaaggcaaaucacucuacguaaaaggcgaacccaucaucaacuucuacgacccccucgucuuccccuccgacgaguucgacgccuccaucucucaagucaacgagaaaaucaaccaaucccuugccuucauacguaaaagcgacgaacuccuucacaacguaaacgccgggaaauccaccacuaacauaaugaucaccaccaucaucaucguuaucauagucauccuccucucucucauagcagucggccuacuccuguacugcaaagcgcgcuaaggacuagucccuguucccagagcccacuuuuuuuucuuuuuuugaaauaaaauagccugucuuucagaucuaaaaaaaaaaaaaaaaaaaaaaaaaaaaaaaaaaaaaaaaaaaaaaaaaaaaaaaaaaaaaaaaugcaucccccccccccccccccccccccccccccccaaaggcucuuuucagagccaccagaauu

SEQ ID NO: 7300 - RNA, 1843 nt, Artificial Sequence
  mRNA product Design d-1 comprising derived and/or modified sequence from HRSV(A2)__F-del_DSCav1_mut7 (opt1)
gggagacccgugacccggaaguuguacggcuacgcgacuuucccucccacaaacccucgcgcccuuccuuuccuacuugggcccggcagaaagcuuaccauggagcugcucauccugaaggccaacgccaucaccaccauccugacggcggugaccuucugcuucgccagcggccagaacaucaccgaggaguucuaccaguccacgugcagcgccgucuccaagggguaccucagcgcccugcggaccggcugguacaccuccgugaucaccaucgagcugagcaacaucaaggagaacaagugcaacgggaccgacgccaaggugaagcucaucaagcaggagcuggacaaguacaagaacgcggucacggagcugcagaugcugaugugcuccaccccggcaaccggcuccggcuccgccaucgcgagcggcgucgccgugugcaaggugcugcaccucgagggggaggucaacaagaucaagagcgcccugcuguccaccaacaaggccguggugagccucuccaacggcgucagcgugcugaccuucaaggugcuggaccucaagaacuacaucgacaagcagcugcugcccauccugaacaagcagagcugcuccaucagcaacaucgagacggugauggaguuccagcagaagaacaaccggcuccuggagaucacccgcgaguucagcgugaacgccggggucaccacccccguguccacguacaugcugaccaacagcgagcuccugucccugaucaacgacaugccgaucaccaacgaccagaagaagcucaugagcaacaacgugcagaucguccggcagcaguccuacagcaucaugugcaucaucaaggaggaggugcuggcguacgugguccagcugccccucuacggcgugaucgacacccccugcuggaagcugcacacgagcccccugugcaccaccaacaccaaggagggguccaacaucugccucacgcgcaccgaccggggcugguacugcgacaacgccggcagcgucuccuucuucccgcaggccgagaccugcaaggugugcagcaaccgcguguucugcgacaccaugaacucccugacgcugcccagcgagguaaaccucugcaacgucgacaucuucaaccccaaguacgacugcaagaucaugaccuccaagaccgacgugagcuccagcgugaucaccucccugggggccaucgucagcugcuacggcaagacgaagugcaccgccagcaacaagaacaaggggaucaucaagaccuucuccaacggcugcgacuacgugagcaacaagggcguggacaccguguccgucgggaacacccuguacuacgugaacaagcaggagggcaagagccucuacgugaagggggagcccaucaucaacuucuacgacccgcuggucuuccccuccgacgaguucgacgcgagcaucucccaggugaacgagaagaucaaccagagccuggccuucauccgcaaguccgacgagcugcuccacaacgugaacgccggcaagagcacgaccaacaucaugaucaccaccaucaucaucgucaucaucgugauccugcugucccucaucgccguggggcugcugcucuacugcaaggcccggugaggacuagucccuguucccagagcccacuuuuuuuucuuuuuuugaaauaaaauagccugucuuucagaucuaaaaaaaaaaaaaaaaaaaaaaaaaaaaaaaaaaaaaaaaaaaaaaaaaaaaaaaaaaaaaaaaugcaucccccccccccccccccccccccccccccccaaaggcucuuuucagagccaccagaauu

SEQ ID NO: 7301 - RNA, 1843 nt, Artificial Sequence
  mRNA product Design d-1 comprising derived and/or modified sequence from HRSV(A2)__F-del_DSCav1_mut7 (opt1)
gggagacccgugacccggaaguuguacggcuacgcgacuuucccucccacaaacccucgcgcccuuccuuuccuacuugggcccggcagaaagcuuaccauggagcugcucauccugaaggccaacgccaucaccaccauccugacggcggugaccuucugcuucgccagcggccagaacaucaccgaggaguucuaccaguccacgugcagcgccgucuccaagggguaccucagcgcccugcgcaccggcugguacaccuccgugaucaccaucgagcugagcaacaucaaggagaacaagugcaacgggaccgacgccaaggugaagcucaucaagcaggagcuggacaaguacaagaacgcggucacggagcugcagaugcucaugugcuccacccccgccaccggcagcggguccgccaucgccagcggcguggcggugugcaagguccugcaccuggagggcgaggugaacaagaucaaguccgcccuccugagcaccaacaaggccguggucucccugagcaacgggguguccgugcucacguucaagguccuggaccugaagaacuacaucgacaagcagcuccugccgauccugaacaagcagagcugcuccaucagcaacaucgagaccgugauggaguuccagcagaagaacaaccggcuccuggagaucacccgcgaguucuccgugaacgccggcgucaccacgcccgugagcaccuacaugcugaccaacagcgagcuccugucccugaucaacgacaugcccaucaccaacgaccagaagaagcucaugagcaacaacgugcagaucguccggcagcaguccuacagcaucaugugcaucaucaaggaggaggugcuggccuacgugguccagcugccccucuacggggugaucgacacgccgugcuggaagcugcacaccagcccccugugcaccaccaacacgaaggagggcagcaacaucugccucacccgcaccgaccgggggugguacugcgacaacgcgggcuccgugagcuucuucccccaggccgagaccugcaaggucugcuccaaccgcguguucugcgacacgaugaacagccugacccugcccuccgaggucaaccucugcaacguggacaucuucaacccgaaguacgacugcaagaucaugaccagcaagaccgacguguccagcuccgucaucacgagccugggcgccaucguguccugcuacgggaagaccaagugcaccgccagcaacaagaacaagggcaucaucaagaccuucuccaacgggugcgacuacgugagcaacaagggcgucgacacggugagcgugggcaacacccuguacuacgucaacaagcaggaggggaagucccucuacgugaagggcgagcccaucaucaacuucuacgacccccugguguuccccagcgacgaguucgacgccuccaucagccaggucaacgagaagaucaaccagucccuggcguucauccggaaguccgacgagcuccugcacaacgugaacgccgggaaguccaccaccaacaucaugaucaccacgaucaucaucgugaucaucgucauccugcucagccugaucgccgugggccugcuccuguacugcaaggcccgcugaggacuagucccuguucccagagcccacuuuuuuuucuuuuuuugaaauaaaauagccugucuuucagaucuaaaaaaaaaaaaaaaaaaaaaaaaaaaaaaaaaaaaaaaaaaaaaaaaaaaaaaaaaaaaaaaaugcaucccccccccccccccccccccccccccccccaaaggcucuuuucagagccaccagaauu

SEQ ID NO: 7302 - RNA, 1843 nt, Artificial Sequence
  mRNA product Design d-1 comprising derived and/or modified sequence from HRSV(A2)__F-del_DSCav1_mut7 (opt2)
gggagacccgugacccggaaguuguacggcuacgcgacuuucccucccacaaacccucgcgcccuuccuuuccuacuugggcccggcagaaagcuuaccauggagcuccucauccucaaggccaacgccaucaccaccauccucaccgccgucaccuucugcuucgccuccggccagaacaucaccgaggaguucuaccaguccaccugcuccgccgucuccaagggcuaccucuccgcccuccgcaccggcugguacaccuccgucaucaccaucgagcucuccaacaucaaggagaacaagugcaacggcaccgacgccaaggucaagcucaucaagcaggagcucgacaaguacaagaacgccgucaccgagcuccagaugcucaugugcuccacccccgccaccggcuccggcuccgccaucgccuccggcgucgccgucugcaagguccuccaccucgagggcgaggucaacaagaucaaguccgcccuccucuccaccaacaaggccgucgucucccucuccaacggcgucuccguccucaccuucaagguccucgaccucaagaacuacaucgacaagcagcuccuccccauccucaacaagcaguccugcuccaucuccaacaucgagaccgucauggaguuccagcagaagaacaaccgccuccucgagaucacccgcgaguucuccgucaacgccggcgucaccacccccgucuccaccuacaugcucaccaacuccgagcuccucucccucaucaacgacaugcccaucaccaacgaccagaagaagcucauguccaacaacguccagaucguccgccagcaguccuacuccaucaugugcaucaucaaggaggagguccucgccuacgucguccagcucccccucuacggcgucaucgacacccccugcuggaagcuccacaccuccccccucugcaccaccaacaccaaggagggcuccaacaucugccucacccgcaccgaccgcggcugguacugcgacaacgccggcuccgucuccuucuucccccaggccgagaccugcaaggucugcuccaaccgcgucuucugcgacaccaugaacucccucacccuccccuccgaggucaaccucugcaacgucgacaucuucaaccccaaguacgacugcaagaucaugaccuccaagaccgacgucuccuccuccgucaucaccucccucggcgccaucgucuccugcuacggcaagaccaagugcaccgccuccaacaagaacaagggcaucaucaagaccuucuccaacggcugcgacuacgucuccaacaagggcgucgacaccgucuccgucggcaacacccucuacuacgucaacaagcaggagggcaagucccucuacgucaagggcgagcccaucaucaacuucuacgacccccucgucuuccccuccgacgaguucgacgccuccaucucccaggucaacgagaagaucaaccagucccucgccuucauccgcaaguccgacgagcuccuccacaacgucaacgccggcaaguccaccaccaacaucaugaucaccaccaucaucaucgucaucaucgucauccuccucucccucaucgccgucggccuccuccucuacugcaaggcccgcugaggacuagucccuguucccagagcccacuuuuuuuucuuuuuuugaaauaaaauagccugucuuucagaucuaaaaaaaaaaaaaaaaaaaaaaaaaaaaaaaaaaaaaaaaaaaaaaaaaaaaaaaaaaaaaaaaugcaucccccccccccccccccccccccccccccccaaaggcucuuuucagagccaccagaauu

SEQ ID NO: 7303 - RNA, 1843 nt, Artificial Sequence
  mRNA product Design d-1 comprising derived and/or modified sequence from HRSV(A2)__F-del_DSCav1_mut7 (opt3)
gggagacccgugacccggaaguuguacggcuacgcgacuuucccucccacaaacccucgcgcccuuccuuuccuacuugggcccggcagaaagcuuaccauggagcugcucauccuuaaggccaacgcuauuaccacaauacugacugcagugacguucugcuuugccagcggccagaauaucaccgaagaguucuaccaauccacauguucugcggucucaaaaggguauuugagugcuuuaagaacuggaugguacaccagcguuauuacaaucgaacuguccaacauuaaggagaauaaaugcaacgguaccgacgccaaggugaaacuaaucaagcaggaacucgauaaguauaaaaaugcaguaacugagcugcagaugcuuauguguucuacacccgccaccggcucggggucagcuauagcaagcggaguggccgucugcaaggugcugcacuuggagggcgaaguuaacaaaaucaagagugcucuccuguccacgaauaaagccguggucucucugagcaacgguguguccguacucacuuuuaagguuuuagaccugaagaauuacauugauaaacagcuuuugccuauccugaacaagcaaucauguaguauuagcaauaucgagaccgugauggaguuccagcagaaaaacaauaggcuacucgaaauaacacgggaguuuucugucaacgcgggggugacuaccccaguguccacauauaugcugaccaauucagaacuucugagcuugauuaacgacaugccgaucacgaacgaucagaagaaacucaugaguaauaacguccaaauuguucgccagcagucuuacuccaucaugugcaucauuaaggaggaagugcuggcauauguagugcaguuaccccuguacggagucauagacacuccuuguuggaaacuccauacaagcccacuuugcaccacuaauacaaaggagggcucgaacaucugucugacccgaacggaucguggcugguacugcgacaaugccgggucuguguccuucuuuccccaagcugaaaccuguaagguuugcucaaacagaguguucugcgauacaaugaauaguuugacucuaccuagcgaggucaaccuguguaauguggacauuuuuaacccaaaauaugauugcaagaucaugaccuccaaaacagacguaucuagcucaguuauaacuagccucggagccauuguguccuguuacgguaagaccaaaugcacagcaagcaauaagaacaagggcaucaucaaaaccuucucuaaugggugugauuaugucucaaacaagggaguggacacugucagugugggcaauacgcuguacuauguuaacaaacaggaggguaagagccuuuacgugaaaggggaacccauuaucaacuuuuaugacccucugguauucccauccgaugaguuugacgcuucuauuucgcaggucaaugaaaagauaaaccaaaguuuggccuucaucaggaaguccgaugagcuccugcacaaugugaacgcgggaaaaucaacaaccaauauuaugaucacuaccaucauuauaguuaucauugugaucuuacugagucuaauugccgucggccuccugcuuuacugcaaggcacggugaggacuagucccuguucccagagcccacuuuuuuuucuuuuuuugaaauaaaauagccugucuuucagaucuaaaaaaaaaaaaaaaaaaaaaaaaaaaaaaaaaaaaaaaaaaaaaaaaaaaaaaaaaaaaaaaaugcaucccccccccccccccccccccccccccccccaaaggcucuuuucagagccaccagaauu

SEQ ID NO: 7304 - RNA, 1843 nt, Artificial Sequence
  mRNA product Design d-1 comprising derived and/or modified sequence from HRSV(A2)__F-del_DSCav1_mut7 (opt4)
gggagacccgugacccggaaguuguacggcuacgcgacuuucccucccacaaacccucgcgcccuuccuuuccuacuugggcccggcagaaagcuuaccauggagcugcugauccugaaggccaacgccaucaccaccauccugaccgccgugaccuucugcuucgccagcggccagaacaucaccgaggaguucuaccagagcaccugcagcgccgugagcaagggcuaccugagcgcccugagaaccggcugguacaccagcgugaucaccaucgagcugagcaacaucaaggagaacaagugcaacggcaccgacgccaaggugaagcugaucaagcaggagcuggacaaguacaagaacgccgugaccgagcugcagaugcugaugugcagcacccccgccaccggcagcggcagcgccaucgccagcggcguggccgugugcaaggugcugcaccuggagggcgaggugaacaagaucaagagcgcccugcugagcaccaacaaggccguggugagccugagcaacggcgugagcgugcugaccuucaaggugcuggaccugaagaacuacaucgacaagcagcugcugcccauccugaacaagcagagcugcagcaucagcaacaucgagaccgugauggaguuccagcagaagaacaacagacugcuggagaucaccagagaguucagcgugaacgccggcgugaccacccccgugagcaccuacaugcugaccaacagcgagcugcugagccugaucaacgacaugcccaucaccaacgaccagaagaagcugaugagcaacaacgugcagaucgugagacagcagagcuacagcaucaugugcaucaucaaggaggaggugcuggccuacguggugcagcugccccuguacggcgugaucgacacccccugcuggaagcugcacaccagcccccugugcaccaccaacaccaaggagggcagcaacaucugccugaccagaaccgacagaggcugguacugcgacaacgccggcagcgugagcuucuucccccaggccgagaccugcaaggugugcagcaacagaguguucugcgacaccaugaacagccugacccugcccagcgaggugaaccugugcaacguggacaucuucaaccccaaguacgacugcaagaucaugaccagcaagaccgacgugagcagcagcgugaucaccagccugggcgccaucgugagcugcuacggcaagaccaagugcaccgccagcaacaagaacaagggcaucaucaagaccuucagcaacggcugcgacuacgugagcaacaagggcguggacaccgugagcgugggcaacacccuguacuacgugaacaagcaggagggcaagagccuguacgugaagggcgagcccaucaucaacuucuacgacccccugguguuccccagcgacgaguucgacgccagcaucagccaggugaacgagaagaucaaccagagccuggccuucaucagaaagagcgacgagcugcugcacaacgugaacgccggcaagagcaccaccaacaucaugaucaccaccaucaucaucgugaucaucgugauccugcugagccugaucgccgugggccugcugcuguacugcaaggccagaugaggacuagucccuguucccagagcccacuuuuuuuucuuuuuuugaaauaaaauagccugucuuucagaucuaaaaaaaaaaaaaaaaaaaaaaaaaaaaaaaaaaaaaaaaaaaaaaaaaaaaaaaaaaaaaaaaugcaucccccccccccccccccccccccccccccccaaaggcucuuuucagagccaccagaauu

SEQ ID NO: 7305 - RNA, 1843 nt, Artificial Sequence
  mRNA product Design d-1 comprising derived and/or modified sequence from HRSV(A2)__F-del_DSCav1_mut7 (opt5)
gggagacccgugacccggaaguuguacggcuacgcgacuuucccucccacaaacccucgcgcccuuccuuuccuacuugggcccggcagaaagcuuaccauggagcugcucauccugaaggccaacgcuauuaccacaauccuuacggccgugaccuucugcuuugcgagcggccagaauauuacagaagaguucuaccaauccaccuguucugcugucagcaaaggguaucuguccgcccucagaacaggaugguacaccucuguuaucacaauugaacugagcaacaucaaggagaauaaaugcaacggcaccgacgccaaggugaaacuuaucaagcaggaacuggauaaguauaaaaaugcugugacggagcuccagaugcugauguguuccacccccgccacagggucuggaagcgcuauugccuccggcgucgcggugugcaagguucugcaccucgagggggaagugaacaaaaucaagagcgcccugcuuucuaccaauaaagcugucgugucccugagcaacggaguuucugugcucacauuuaagguccuggaccuuaagaauuacauugauaaacagcugcucccuauccugaacaagcaauccuguagcauuucuaauaucgagaccgugauggaguuccagcagaaaaacaaucggcugcucgaaauuacgcgcgaguuuuccgugaacgccggcgucacaaccccgguuagcacauauaugcugaccaauuccgaacuucugucucucaucaacgacaugcccaucaccaacgaucagaagaaacugaugagcaauaacgugcaaauugugagacagcaguccuacagcaucaugugcauuaucaaggaggaaguccuugcuuaugugguucagcugccucucuacggcgugauugacacacccuguuggaaacugcauacgucuccucugugcaccacaaauaccaaggagggguccaacaucugucucacacggaccgaucgcggaugguacugcgacaaugccggcagcgucucuuucuuuccccaagcggaaacguguaaggugugcagcaacagaguuuucugcgauacaaugaacucccugacccuuccuucugaggugaaucuguguaaugucgacaucuuuaacccgaaauaugauugcaagauuaugaccagcaaaacagacguguccagcucugucaucaccucccucggggccauugugagcuguuacggaaagacaaaaugcacggcuucuaauaagaacaagggcaucauuaaaaccuucuccaaugggugugauuauguuagcaacaagggaguggacacagucuccgugggcaauacccuguacuauguuaacaaacaggagggcaagucucuuuacgugaaaggggaacccaucaucaacuuuuaugacccucuggucuuccccagcgaugaguuugacgccuccauuucucaggugaaugaaaagaucaaccaaagccucgcuuucauucggaaguccgaugagcugcugcacaaugugaacgccggaaaaagcacaaccaauaucaugauuacgaccaucauuaucguuaucauugucauccuccugucucuuauugccgugggccugcuccuguacugcaaggcucgcugaggacuagucccuguucccagagcccacuuuuuuuucuuuuuuugaaauaaaauagccugucuuucagaucuaaaaaaaaaaaaaaaaaaaaaaaaaaaaaaaaaaaaaaaaaaaaaaaaaaaaaaaaaaaaaaaaugcaucccccccccccccccccccccccccccccccaaaggcucuuuucagagccaccagaauu

SEQ ID NO: 7306 - RNA, 1843 nt, Artificial Sequence
  mRNA product Design d-1 comprising derived and/or modified sequence from HRSV(A2)__F-del_DSCav1_mut7 (opt6)
gggagacccgugacccggaaguuguacggcuacgcgacuuucccucccacaaacccucgcgcccuuccuuuccuacuugggcccggcagaaagcuuaccauggaauuacuaauccucaaagcaaacgcaauuacaaccauacuaaccgcugucaccuuuuguuuugccucaggacaaaacauaacugaagaauuuuaccaaucaacaugcuccgcaguaucuaaaggauaccucagcgcguuaagaacaggaugguacacaucgguaauaaccaucgaauuauccaacauaaaagaaaauaaaugcaauggaacagacgcaaaagucaaauuaauuaaacaagaacuagacaaauauaaaaacgcaguaaccgaauuacaaaugcuaauguguucaacaccagcaacaggaucaggaucagcuauagcuucaggaguugccguaugcaaagugcuacacuuagaaggagaagugaauaaaauaaaaucagcucuauuaucaacgaacaaagccguaguaucucuaucaaauggcguaucaguacucacauucaaaguacucgaccuaaaaaacuauauagauaaacaacuauuacccauccuaaauaaacaaagcugcucuauaucaaacaucgaaacaguaauggaauuucaacaaaaaaacaacagacuacuagaaauaacccgagaguucucaguuaaugcaggaguaacaacaccagucucaacauacaugcucacaaacucagaacuccuaucacuaauaaaugacaugccaauaacaaacgaccaaaaaaaacucaugucuaacaacguccaaauaguaagacaacaauccuacagcauaauguguauaauaaaagaagaaguuuuagcauacgucguacaacuacccuuauauggcguaauagauacaccaugcuggaaacuccauaccucaccucuauguacaacaaauaccaaagaagguucuaauauaugccuaacacgaacugaccgaggaugguacugugacaacgcaggaucagucucuuucuuuccacaagcagaaaccugcaaaguaugcaguaaccgcguauuuugcgacacaaugaacucccuaaccuuaccaucagaaguaaacuuauguaacguagacauauucaauccaaaauaugacugcaaaauaaugacaucaaaaacagacguaagcucaucaguaauaacuucacuaggcgcaauuguaucaugcuauggaaaaaccaaauguaccgcauccaacaaaaauaaaggaauaauaaaaaccuucucuaacggaugcgacuacguaucaaacaaagguguagauacaguuucuguaggaaacacacucuacuauguaaauaaacaagaaggaaaaucacuauacguaaaaggagaaccaauaauaaacuucuaugacccacuuguauuuccaucugaugaauuugaugcaagcauaucacaaguaaacgaaaaaauaaaccaaucucuagccuuuauacgaaaaagcgacgaauuacuacauaacgucaacgcuggaaaaucaacaacaaacauaaugauaacaacaauaauaauaguaauaauagucauccuauuaucacuaaucgccguaggacuacuccuauacugcaaagcuagauaaggacuagucccuguucccagagcccacuuuuuuuucuuuuuuugaaauaaaauagccugucuuucagaucuaaaaaaaaaaaaaaaaaaaaaaaaaaaaaaaaaaaaaaaaaaaaaaaaaaaaaaaaaaaaaaaaugcaucccccccccccccccccccccccccccccccaaaggcucuuuucagagccaccagaauu

SEQ ID NO: 7307 - RNA, 1843 nt, Artificial Sequence
  mRNA product Design d-1 comprising derived and/or modified sequence from HRSV(A2)__F-del_DSCav1_mut7 (opt11)
gggagacccgugacccggaaguuguacggcuacgcgacuuucccucccacaaacccucgcgcccuuccuuuccuacuugggcccggcagaaagcuuaccauggaacuccucauccucaaagccaacgccauaaccacuauccucacagcagucacuuucugcuucgccucaggacaaaacauaaccgaagaguucuaccaauccacaugcuccgccgucuccaaaggcuaccucucagcgcuccgcaccggcugguacacauccgucaucaccaucgaacuaagcaacauaaaagaaaacaaaugcaacggcaccgacgccaaaguuaaacucaucaagcaagaacucgacaaauacaaaaacgcagucacagaacuucaaaugcucaugugcuccacacccgccacagguucuggcucagcaaucgcaagcggcgucgccguaugcaaaguccuucaccucgaaggcgaagucaacaaaaucaaauccgcccuccucuccaccaauaaagcugucgucucacucuccaacggcgucagcguccucacauucaaaguccucgaccucaaaaacuacauagacaagcaacuccucccgauacucaacaaacaaagcugcucuaucuccaacaucgaaaccgucauggaguuccaacagaaaaacaaucgucuccucgaaaucacccgcgaguucucaguaaacgccggggucaccacaccagucuccaccuacaugcucaccaacuccgaacuccuuagccucauaaacgacaugcccauaaccaacgaccaaaagaaacucaugagcaacaacguacaaauaguccgacaacaauccuauuccaucauguguaucaucaaagaagaaguccucgcauacguaguccaacucccccuauacggcguaaucgacaccccauguuggaaacuccacaccucaccacucuguaccaccaacaccaaagaaggcucaaacaucugccucacccgcacagaccgcggcugguacugcgacaacgcgggcuccgucagcuucuuuccccaagcggaaaccugcaaagucugcagcaacagagucuucugcgacacuaugaacucccucacccuccccucagaagucaaccucugcaacgucgacaucuucaacccgaaauacgacugcaaaaucaugaccagcaaaacugacgucuccucguccgucaucaccucacucggcgcaaucgugagcugcuacggcaaaaccaaaugcaccgccuccaacaaaaacaaaggcaucauaaaaacauucagcaacggcugcgacuacgucucgaacaaaggagucgacaccguaucagugggcaacacccuauacuacguaaacaagcaagaaggcaaaucacucuacguaaaaggcgaacccaucaucaacuucuacgacccccucgucuuccccuccgacgaguucgacgccuccaucucucaagucaacgagaaaaucaaccaaucccuugccuucauacguaaaagcgacgaacuccuucacaacguaaacgccgggaaauccaccacuaacauaaugaucaccaccaucaucaucguuaucauagucauccuccucucucucauagcagucggccuacuccuguacugcaaagcgcgcuaaggacuagucccuguucccagagcccacuuuuuuuucuuuuuuugaaauaaaauagccugucuuucagaucuaaaaaaaaaaaaaaaaaaaaaaaaaaaaaaaaaaaaaaaaaaaaaaaaaaaaaaaaaaaaaaaaugcaucccccccccccccccccccccccccccccccaaaggcucuuuucagagccaccagaauu

SEQ ID NO: 7308 - RNA, 1898 nt, Artificial Sequence
  mRNA product Design d-2 comprising derived and/or modified sequence from HRSV(A2)__F-del_DSCav1_mut7 (opt1)
gggagagcggcucggccauuuugucccagucaguccggaggcugcggcugcagaaguaccgccugcggaguaacugcaaagaagcuuaccauggagcugcucauccugaaggccaacgccaucaccaccauccugacggcggugaccuucugcuucgccagcggccagaacaucaccgaggaguucuaccaguccacgugcagcgccgucuccaagggguaccucagcgcccugcggaccggcugguacaccuccgugaucaccaucgagcugagcaacaucaaggagaacaagugcaacgggaccgacgccaaggugaagcucaucaagcaggagcuggacaaguacaagaacgcggucacggagcugcagaugcugaugugcuccaccccggcaaccggcuccggcuccgccaucgcgagcggcgucgccgugugcaaggugcugcaccucgagggggaggucaacaagaucaagagcgcccugcuguccaccaacaaggccguggugagccucuccaacggcgucagcgugcugaccuucaaggugcuggaccucaagaacuacaucgacaagcagcugcugcccauccugaacaagcagagcugcuccaucagcaacaucgagacggugauggaguuccagcagaagaacaaccggcuccuggagaucacccgcgaguucagcgugaacgccggggucaccacccccguguccacguacaugcugaccaacagcgagcuccugucccugaucaacgacaugccgaucaccaacgaccagaagaagcucaugagcaacaacgugcagaucguccggcagcaguccuacagcaucaugugcaucaucaaggaggaggugcuggcguacgugguccagcugccccucuacggcgugaucgacacccccugcuggaagcugcacacgagcccccugugcaccaccaacaccaaggagggguccaacaucugccucacgcgcaccgaccggggcugguacugcgacaacgccggcagcgucuccuucuucccgcaggccgagaccugcaaggugugcagcaaccgcguguucugcgacaccaugaacucccugacgcugcccagcgagguaaaccucugcaacgucgacaucuucaaccccaaguacgacugcaagaucaugaccuccaagaccgacgugagcuccagcgugaucaccucccugggggccaucgucagcugcuacggcaagacgaagugcaccgccagcaacaagaacaaggggaucaucaagaccuucuccaacggcugcgacuacgugagcaacaagggcguggacaccguguccgucgggaacacccuguacuacgugaacaagcaggagggcaagagccucuacgugaagggggagcccaucaucaacuucuacgacccgcuggucuuccccuccgacgaguucgacgcgagcaucucccaggugaacgagaagaucaaccagagccuggccuucauccgcaaguccgacgagcugcuccacaacgugaacgccggcaagagcacgaccaacaucaugaucaccaccaucaucaucgucaucaucgugauccugcugucccucaucgccguggggcugcugcucuacugcaaggcccggugaggacuaguaauaaggaaacuguaugaaugucugugggcaggaagugaagagauccuucuguaaagguuuuuggaauuaugucugcugaauaauaaacuuuuuugaaauaauaaaucugguagaaaaaugagaucuaaaaaaaaaaaaaaaaaaaaaaaaaaaaaaaaaaaaaaaaaaaaaaaaaaaaaaaaaaaaaaaaugcaucccccccccccccccccccccccccccccccaaaggcucuuuucagagccaccagaauu

SEQ ID NO: 7309 - RNA, 1898 nt, Artificial Sequence
  mRNA product Design d-2 comprising derived and/or modified sequence from HRSV(A2)__F-del_DSCav1_mut7 (opt1)
gggagagcggcucggccauuuugucccagucaguccggaggcugcggcugcagaaguaccgccugcggaguaacugcaaagaagcuuaccauggagcugcucauccugaaggccaacgccaucaccaccauccugacggcggugaccuucugcuucgccagcggccagaacaucaccgaggaguucuaccaguccacgugcagcgccgucuccaagggguaccucagcgcccugcgcaccggcugguacaccuccgugaucaccaucgagcugagcaacaucaaggagaacaagugcaacgggaccgacgccaaggugaagcucaucaagcaggagcuggacaaguacaagaacgcggucacggagcugcagaugcucaugugcuccacccccgccaccggcagcggguccgccaucgccagcggcguggcggugugcaagguccugcaccuggagggcgaggugaacaagaucaaguccgcccuccugagcaccaacaaggccguggucucccugagcaacgggguguccgugcucacguucaagguccuggaccugaagaacuacaucgacaagcagcuccugccgauccugaacaagcagagcugcuccaucagcaacaucgagaccgugauggaguuccagcagaagaacaaccggcuccuggagaucacccgcgaguucuccgugaacgccggcgucaccacgcccgugagcaccuacaugcugaccaacagcgagcuccugucccugaucaacgacaugcccaucaccaacgaccagaagaagcucaugagcaacaacgugcagaucguccggcagcaguccuacagcaucaugugcaucaucaaggaggaggugcuggccuacgugguccagcugccccucuacggggugaucgacacgccgugcuggaagcugcacaccagcccccugugcaccaccaacacgaaggagggcagcaacaucugccucacccgcaccgaccgggggugguacugcgacaacgcgggcuccgugagcuucuucccccaggccgagaccugcaaggucugcuccaaccgcguguucugcgacacgaugaacagccugacccugcccuccgaggucaaccucugcaacguggacaucuucaacccgaaguacgacugcaagaucaugaccagcaagaccgacguguccagcuccgucaucacgagccugggcgccaucguguccugcuacgggaagaccaagugcaccgccagcaacaagaacaagggcaucaucaagaccuucuccaacgggugcgacuacgugagcaacaagggcgucgacacggugagcgugggcaacacccuguacuacgucaacaagcaggaggggaagucccucuacgugaagggcgagcccaucaucaacuucuacgacccccugguguuccccagcgacgaguucgacgccuccaucagccaggucaacgagaagaucaaccagucccuggcguucauccggaaguccgacgagcuccugcacaacgugaacgccgggaaguccaccaccaacaucaugaucaccacgaucaucaucgugaucaucgucauccugcucagccugaucgccgugggccugcuccuguacugcaaggcccgcugaggacuaguaauaaggaaacuguaugaaugucugugggcaggaagugaagagauccuucuguaaagguuuuuggaauuaugucugcugaauaauaaacuuuuuugaaauaauaaaucugguagaaaaaugagaucuaaaaaaaaaaaaaaaaaaaaaaaaaaaaaaaaaaaaaaaaaaaaaaaaaaaaaaaaaaaaaaaaugcaucccccccccccccccccccccccccccccccaaaggcucuuuucagagccaccagaauu

SEQ ID NO: 7310 - RNA, 1898 nt, Artificial Sequence
  mRNA product Design d-2 comprising derived and/or modified sequence from HRSV(A2)__F-del_DSCav1_mut7 (opt2)
gggagagcggcucggccauuuugucccagucaguccggaggcugcggcugcagaaguaccgccugcggaguaacugcaaagaagcuuaccauggagcuccucauccucaaggccaacgccaucaccaccauccucaccgccgucaccuucugcuucgccuccggccagaacaucaccgaggaguucuaccaguccaccugcuccgccgucuccaagggcuaccucuccgcccuccgcaccggcugguacaccuccgucaucaccaucgagcucuccaacaucaaggagaacaagugcaacggcaccgacgccaaggucaagcucaucaagcaggagcucgacaaguacaagaacgccgucaccgagcuccagaugcucaugugcuccacccccgccaccggcuccggcuccgccaucgccuccggcgucgccgucugcaagguccuccaccucgagggcgaggucaacaagaucaaguccgcccuccucuccaccaacaaggccgucgucucccucuccaacggcgucuccguccucaccuucaagguccucgaccucaagaacuacaucgacaagcagcuccuccccauccucaacaagcaguccugcuccaucuccaacaucgagaccgucauggaguuccagcagaagaacaaccgccuccucgagaucacccgcgaguucuccgucaacgccggcgucaccacccccgucuccaccuacaugcucaccaacuccgagcuccucucccucaucaacgacaugcccaucaccaacgaccagaagaagcucauguccaacaacguccagaucguccgccagcaguccuacuccaucaugugcaucaucaaggaggagguccucgccuacgucguccagcucccccucuacggcgucaucgacacccccugcuggaagcuccacaccuccccccucugcaccaccaacaccaaggagggcuccaacaucugccucacccgcaccgaccgcggcugguacugcgacaacgccggcuccgucuccuucuucccccaggccgagaccugcaaggucugcuccaaccgcgucuucugcgacaccaugaacucccucacccuccccuccgaggucaaccucugcaacgucgacaucuucaaccccaaguacgacugcaagaucaugaccuccaagaccgacgucuccuccuccgucaucaccucccucggcgccaucgucuccugcuacggcaagaccaagugcaccgccuccaacaagaacaagggcaucaucaagaccuucuccaacggcugcgacuacgucuccaacaagggcgucgacaccgucuccgucggcaacacccucuacuacgucaacaagcaggagggcaagucccucuacgucaagggcgagcccaucaucaacuucuacgacccccucgucuuccccuccgacgaguucgacgccuccaucucccaggucaacgagaagaucaaccagucccucgccuucauccgcaaguccgacgagcuccuccacaacgucaacgccggcaaguccaccaccaacaucaugaucaccaccaucaucaucgucaucaucgucauccuccucucccucaucgccgucggccuccuccucuacugcaaggcccgcugaggacuaguaauaaggaaacuguaugaaugucugugggcaggaagugaagagauccuucuguaaagguuuuuggaauuaugucugcugaauaauaaacuuuuuugaaauaauaaaucugguagaaaaaugagaucuaaaaaaaaaaaaaaaaaaaaaaaaaaaaaaaaaaaaaaaaaaaaaaaaaaaaaaaaaaaaaaaaugcaucccccccccccccccccccccccccccccccaaaggcucuuuucagagccaccagaauu

SEQ ID NO: 7311 - RNA, 1898 nt, Artificial Sequence
  mRNA product Design d-2 comprising derived and/or modified sequence from HRSV(A2)__F-del_DSCav1_mut7 (opt3)
gggagagcggcucggccauuuugucccagucaguccggaggcugcggcugcagaaguaccgccugcggaguaacugcaaagaagcuuaccauggagcugcucauccuuaaggccaacgcuauuaccacaauacugacugcagugacguucugcuuugccagcggccagaauaucaccgaagaguucuaccaauccacauguucugcggucucaaaaggguauuugagugcuuuaagaacuggaugguacaccagcguuauuacaaucgaacuguccaacauuaaggagaauaaaugcaacgguaccgacgccaaggugaaacuaaucaagcaggaacucgauaaguauaaaaaugcaguaacugagcugcagaugcuuauguguucuacacccgccaccggcucggggucagcuauagcaagcggaguggccgucugcaaggugcugcacuuggagggcgaaguuaacaaaaucaagagugcucuccuguccacgaauaaagccguggucucucugagcaacgguguguccguacucacuuuuaagguuuuagaccugaagaauuacauugauaaacagcuuuugccuauccugaacaagcaaucauguaguauuagcaauaucgagaccgugauggaguuccagcagaaaaacaauaggcuacucgaaauaacacgggaguuuucugucaacgcgggggugacuaccccaguguccacauauaugcugaccaauucagaacuucugagcuugauuaacgacaugccgaucacgaacgaucagaagaaacucaugaguaauaacguccaaauuguucgccagcagucuuacuccaucaugugcaucauuaaggaggaagugcuggcauauguagugcaguuaccccuguacggagucauagacacuccuuguuggaaacuccauacaagcccacuuugcaccacuaauacaaaggagggcucgaacaucugucugacccgaacggaucguggcugguacugcgacaaugccgggucuguguccuucuuuccccaagcugaaaccuguaagguuugcucaaacagaguguucugcgauacaaugaauaguuugacucuaccuagcgaggucaaccuguguaauguggacauuuuuaacccaaaauaugauugcaagaucaugaccuccaaaacagacguaucuagcucaguuauaacuagccucggagccauuguguccuguuacgguaagaccaaaugcacagcaagcaauaagaacaagggcaucaucaaaaccuucucuaaugggugugauuaugucucaaacaagggaguggacacugucagugugggcaauacgcuguacuauguuaacaaacaggaggguaagagccuuuacgugaaaggggaacccauuaucaacuuuuaugacccucugguauucccauccgaugaguuugacgcuucuauuucgcaggucaaugaaaagauaaaccaaaguuuggccuucaucaggaaguccgaugagcuccugcacaaugugaacgcgggaaaaucaacaaccaauauuaugaucacuaccaucauuauaguuaucauugugaucuuacugagucuaauugccgucggccuccugcuuuacugcaaggcacggugaggacuaguaauaaggaaacuguaugaaugucugugggcaggaagugaagagauccuucuguaaagguuuuuggaauuaugucugcugaauaauaaacuuuuuugaaauaauaaaucugguagaaaaaugagaucuaaaaaaaaaaaaaaaaaaaaaaaaaaaaaaaaaaaaaaaaaaaaaaaaaaaaaaaaaaaaaaaaugcaucccccccccccccccccccccccccccccccaaaggcucuuuucagagccaccagaauu

SEQ ID NO: 7312 - RNA, 1898 nt, Artificial Sequence
  mRNA product Design d-2 comprising derived and/or modified sequence from HRSV(A2)__F-del_DSCav1_mut7 (opt4)
gggagagcggcucggccauuuugucccagucaguccggaggcugcggcugcagaaguaccgccugcggaguaacugcaaagaagcuuaccauggagcugcugauccugaaggccaacgccaucaccaccauccugaccgccgugaccuucugcuucgccagcggccagaacaucaccgaggaguucuaccagagcaccugcagcgccgugagcaagggcuaccugagcgcccugagaaccggcugguacaccagcgugaucaccaucgagcugagcaacaucaaggagaacaagugcaacggcaccgacgccaaggugaagcugaucaagcaggagcuggacaaguacaagaacgccgugaccgagcugcagaugcugaugugcagcacccccgccaccggcagcggcagcgccaucgccagcggcguggccgugugcaaggugcugcaccuggagggcgaggugaacaagaucaagagcgcccugcugagcaccaacaaggccguggugagccugagcaacggcgugagcgugcugaccuucaaggugcuggaccugaagaacuacaucgacaagcagcugcugcccauccugaacaagcagagcugcagcaucagcaacaucgagaccgugauggaguuccagcagaagaacaacagacugcuggagaucaccagagaguucagcgugaacgccggcgugaccacccccgugagcaccuacaugcugaccaacagcgagcugcugagccugaucaacgacaugcccaucaccaacgaccagaagaagcugaugagcaacaacgugcagaucgugagacagcagagcuacagcaucaugugcaucaucaaggaggaggugcuggccuacguggugcagcugccccuguacggcgugaucgacacccccugcuggaagcugcacaccagcccccugugcaccaccaacaccaaggagggcagcaacaucugccugaccagaaccgacagaggcugguacugcgacaacgccggcagcgugagcuucuucccccaggccgagaccugcaaggugugcagcaacagaguguucugcgacaccaugaacagccugacccugcccagcgaggugaaccugugcaacguggacaucuucaaccccaaguacgacugcaagaucaugaccagcaagaccgacgugagcagcagcgugaucaccagccugggcgccaucgugagcugcuacggcaagaccaagugcaccgccagcaacaagaacaagggcaucaucaagaccuucagcaacggcugcgacuacgugagcaacaagggcguggacaccgugagcgugggcaacacccuguacuacgugaacaagcaggagggcaagagccuguacgugaagggcgagcccaucaucaacuucuacgacccccugguguuccccagcgacgaguucgacgccagcaucagccaggugaacgagaagaucaaccagagccuggccuucaucagaaagagcgacgagcugcugcacaacgugaacgccggcaagagcaccaccaacaucaugaucaccaccaucaucaucgugaucaucgugauccugcugagccugaucgccgugggccugcugcuguacugcaaggccagaugaggacuaguaauaaggaaacuguaugaaugucugugggcaggaagugaagagauccuucuguaaagguuuuuggaauuaugucugcugaauaauaaacuuuuuugaaauaauaaaucugguagaaaaaugagaucuaaaaaaaaaaaaaaaaaaaaaaaaaaaaaaaaaaaaaaaaaaaaaaaaaaaaaaaaaaaaaaaaugcaucccccccccccccccccccccccccccccccaaaggcucuuuucagagccaccagaauu

SEQ ID NO: 7313 - RNA, 1898 nt, Artificial Sequence
  mRNA product Design d-2 comprising derived and/or modified sequence from HRSV(A2)__F-del_DSCav1_mut7 (opt5)
gggagagcggcucggccauuuugucccagucaguccggaggcugcggcugcagaaguaccgccugcggaguaacugcaaagaagcuuaccauggagcugcucauccugaaggccaacgcuauuaccacaauccuuacggccgugaccuucugcuuugcgagcggccagaauauuacagaagaguucuaccaauccaccuguucugcugucagcaaaggguaucuguccgcccucagaacaggaugguacaccucuguuaucacaauugaacugagcaacaucaaggagaauaaaugcaacggcaccgacgccaaggugaaacuuaucaagcaggaacuggauaaguauaaaaaugcugugacggagcuccagaugcugauguguuccacccccgccacagggucuggaagcgcuauugccuccggcgucgcggugugcaagguucugcaccucgagggggaagugaacaaaaucaagagcgcccugcuuucuaccaauaaagcugucgugucccugagcaacggaguuucugugcucacauuuaagguccuggaccuuaagaauuacauugauaaacagcugcucccuauccugaacaagcaauccuguagcauuucuaauaucgagaccgugauggaguuccagcagaaaaacaaucggcugcucgaaauuacgcgcgaguuuuccgugaacgccggcgucacaaccccgguuagcacauauaugcugaccaauuccgaacuucugucucucaucaacgacaugcccaucaccaacgaucagaagaaacugaugagcaauaacgugcaaauugugagacagcaguccuacagcaucaugugcauuaucaaggaggaaguccuugcuuaugugguucagcugccucucuacggcgugauugacacacccuguuggaaacugcauacgucuccucugugcaccacaaauaccaaggagggguccaacaucugucucacacggaccgaucgcggaugguacugcgacaaugccggcagcgucucuuucuuuccccaagcggaaacguguaaggugugcagcaacagaguuuucugcgauacaaugaacucccugacccuuccuucugaggugaaucuguguaaugucgacaucuuuaacccgaaauaugauugcaagauuaugaccagcaaaacagacguguccagcucugucaucaccucccucggggccauugugagcuguuacggaaagacaaaaugcacggcuucuaauaagaacaagggcaucauuaaaaccuucuccaaugggugugauuauguuagcaacaagggaguggacacagucuccgugggcaauacccuguacuauguuaacaaacaggagggcaagucucuuuacgugaaaggggaacccaucaucaacuuuuaugacccucuggucuuccccagcgaugaguuugacgccuccauuucucaggugaaugaaaagaucaaccaaagccucgcuuucauucggaaguccgaugagcugcugcacaaugugaacgccggaaaaagcacaaccaauaucaugauuacgaccaucauuaucguuaucauugucauccuccugucucuuauugccgugggccugcuccuguacugcaaggcucgcugaggacuaguaauaaggaaacuguaugaaugucugugggcaggaagugaagagauccuucuguaaagguuuuuggaauuaugucugcugaauaauaaacuuuuuugaaauaauaaaucugguagaaaaaugagaucuaaaaaaaaaaaaaaaaaaaaaaaaaaaaaaaaaaaaaaaaaaaaaaaaaaaaaaaaaaaaaaaaugcaucccccccccccccccccccccccccccccccaaaggcucuuuucagagccaccagaauu

SEQ ID NO: 7314 - RNA, 1898 nt, Artificial Sequence
  mRNA product Design d-2 comprising derived and/or modified sequence from HRSV(A2)__F-del_DSCav1_mut7 (opt6)
gggagagcggcucggccauuuugucccagucaguccggaggcugcggcugcagaaguaccgccugcggaguaacugcaaagaagcuuaccauggaauuacuaauccucaaagcaaacgcaauuacaaccauacuaaccgcugucaccuuuuguuuugccucaggacaaaacauaacugaagaauuuuaccaaucaacaugcuccgcaguaucuaaaggauaccucagcgcguuaagaacaggaugguacacaucgguaauaaccaucgaauuauccaacauaaaagaaaauaaaugcaauggaacagacgcaaaagucaaauuaauuaaacaagaacuagacaaauauaaaaacgcaguaaccgaauuacaaaugcuaauguguucaacaccagcaacaggaucaggaucagcuauagcuucaggaguugccguaugcaaagugcuacacuuagaaggagaagugaauaaaauaaaaucagcucuauuaucaacgaacaaagccguaguaucucuaucaaauggcguaucaguacucacauucaaaguacucgaccuaaaaaacuauauagauaaacaacuauuacccauccuaaauaaacaaagcugcucuauaucaaacaucgaaacaguaauggaauuucaacaaaaaaacaacagacuacuagaaauaacccgagaguucucaguuaaugcaggaguaacaacaccagucucaacauacaugcucacaaacucagaacuccuaucacuaauaaaugacaugccaauaacaaacgaccaaaaaaaacucaugucuaacaacguccaaauaguaagacaacaauccuacagcauaauguguauaauaaaagaagaaguuuuagcauacgucguacaacuacccuuauauggcguaauagauacaccaugcuggaaacuccauaccucaccucuauguacaacaaauaccaaagaagguucuaauauaugccuaacacgaacugaccgaggaugguacugugacaacgcaggaucagucucuuucuuuccacaagcagaaaccugcaaaguaugcaguaaccgcguauuuugcgacacaaugaacucccuaaccuuaccaucagaaguaaacuuauguaacguagacauauucaauccaaaauaugacugcaaaauaaugacaucaaaaacagacguaagcucaucaguaauaacuucacuaggcgcaauuguaucaugcuauggaaaaaccaaauguaccgcauccaacaaaaauaaaggaauaauaaaaaccuucucuaacggaugcgacuacguaucaaacaaagguguagauacaguuucuguaggaaacacacucuacuauguaaauaaacaagaaggaaaaucacuauacguaaaaggagaaccaauaauaaacuucuaugacccacuuguauuuccaucugaugaauuugaugcaagcauaucacaaguaaacgaaaaaauaaaccaaucucuagccuuuauacgaaaaagcgacgaauuacuacauaacgucaacgcuggaaaaucaacaacaaacauaaugauaacaacaauaauaauaguaauaauagucauccuauuaucacuaaucgccguaggacuacuccuauacugcaaagcuagauaaggacuaguaauaaggaaacuguaugaaugucugugggcaggaagugaagagauccuucuguaaagguuuuuggaauuaugucugcugaauaauaaacuuuuuugaaauaauaaaucugguagaaaaaugagaucuaaaaaaaaaaaaaaaaaaaaaaaaaaaaaaaaaaaaaaaaaaaaaaaaaaaaaaaaaaaaaaaaugcaucccccccccccccccccccccccccccccccaaaggcucuuuucagagccaccagaauu

SEQ ID NO: 7315 - RNA, 1898 nt, Artificial Sequence
  mRNA product Design d-2 comprising derived and/or modified sequence from HRSV(A2)__F-del_DSCav1_mut7 (opt11)
gggagagcggcucggccauuuugucccagucaguccggaggcugcggcugcagaaguaccgccugcggaguaacugcaaagaagcuuaccauggaacuccucauccucaaagccaacgccauaaccacuauccucacagcagucacuuucugcuucgccucaggacaaaacauaaccgaagaguucuaccaauccacaugcuccgccgucuccaaaggcuaccucucagcgcuccgcaccggcugguacacauccgucaucaccaucgaacuaagcaacauaaaagaaaacaaaugcaacggcaccgacgccaaaguuaaacucaucaagcaagaacucgacaaauacaaaaacgcagucacagaacuucaaaugcucaugugcuccacacccgccacagguucuggcucagcaaucgcaagcggcgucgccguaugcaaaguccuucaccucgaaggcgaagucaacaaaaucaaauccgcccuccucuccaccaauaaagcugucgucucacucuccaacggcgucagcguccucacauucaaaguccucgaccucaaaaacuacauagacaagcaacuccucccgauacucaacaaacaaagcugcucuaucuccaacaucgaaaccgucauggaguuccaacagaaaaacaaucgucuccucgaaaucacccgcgaguucucaguaaacgccggggucaccacaccagucuccaccuacaugcucaccaacuccgaacuccuuagccucauaaacgacaugcccauaaccaacgaccaaaagaaacucaugagcaacaacguacaaauaguccgacaacaauccuauuccaucauguguaucaucaaagaagaaguccucgcauacguaguccaacucccccuauacggcguaaucgacaccccauguuggaaacuccacaccucaccacucuguaccaccaacaccaaagaaggcucaaacaucugccucacccgcacagaccgcggcugguacugcgacaacgcgggcuccgucagcuucuuuccccaagcggaaaccugcaaagucugcagcaacagagucuucugcgacacuaugaacucccucacccuccccucagaagucaaccucugcaacgucgacaucuucaacccgaaauacgacugcaaaaucaugaccagcaaaacugacgucuccucguccgucaucaccucacucggcgcaaucgugagcugcuacggcaaaaccaaaugcaccgccuccaacaaaaacaaaggcaucauaaaaacauucagcaacggcugcgacuacgucucgaacaaaggagucgacaccguaucagugggcaacacccuauacuacguaaacaagcaagaaggcaaaucacucuacguaaaaggcgaacccaucaucaacuucuacgacccccucgucuuccccuccgacgaguucgacgccuccaucucucaagucaacgagaaaaucaaccaaucccuugccuucauacguaaaagcgacgaacuccuucacaacguaaacgccgggaaauccaccacuaacauaaugaucaccaccaucaucaucguuaucauagucauccuccucucucucauagcagucggccuacuccuguacugcaaagcgcgcuaaggacuaguaauaaggaaacuguaugaaugucugugggcaggaagugaagagauccuucuguaaagguuuuuggaauuaugucugcugaauaauaaacuuuuuugaaauaauaaaucugguagaaaaaugagaucuaaaaaaaaaaaaaaaaaaaaaaaaaaaaaaaaaaaaaaaaaaaaaaaaaaaaaaaaaaaaaaaaugcaucccccccccccccccccccccccccccccccaaaggcucuuuucagagccaccagaauu

SEQ ID NO: 7316 - RNA, 2214 nt, Artificial Sequence
  mRNA product Design d-3 comprising derived and/or modified sequence from HRSV(A2)__F-del_DSCav1_mut7 (opt1)
gggagagggcgcuuggcuugcaaggacccugagcugcggcauugaagcacacccaacccaacucgacugaagucagccucacugaaccggaucugagaaucuucucucucugggcuugccagggcucuccgaaccuagcuagcauccucuucaauuccaacuagaaagcuuaccauggagcugcucauccugaaggccaacgccaucaccaccauccugacggcggugaccuucugcuucgccagcggccagaacaucaccgaggaguucuaccaguccacgugcagcgccgucuccaagggguaccucagcgcccugcggaccggcugguacaccuccgugaucaccaucgagcugagcaacaucaaggagaacaagugcaacgggaccgacgccaaggugaagcucaucaagcaggagcuggacaaguacaagaacgcggucacggagcugcagaugcugaugugcuccaccccggcaaccggcuccggcuccgccaucgcgagcggcgucgccgugugcaaggugcugcaccucgagggggaggucaacaagaucaagagcgcccugcuguccaccaacaaggccguggugagccucuccaacggcgucagcgugcugaccuucaaggugcuggaccucaagaacuacaucgacaagcagcugcugcccauccugaacaagcagagcugcuccaucagcaacaucgagacggugauggaguuccagcagaagaacaaccggcuccuggagaucacccgcgaguucagcgugaacgccggggucaccacccccguguccacguacaugcugaccaacagcgagcuccugucccugaucaacgacaugccgaucaccaacgaccagaagaagcucaugagcaacaacgugcagaucguccggcagcaguccuacagcaucaugugcaucaucaaggaggaggugcuggcguacgugguccagcugccccucuacggcgugaucgacacccccugcuggaagcugcacacgagcccccugugcaccaccaacaccaaggagggguccaacaucugccucacgcgcaccgaccggggcugguacugcgacaacgccggcagcgucuccuucuucccgcaggccgagaccugcaaggugugcagcaaccgcguguucugcgacaccaugaacucccugacgcugcccagcgagguaaaccucugcaacgucgacaucuucaaccccaaguacgacugcaagaucaugaccuccaagaccgacgugagcuccagcgugaucaccucccugggggccaucgucagcugcuacggcaagacgaagugcaccgccagcaacaagaacaaggggaucaucaagaccuucuccaacggcugcgacuacgugagcaacaagggcguggacaccguguccgucgggaacacccuguacuacgugaacaagcaggagggcaagagccucuacgugaagggggagcccaucaucaacuucuacgacccgcuggucuuccccuccgacgaguucgacgcgagcaucucccaggugaacgagaagaucaaccagagccuggccuucauccgcaaguccgacgagcugcuccacaacgugaacgccggcaagagcacgaccaacaucaugaucaccaccaucaucaucgucaucaucgugauccugcugucccucaucgccguggggcugcugcucuacugcaaggcccggugaggacuagugaagggaacacccaaauuuaauucagccuuaagcacaauuaauuaagagugaaacguaauuguacaagcaguuggucacccaccauagggcaugaucaacaccgcaaccuuuccuuuuucccccagugauucugaaaaaccccucuucccuucagcuugcuuagauguuccaaauuuaguaagcuuaaggcggccuacagaagaaaaagaaaaaaaaggccacaaaaguucccucucacuuucaguaaauaaaauaaaagcagcaacagaaauaaagaaauaaaugaaauucaaaaugaaauaaauauuguguugugcagcauuaaaaaaucaauaaaaauuaaaaaugagcaagaucuaaaaaaaaaaaaaaaaaaaaaaaaaaaaaaaaaaaaaaaaaaaaaaaaaaaaaaaaaaaaaaaaugcaucccccccccccccccccccccccccccccccaaaggcucuuuucagagccaccagaauu

SEQ ID NO: 7317 - RNA, 2214 nt, Artificial Sequence
  mRNA product Design d-3 comprising derived and/or modified sequence from HRSV(A2)__F-del_DSCav1_mut7 (opt1)
gggagagggcgcuuggcuugcaaggacccugagcugcggcauugaagcacacccaacccaacucgacugaagucagccucacugaaccggaucugagaaucuucucucucugggcuugccagggcucuccgaaccuagcuagcauccucuucaauuccaacuagaaagcuuaccauggagcugcucauccugaaggccaacgccaucaccaccauccugacggcggugaccuucugcuucgccagcggccagaacaucaccgaggaguucuaccaguccacgugcagcgccgucuccaagggguaccucagcgcccugcgcaccggcugguacaccuccgugaucaccaucgagcugagcaacaucaaggagaacaagugcaacgggaccgacgccaaggugaagcucaucaagcaggagcuggacaaguacaagaacgcggucacggagcugcagaugcucaugugcuccacccccgccaccggcagcggguccgccaucgccagcggcguggcggugugcaagguccugcaccuggagggcgaggugaacaagaucaaguccgcccuccugagcaccaacaaggccguggucucccugagcaacgggguguccgugcucacguucaagguccuggaccugaagaacuacaucgacaagcagcuccugccgauccugaacaagcagagcugcuccaucagcaacaucgagaccgugauggaguuccagcagaagaacaaccggcuccuggagaucacccgcgaguucuccgugaacgccggcgucaccacgcccgugagcaccuacaugcugaccaacagcgagcuccugucccugaucaacgacaugcccaucaccaacgaccagaagaagcucaugagcaacaacgugcagaucguccggcagcaguccuacagcaucaugugcaucaucaaggaggaggugcuggccuacgugguccagcugccccucuacggggugaucgacacgccgugcuggaagcugcacaccagcccccugugcaccaccaacacgaaggagggcagcaacaucugccucacccgcaccgaccgggggugguacugcgacaacgcgggcuccgugagcuucuucccccaggccgagaccugcaaggucugcuccaaccgcguguucugcgacacgaugaacagccugacccugcccuccgaggucaaccucugcaacguggacaucuucaacccgaaguacgacugcaagaucaugaccagcaagaccgacguguccagcuccgucaucacgagccugggcgccaucguguccugcuacgggaagaccaagugcaccgccagcaacaagaacaagggcaucaucaagaccuucuccaacgggugcgacuacgugagcaacaagggcgucgacacggugagcgugggcaacacccuguacuacgucaacaagcaggaggggaagucccucuacgugaagggcgagcccaucaucaacuucuacgacccccugguguuccccagcgacgaguucgacgccuccaucagccaggucaacgagaagaucaaccagucccuggcguucauccggaaguccgacgagcuccugcacaacgugaacgccgggaaguccaccaccaacaucaugaucaccacgaucaucaucgugaucaucgucauccugcucagccugaucgccgugggccugcuccuguacugcaaggcccgcugaggacuagugaagggaacacccaaauuuaauucagccuuaagcacaauuaauuaagagugaaacguaauuguacaagcaguuggucacccaccauagggcaugaucaacaccgcaaccuuuccuuuuucccccagugauucugaaaaaccccucuucccuucagcuugcuuagauguuccaaauuuaguaagcuuaaggcggccuacagaagaaaaagaaaaaaaaggccacaaaaguucccucucacuuucaguaaauaaaauaaaagcagcaacagaaauaaagaaauaaaugaaauucaaaaugaaauaaauauuguguugugcagcauuaaaaaaucaauaaaaauuaaaaaugagcaagaucuaaaaaaaaaaaaaaaaaaaaaaaaaaaaaaaaaaaaaaaaaaaaaaaaaaaaaaaaaaaaaaaaugcaucccccccccccccccccccccccccccccccaaaggcucuuuucagagccaccagaauu

SEQ ID NO: 7318 - RNA, 2214 nt, Artificial Sequence
  mRNA product Design d-3 comprising derived and/or modified sequence from HRSV(A2)__F-del_DSCav1_mut7 (opt2)
gggagagggcgcuuggcuugcaaggacccugagcugcggcauugaagcacacccaacccaacucgacugaagucagccucacugaaccggaucugagaaucuucucucucugggcuugccagggcucuccgaaccuagcuagcauccucuucaauuccaacuagaaagcuuaccauggagcuccucauccucaaggccaacgccaucaccaccauccucaccgccgucaccuucugcuucgccuccggccagaacaucaccgaggaguucuaccaguccaccugcuccgccgucuccaagggcuaccucuccgcccuccgcaccggcugguacaccuccgucaucaccaucgagcucuccaacaucaaggagaacaagugcaacggcaccgacgccaaggucaagcucaucaagcaggagcucgacaaguacaagaacgccgucaccgagcuccagaugcucaugugcuccacccccgccaccggcuccggcuccgccaucgccuccggcgucgccgucugcaagguccuccaccucgagggcgaggucaacaagaucaaguccgcccuccucuccaccaacaaggccgucgucucccucuccaacggcgucuccguccucaccuucaagguccucgaccucaagaacuacaucgacaagcagcuccuccccauccucaacaagcaguccugcuccaucuccaacaucgagaccgucauggaguuccagcagaagaacaaccgccuccucgagaucacccgcgaguucuccgucaacgccggcgucaccacccccgucuccaccuacaugcucaccaacuccgagcuccucucccucaucaacgacaugcccaucaccaacgaccagaagaagcucauguccaacaacguccagaucguccgccagcaguccuacuccaucaugugcaucaucaaggaggagguccucgccuacgucguccagcucccccucuacggcgucaucgacacccccugcuggaagcuccacaccuccccccucugcaccaccaacaccaaggagggcuccaacaucugccucacccgcaccgaccgcggcugguacugcgacaacgccggcuccgucuccuucuucccccaggccgagaccugcaaggucugcuccaaccgcgucuucugcgacaccaugaacucccucacccuccccuccgaggucaaccucugcaacgucgacaucuucaaccccaaguacgacugcaagaucaugaccuccaagaccgacgucuccuccuccgucaucaccucccucggcgccaucgucuccugcuacggcaagaccaagugcaccgccuccaacaagaacaagggcaucaucaagaccuucuccaacggcugcgacuacgucuccaacaagggcgucgacaccgucuccgucggcaacacccucuacuacgucaacaagcaggagggcaagucccucuacgucaagggcgagcccaucaucaacuucuacgacccccucgucuuccccuccgacgaguucgacgccuccaucucccaggucaacgagaagaucaaccagucccucgccuucauccgcaaguccgacgagcuccuccacaacgucaacgccggcaaguccaccaccaacaucaugaucaccaccaucaucaucgucaucaucgucauccuccucucccucaucgccgucggccuccuccucuacugcaaggcccgcugaggacuagugaagggaacacccaaauuuaauucagccuuaagcacaauuaauuaagagugaaacguaauuguacaagcaguuggucacccaccauagggcaugaucaacaccgcaaccuuuccuuuuucccccagugauucugaaaaaccccucuucccuucagcuugcuuagauguuccaaauuuaguaagcuuaaggcggccuacagaagaaaaagaaaaaaaaggccacaaaaguucccucucacuuucaguaaauaaaauaaaagcagcaacagaaauaaagaaauaaaugaaauucaaaaugaaauaaauauuguguugugcagcauuaaaaaaucaauaaaaauuaaaaaugagcaagaucuaaaaaaaaaaaaaaaaaaaaaaaaaaaaaaaaaaaaaaaaaaaaaaaaaaaaaaaaaaaaaaaaugcaucccccccccccccccccccccccccccccccaaaggcucuuuucagagccaccagaauu

SEQ ID NO: 7319 - RNA, 2214 nt, Artificial Sequence
  mRNA product Design d-3 comprising derived and/or modified sequence from HRSV(A2)__F-del_DSCav1_mut7 (opt3)
gggagagggcgcuuggcuugcaaggacccugagcugcggcauugaagcacacccaacccaacucgacugaagucagccucacugaaccggaucugagaaucuucucucucugggcuugccagggcucuccgaaccuagcuagcauccucuucaauuccaacuagaaagcuuaccauggagcugcucauccuuaaggccaacgcuauuaccacaauacugacugcagugacguucugcuuugccagcggccagaauaucaccgaagaguucuaccaauccacauguucugcggucucaaaaggguauuugagugcuuuaagaacuggaugguacaccagcguuauuacaaucgaacuguccaacauuaaggagaauaaaugcaacgguaccgacgccaaggugaaacuaaucaagcaggaacucgauaaguauaaaaaugcaguaacugagcugcagaugcuuauguguucuacacccgccaccggcucggggucagcuauagcaagcggaguggccgucugcaaggugcugcacuuggagggcgaaguuaacaaaaucaagagugcucuccuguccacgaauaaagccguggucucucugagcaacgguguguccguacucacuuuuaagguuuuagaccugaagaauuacauugauaaacagcuuuugccuauccugaacaagcaaucauguaguauuagcaauaucgagaccgugauggaguuccagcagaaaaacaauaggcuacucgaaauaacacgggaguuuucugucaacgcgggggugacuaccccaguguccacauauaugcugaccaauucagaacuucugagcuugauuaacgacaugccgaucacgaacgaucagaagaaacucaugaguaauaacguccaaauuguucgccagcagucuuacuccaucaugugcaucauuaaggaggaagugcuggcauauguagugcaguuaccccuguacggagucauagacacuccuuguuggaaacuccauacaagcccacuuugcaccacuaauacaaaggagggcucgaacaucugucugacccgaacggaucguggcugguacugcgacaaugccgggucuguguccuucuuuccccaagcugaaaccuguaagguuugcucaaacagaguguucugcgauacaaugaauaguuugacucuaccuagcgaggucaaccuguguaauguggacauuuuuaacccaaaauaugauugcaagaucaugaccuccaaaacagacguaucuagcucaguuauaacuagccucggagccauuguguccuguuacgguaagaccaaaugcacagcaagcaauaagaacaagggcaucaucaaaaccuucucuaaugggugugauuaugucucaaacaagggaguggacacugucagugugggcaauacgcuguacuauguuaacaaacaggaggguaagagccuuuacgugaaaggggaacccauuaucaacuuuuaugacccucugguauucccauccgaugaguuugacgcuucuauuucgcaggucaaugaaaagauaaaccaaaguuuggccuucaucaggaaguccgaugagcuccugcacaaugugaacgcgggaaaaucaacaaccaauauuaugaucacuaccaucauuauaguuaucauugugaucuuacugagucuaauugccgucggccuccugcuuuacugcaaggcacggugaggacuagugaagggaacacccaaauuuaauucagccuuaagcacaauuaauuaagagugaaacguaauuguacaagcaguuggucacccaccauagggcaugaucaacaccgcaaccuuuccuuuuucccccagugauucugaaaaaccccucuucccuucagcuugcuuagauguuccaaauuuaguaagcuuaaggcggccuacagaagaaaaagaaaaaaaaggccacaaaaguucccucucacuuucaguaaauaaaauaaaagcagcaacagaaauaaagaaauaaaugaaauucaaaaugaaauaaauauuguguugugcagcauuaaaaaaucaauaaaaauuaaaaaugagcaagaucuaaaaaaaaaaaaaaaaaaaaaaaaaaaaaaaaaaaaaaaaaaaaaaaaaaaaaaaaaaaaaaaaugcaucccccccccccccccccccccccccccccccaaaggcucuuuucagagccaccagaauu

SEQ ID NO: 7320 - RNA, 2214 nt, Artificial Sequence
  mRNA product Design d-3 comprising derived and/or modified sequence from HRSV(A2)__F-del_DSCav1_mut7 (opt4)
gggagagggcgcuuggcuugcaaggacccugagcugcggcauugaagcacacccaacccaacucgacugaagucagccucacugaaccggaucugagaaucuucucucucugggcuugccagggcucuccgaaccuagcuagcauccucuucaauuccaacuagaaagcuuaccauggagcugcugauccugaaggccaacgccaucaccaccauccugaccgccgugaccuucugcuucgccagcggccagaacaucaccgaggaguucuaccagagcaccugcagcgccgugagcaagggcuaccugagcgcccugagaaccggcugguacaccagcgugaucaccaucgagcugagcaacaucaaggagaacaagugcaacggcaccgacgccaaggugaagcugaucaagcaggagcuggacaaguacaagaacgccgugaccgagcugcagaugcugaugugcagcacccccgccaccggcagcggcagcgccaucgccagcggcguggccgugugcaaggugcugcaccuggagggcgaggugaacaagaucaagagcgcccugcugagcaccaacaaggccguggugagccugagcaacggcgugagcgugcugaccuucaaggugcuggaccugaagaacuacaucgacaagcagcugcugcccauccugaacaagcagagcugcagcaucagcaacaucgagaccgugauggaguuccagcagaagaacaacagacugcuggagaucaccagagaguucagcgugaacgccggcgugaccacccccgugagcaccuacaugcugaccaacagcgagcugcugagccugaucaacgacaugcccaucaccaacgaccagaagaagcugaugagcaacaacgugcagaucgugagacagcagagcuacagcaucaugugcaucaucaaggaggaggugcuggccuacguggugcagcugccccuguacggcgugaucgacacccccugcuggaagcugcacaccagcccccugugcaccaccaacaccaaggagggcagcaacaucugccugaccagaaccgacagaggcugguacugcgacaacgccggcagcgugagcuucuucccccaggccgagaccugcaaggugugcagcaacagaguguucugcgacaccaugaacagccugacccugcccagcgaggugaaccugugcaacguggacaucuucaaccccaaguacgacugcaagaucaugaccagcaagaccgacgugagcagcagcgugaucaccagccugggcgccaucgugagcugcuacggcaagaccaagugcaccgccagcaacaagaacaagggcaucaucaagaccuucagcaacggcugcgacuacgugagcaacaagggcguggacaccgugagcgugggcaacacccuguacuacgugaacaagcaggagggcaagagccuguacgugaagggcgagcccaucaucaacuucuacgacccccugguguuccccagcgacgaguucgacgccagcaucagccaggugaacgagaagaucaaccagagccuggccuucaucagaaagagcgacgagcugcugcacaacgugaacgccggcaagagcaccaccaacaucaugaucaccaccaucaucaucgugaucaucgugauccugcugagccugaucgccgugggccugcugcuguacugcaaggccagaugaggacuagugaagggaacacccaaauuuaauucagccuuaagcacaauuaauuaagagugaaacguaauuguacaagcaguuggucacccaccauagggcaugaucaacaccgcaaccuuuccuuuuucccccagugauucugaaaaaccccucuucccuucagcuugcuuagauguuccaaauuuaguaagcuuaaggcggccuacagaagaaaaagaaaaaaaaggccacaaaaguucccucucacuuucaguaaauaaaauaaaagcagcaacagaaauaaagaaauaaaugaaauucaaaaugaaauaaauauuguguugugcagcauuaaaaaaucaauaaaaauuaaaaaugagcaagaucuaaaaaaaaaaaaaaaaaaaaaaaaaaaaaaaaaaaaaaaaaaaaaaaaaaaaaaaaaaaaaaaaugcaucccccccccccccccccccccccccccccccaaaggcucuuuucagagccaccagaauu

SEQ ID NO: 7321 - RNA, 2214 nt, Artificial Sequence
  mRNA product Design d-3 comprising derived and/or modified sequence from HRSV(A2)__F-del_DSCav1_mut7 (opt5)
gggagagggcgcuuggcuugcaaggacccugagcugcggcauugaagcacacccaacccaacucgacugaagucagccucacugaaccggaucugagaaucuucucucucugggcuugccagggcucuccgaaccuagcuagcauccucuucaauuccaacuagaaagcuuaccauggagcugcucauccugaaggccaacgcuauuaccacaauccuuacggccgugaccuucugcuuugcgagcggccagaauauuacagaagaguucuaccaauccaccuguucugcugucagcaaaggguaucuguccgcccucagaacaggaugguacaccucuguuaucacaauugaacugagcaacaucaaggagaauaaaugcaacggcaccgacgccaaggugaaacuuaucaagcaggaacuggauaaguauaaaaaugcugugacggagcuccagaugcugauguguuccacccccgccacagggucuggaagcgcuauugccuccggcgucgcggugugcaagguucugcaccucgagggggaagugaacaaaaucaagagcgcccugcuuucuaccaauaaagcugucgugucccugagcaacggaguuucugugcucacauuuaagguccuggaccuuaagaauuacauugauaaacagcugcucccuauccugaacaagcaauccuguagcauuucuaauaucgagaccgugauggaguuccagcagaaaaacaaucggcugcucgaaauuacgcgcgaguuuuccgugaacgccggcgucacaaccccgguuagcacauauaugcugaccaauuccgaacuucugucucucaucaacgacaugcccaucaccaacgaucagaagaaacugaugagcaauaacgugcaaauugugagacagcaguccuacagcaucaugugcauuaucaaggaggaaguccuugcuuaugugguucagcugccucucuacggcgugauugacacacccuguuggaaacugcauacgucuccucugugcaccacaaauaccaaggagggguccaacaucugucucacacggaccgaucgcggaugguacugcgacaaugccggcagcgucucuuucuuuccccaagcggaaacguguaaggugugcagcaacagaguuuucugcgauacaaugaacucccugacccuuccuucugaggugaaucuguguaaugucgacaucuuuaacccgaaauaugauugcaagauuaugaccagcaaaacagacguguccagcucugucaucaccucccucggggccauugugagcuguuacggaaagacaaaaugcacggcuucuaauaagaacaagggcaucauuaaaaccuucuccaaugggugugauuauguuagcaacaagggaguggacacagucuccgugggcaauacccuguacuauguuaacaaacaggagggcaagucucuuuacgugaaaggggaacccaucaucaacuuuuaugacccucuggucuuccccagcgaugaguuugacgccuccauuucucaggugaaugaaaagaucaaccaaagccucgcuuucauucggaaguccgaugagcugcugcacaaugugaacgccggaaaaagcacaaccaauaucaugauuacgaccaucauuaucguuaucauugucauccuccugucucuuauugccgugggccugcuccuguacugcaaggcucgcugaggacuagugaagggaacacccaaauuuaauucagccuuaagcacaauuaauuaagagugaaacguaauuguacaagcaguuggucacccaccauagggcaugaucaacaccgcaaccuuuccuuuuucccccagugauucugaaaaaccccucuucccuucagcuugcuuagauguuccaaauuuaguaagcuuaaggcggccuacagaagaaaaagaaaaaaaaggccacaaaaguucccucucacuuucaguaaauaaaauaaaagcagcaacagaaauaaagaaauaaaugaaauucaaaaugaaauaaauauuguguugugcagcauuaaaaaaucaauaaaaauuaaaaaugagcaagaucuaaaaaaaaaaaaaaaaaaaaaaaaaaaaaaaaaaaaaaaaaaaaaaaaaaaaaaaaaaaaaaaaugcaucccccccccccccccccccccccccccccccaaaggcucuuuucagagccaccagaauu

SEQ ID NO: 7322 - RNA, 2214 nt, Artificial Sequence
  mRNA product Design d-3 comprising derived and/or modified sequence from HRSV(A2)__F-del_DSCav1_mut7 (opt6)
gggagagggcgcuuggcuugcaaggacccugagcugcggcauugaagcacacccaacccaacucgacugaagucagccucacugaaccggaucugagaaucuucucucucugggcuugccagggcucuccgaaccuagcuagcauccucuucaauuccaacuagaaagcuuaccauggaauuacuaauccucaaagcaaacgcaauuacaaccauacuaaccgcugucaccuuuuguuuugccucaggacaaaacauaacugaagaauuuuaccaaucaacaugcuccgcaguaucuaaaggauaccucagcgcguuaagaacaggaugguacacaucgguaauaaccaucgaauuauccaacauaaaagaaaauaaaugcaauggaacagacgcaaaagucaaauuaauuaaacaagaacuagacaaauauaaaaacgcaguaaccgaauuacaaaugcuaauguguucaacaccagcaacaggaucaggaucagcuauagcuucaggaguugccguaugcaaagugcuacacuuagaaggagaagugaauaaaauaaaaucagcucuauuaucaacgaacaaagccguaguaucucuaucaaauggcguaucaguacucacauucaaaguacucgaccuaaaaaacuauauagauaaacaacuauuacccauccuaaauaaacaaagcugcucuauaucaaacaucgaaacaguaauggaauuucaacaaaaaaacaacagacuacuagaaauaacccgagaguucucaguuaaugcaggaguaacaacaccagucucaacauacaugcucacaaacucagaacuccuaucacuaauaaaugacaugccaauaacaaacgaccaaaaaaaacucaugucuaacaacguccaaauaguaagacaacaauccuacagcauaauguguauaauaaaagaagaaguuuuagcauacgucguacaacuacccuuauauggcguaauagauacaccaugcuggaaacuccauaccucaccucuauguacaacaaauaccaaagaagguucuaauauaugccuaacacgaacugaccgaggaugguacugugacaacgcaggaucagucucuuucuuuccacaagcagaaaccugcaaaguaugcaguaaccgcguauuuugcgacacaaugaacucccuaaccuuaccaucagaaguaaacuuauguaacguagacauauucaauccaaaauaugacugcaaaauaaugacaucaaaaacagacguaagcucaucaguaauaacuucacuaggcgcaauuguaucaugcuauggaaaaaccaaauguaccgcauccaacaaaaauaaaggaauaauaaaaaccuucucuaacggaugcgacuacguaucaaacaaagguguagauacaguuucuguaggaaacacacucuacuauguaaauaaacaagaaggaaaaucacuauacguaaaaggagaaccaauaauaaacuucuaugacccacuuguauuuccaucugaugaauuugaugcaagcauaucacaaguaaacgaaaaaauaaaccaaucucuagccuuuauacgaaaaagcgacgaauuacuacauaacgucaacgcuggaaaaucaacaacaaacauaaugauaacaacaauaauaauaguaauaauagucauccuauuaucacuaaucgccguaggacuacuccuauacugcaaagcuagauaaggacuagugaagggaacacccaaauuuaauucagccuuaagcacaauuaauuaagagugaaacguaauuguacaagcaguuggucacccaccauagggcaugaucaacaccgcaaccuuuccuuuuucccccagugauucugaaaaaccccucuucccuucagcuugcuuagauguuccaaauuuaguaagcuuaaggcggccuacagaagaaaaagaaaaaaaaggccacaaaaguucccucucacuuucaguaaauaaaauaaaagcagcaacagaaauaaagaaauaaaugaaauucaaaaugaaauaaauauuguguugugcagcauuaaaaaaucaauaaaaauuaaaaaugagcaagaucuaaaaaaaaaaaaaaaaaaaaaaaaaaaaaaaaaaaaaaaaaaaaaaaaaaaaaaaaaaaaaaaaugcaucccccccccccccccccccccccccccccccaaaggcucuuuucagagccaccagaauu

SEQ ID NO: 7323 - RNA, 2214 nt, Artificial Sequence
  mRNA product Design d-3 comprising derived and/or modified sequence from HRSV(A2)__F-del_DSCav1_mut7 (opt11)
gggagagggcgcuuggcuugcaaggacccugagcugcggcauugaagcacacccaacccaacucgacugaagucagccucacugaaccggaucugagaaucuucucucucugggcuugccagggcucuccgaaccuagcuagcauccucuucaauuccaacuagaaagcuuaccauggaacuccucauccucaaagccaacgccauaaccacuauccucacagcagucacuuucugcuucgccucaggacaaaacauaaccgaagaguucuaccaauccacaugcuccgccgucuccaaaggcuaccucucagcgcuccgcaccggcugguacacauccgucaucaccaucgaacuaagcaacauaaaagaaaacaaaugcaacggcaccgacgccaaaguuaaacucaucaagcaagaacucgacaaauacaaaaacgcagucacagaacuucaaaugcucaugugcuccacacccgccacagguucuggcucagcaaucgcaagcggcgucgccguaugcaaaguccuucaccucgaaggcgaagucaacaaaaucaaauccgcccuccucuccaccaauaaagcugucgucucacucuccaacggcgucagcguccucacauucaaaguccucgaccucaaaaacuacauagacaagcaacuccucccgauacucaacaaacaaagcugcucuaucuccaacaucgaaaccgucauggaguuccaacagaaaaacaaucgucuccucgaaaucacccgcgaguucucaguaaacgccggggucaccacaccagucuccaccuacaugcucaccaacuccgaacuccuuagccucauaaacgacaugcccauaaccaacgaccaaaagaaacucaugagcaacaacguacaaauaguccgacaacaauccuauuccaucauguguaucaucaaagaagaaguccucgcauacguaguccaacucccccuauacggcguaaucgacaccccauguuggaaacuccacaccucaccacucuguaccaccaacaccaaagaaggcucaaacaucugccucacccgcacagaccgcggcugguacugcgacaacgcgggcuccgucagcuucuuuccccaagcggaaaccugcaaagucugcagcaacagagucuucugcgacacuaugaacucccucacccuccccucagaagucaaccucugcaacgucgacaucuucaacccgaaauacgacugcaaaaucaugaccagcaaaacugacgucuccucguccgucaucaccucacucggcgcaaucgugagcugcuacggcaaaaccaaaugcaccgccuccaacaaaaacaaaggcaucauaaaaacauucagcaacggcugcgacuacgucucgaacaaaggagucgacaccguaucagugggcaacacccuauacuacguaaacaagcaagaaggcaaaucacucuacguaaaaggcgaacccaucaucaacuucuacgacccccucgucuuccccuccgacgaguucgacgccuccaucucucaagucaacgagaaaaucaaccaaucccuugccuucauacguaaaagcgacgaacuccuucacaacguaaacgccgggaaauccaccacuaacauaaugaucaccaccaucaucaucguuaucauagucauccuccucucucucauagcagucggccuacuccuguacugcaaagcgcgcuaaggacuagugaagggaacacccaaauuuaauucagccuuaagcacaauuaauuaagagugaaacguaauuguacaagcaguuggucacccaccauagggcaugaucaacaccgcaaccuuuccuuuuucccccagugauucugaaaaaccccucuucccuucagcuugcuuagauguuccaaauuuaguaagcuuaaggcggccuacagaagaaaaagaaaaaaaaggccacaaaaguucccucucacuuucaguaaauaaaauaaaagcagcaacagaaauaaagaaauaaaugaaauucaaaaugaaauaaauauuguguugugcagcauuaaaaaaucaauaaaaauuaaaaaugagcaagaucuaaaaaaaaaaaaaaaaaaaaaaaaaaaaaaaaaaaaaaaaaaaaaaaaaaaaaaaaaaaaaaaaugcaucccccccccccccccccccccccccccccccaaaggcucuuuucagagccaccagaauu

SEQ ID NO: 7324 - RNA, 1897 nt, Artificial Sequence
  mRNA product Design d-4 comprising derived and/or modified sequence from HRSV(A2)__F-del_DSCav1_mut7 (opt1)
gggagagucccgcagucggcguccagcggcucugcuuguucgugugugugucguugcaggccuuauucaagcuuaccauggagcugcucauccugaaggccaacgccaucaccaccauccugacggcggugaccuucugcuucgccagcggccagaacaucaccgaggaguucuaccaguccacgugcagcgccgucuccaagggguaccucagcgcccugcggaccggcugguacaccuccgugaucaccaucgagcugagcaacaucaaggagaacaagugcaacgggaccgacgccaaggugaagcucaucaagcaggagcuggacaaguacaagaacgcggucacggagcugcagaugcugaugugcuccaccccggcaaccggcuccggcuccgccaucgcgagcggcgucgccgugugcaaggugcugcaccucgagggggaggucaacaagaucaagagcgcccugcuguccaccaacaaggccguggugagccucuccaacggcgucagcgugcugaccuucaaggugcuggaccucaagaacuacaucgacaagcagcugcugcccauccugaacaagcagagcugcuccaucagcaacaucgagacggugauggaguuccagcagaagaacaaccggcuccuggagaucacccgcgaguucagcgugaacgccggggucaccacccccguguccacguacaugcugaccaacagcgagcuccugucccugaucaacgacaugccgaucaccaacgaccagaagaagcucaugagcaacaacgugcagaucguccggcagcaguccuacagcaucaugugcaucaucaaggaggaggugcuggcguacgugguccagcugccccucuacggcgugaucgacacccccugcuggaagcugcacacgagcccccugugcaccaccaacaccaaggagggguccaacaucugccucacgcgcaccgaccggggcugguacugcgacaacgccggcagcgucuccuucuucccgcaggccgagaccugcaaggugugcagcaaccgcguguucugcgacaccaugaacucccugacgcugcccagcgagguaaaccucugcaacgucgacaucuucaaccccaaguacgacugcaagaucaugaccuccaagaccgacgugagcuccagcgugaucaccucccugggggccaucgucagcugcuacggcaagacgaagugcaccgccagcaacaagaacaaggggaucaucaagaccuucuccaacggcugcgacuacgugagcaacaagggcguggacaccguguccgucgggaacacccuguacuacgugaacaagcaggagggcaagagccucuacgugaagggggagcccaucaucaacuucuacgacccgcuggucuuccccuccgacgaguucgacgcgagcaucucccaggugaacgagaagaucaaccagagccuggccuucauccgcaaguccgacgagcugcuccacaacgugaacgccggcaagagcacgaccaacaucaugaucaccaccaucaucaucgucaucaucgugauccugcugucccucaucgccguggggcugcugcucuacugcaaggcccggugaggacuaguggaagcauuuuccuggcugauuaaaagaaauuacucagcuauggucaucuguuccuguuagaaggcuaugcagcauauuauauacuaugcgcauguuaugaaaugcauaauaaaaaauuuuaaaaaaucuaaaagaucuaaaaaaaaaaaaaaaaaaaaaaaaaaaaaaaaaaaaaaaaaaaaaaaaaaaaaaaaaaaaaaaaugcaucccccccccccccccccccccccccccccccaaaggcucuuuucagagccaccagaauu

SEQ ID NO: 7325 - RNA, 1897 nt, Artificial Sequence
  mRNA product Design d-4 comprising derived and/or modified sequence from HRSV(A2)__F-del_DSCav1_mut7 (opt1)
gggagagucccgcagucggcguccagcggcucugcuuguucgugugugugucguugcaggccuuauucaagcuuaccauggagcugcucauccugaaggccaacgccaucaccaccauccugacggcggugaccuucugcuucgccagcggccagaacaucaccgaggaguucuaccaguccacgugcagcgccgucuccaagggguaccucagcgcccugcgcaccggcugguacaccuccgugaucaccaucgagcugagcaacaucaaggagaacaagugcaacgggaccgacgccaaggugaagcucaucaagcaggagcuggacaaguacaagaacgcggucacggagcugcagaugcucaugugcuccacccccgccaccggcagcggguccgccaucgccagcggcguggcggugugcaagguccugcaccuggagggcgaggugaacaagaucaaguccgcccuccugagcaccaacaaggccguggucucccugagcaacgggguguccgugcucacguucaagguccuggaccugaagaacuacaucgacaagcagcuccugccgauccugaacaagcagagcugcuccaucagcaacaucgagaccgugauggaguuccagcagaagaacaaccggcuccuggagaucacccgcgaguucuccgugaacgccggcgucaccacgcccgugagcaccuacaugcugaccaacagcgagcuccugucccugaucaacgacaugcccaucaccaacgaccagaagaagcucaugagcaacaacgugcagaucguccggcagcaguccuacagcaucaugugcaucaucaaggaggaggugcuggccuacgugguccagcugccccucuacggggugaucgacacgccgugcuggaagcugcacaccagcccccugugcaccaccaacacgaaggagggcagcaacaucugccucacccgcaccgaccgggggugguacugcgacaacgcgggcuccgugagcuucuucccccaggccgagaccugcaaggucugcuccaaccgcguguucugcgacacgaugaacagccugacccugcccuccgaggucaaccucugcaacguggacaucuucaacccgaaguacgacugcaagaucaugaccagcaagaccgacguguccagcuccgucaucacgagccugggcgccaucguguccugcuacgggaagaccaagugcaccgccagcaacaagaacaagggcaucaucaagaccuucuccaacgggugcgacuacgugagcaacaagggcgucgacacggugagcgugggcaacacccuguacuacgucaacaagcaggaggggaagucccucuacgugaagggcgagcccaucaucaacuucuacgacccccugguguuccccagcgacgaguucgacgccuccaucagccaggucaacgagaagaucaaccagucccuggcguucauccggaaguccgacgagcuccugcacaacgugaacgccgggaaguccaccaccaacaucaugaucaccacgaucaucaucgugaucaucgucauccugcucagccugaucgccgugggccugcuccuguacugcaaggcccgcugaggacuaguggaagcauuuuccuggcugauuaaaagaaauuacucagcuauggucaucuguuccuguuagaaggcuaugcagcauauuauauacuaugcgcauguuaugaaaugcauaauaaaaaauuuuaaaaaaucuaaaagaucuaaaaaaaaaaaaaaaaaaaaaaaaaaaaaaaaaaaaaaaaaaaaaaaaaaaaaaaaaaaaaaaaugcaucccccccccccccccccccccccccccccccaaaggcucuuuucagagccaccagaauu

SEQ ID NO: 7326 - RNA, 1897 nt, Artificial Sequence
  mRNA product Design d-4 comprising derived and/or modified sequence from HRSV(A2)__F-del_DSCav1_mut7 (opt2)
gggagagucccgcagucggcguccagcggcucugcuuguucgugugugugucguugcaggccuuauucaagcuuaccauggagcuccucauccucaaggccaacgccaucaccaccauccucaccgccgucaccuucugcuucgccuccggccagaacaucaccgaggaguucuaccaguccaccugcuccgccgucuccaagggcuaccucuccgcccuccgcaccggcugguacaccuccgucaucaccaucgagcucuccaacaucaaggagaacaagugcaacggcaccgacgccaaggucaagcucaucaagcaggagcucgacaaguacaagaacgccgucaccgagcuccagaugcucaugugcuccacccccgccaccggcuccggcuccgccaucgccuccggcgucgccgucugcaagguccuccaccucgagggcgaggucaacaagaucaaguccgcccuccucuccaccaacaaggccgucgucucccucuccaacggcgucuccguccucaccuucaagguccucgaccucaagaacuacaucgacaagcagcuccuccccauccucaacaagcaguccugcuccaucuccaacaucgagaccgucauggaguuccagcagaagaacaaccgccuccucgagaucacccgcgaguucuccgucaacgccggcgucaccacccccgucuccaccuacaugcucaccaacuccgagcuccucucccucaucaacgacaugcccaucaccaacgaccagaagaagcucauguccaacaacguccagaucguccgccagcaguccuacuccaucaugugcaucaucaaggaggagguccucgccuacgucguccagcucccccucuacggcgucaucgacacccccugcuggaagcuccacaccuccccccucugcaccaccaacaccaaggagggcuccaacaucugccucacccgcaccgaccgcggcugguacugcgacaacgccggcuccgucuccuucuucccccaggccgagaccugcaaggucugcuccaaccgcgucuucugcgacaccaugaacucccucacccuccccuccgaggucaaccucugcaacgucgacaucuucaaccccaaguacgacugcaagaucaugaccuccaagaccgacgucuccuccuccgucaucaccucccucggcgccaucgucuccugcuacggcaagaccaagugcaccgccuccaacaagaacaagggcaucaucaagaccuucuccaacggcugcgacuacgucuccaacaagggcgucgacaccgucuccgucggcaacacccucuacuacgucaacaagcaggagggcaagucccucuacgucaagggcgagcccaucaucaacuucuacgacccccucgucuuccccuccgacgaguucgacgccuccaucucccaggucaacgagaagaucaaccagucccucgccuucauccgcaaguccgacgagcuccuccacaacgucaacgccggcaaguccaccaccaacaucaugaucaccaccaucaucaucgucaucaucgucauccuccucucccucaucgccgucggccuccuccucuacugcaaggcccgcugaggacuaguggaagcauuuuccuggcugauuaaaagaaauuacucagcuauggucaucuguuccuguuagaaggcuaugcagcauauuauauacuaugcgcauguuaugaaaugcauaauaaaaaauuuuaaaaaaucuaaaagaucuaaaaaaaaaaaaaaaaaaaaaaaaaaaaaaaaaaaaaaaaaaaaaaaaaaaaaaaaaaaaaaaaugcaucccccccccccccccccccccccccccccccaaaggcucuuuucagagccaccagaauu

SEQ ID NO: 7327 - RNA, 1897 nt, Artificial Sequence
  mRNA product Design d-4 comprising derived and/or modified sequence from HRSV(A2)__F-del_DSCav1_mut7 (opt3)
gggagagucccgcagucggcguccagcggcucugcuuguucgugugugugucguugcaggccuuauucaagcuuaccauggagcugcucauccuuaaggccaacgcuauuaccacaauacugacugcagugacguucugcuuugccagcggccagaauaucaccgaagaguucuaccaauccacauguucugcggucucaaaaggguauuugagugcuuuaagaacuggaugguacaccagcguuauuacaaucgaacuguccaacauuaaggagaauaaaugcaacgguaccgacgccaaggugaaacuaaucaagcaggaacucgauaaguauaaaaaugcaguaacugagcugcagaugcuuauguguucuacacccgccaccggcucggggucagcuauagcaagcggaguggccgucugcaaggugcugcacuuggagggcgaaguuaacaaaaucaagagugcucuccuguccacgaauaaagccguggucucucugagcaacgguguguccguacucacuuuuaagguuuuagaccugaagaauuacauugauaaacagcuuuugccuauccugaacaagcaaucauguaguauuagcaauaucgagaccgugauggaguuccagcagaaaaacaauaggcuacucgaaauaacacgggaguuuucugucaacgcgggggugacuaccccaguguccacauauaugcugaccaauucagaacuucugagcuugauuaacgacaugccgaucacgaacgaucagaagaaacucaugaguaauaacguccaaauuguucgccagcagucuuacuccaucaugugcaucauuaaggaggaagugcuggcauauguagugcaguuaccccuguacggagucauagacacuccuuguuggaaacuccauacaagcccacuuugcaccacuaauacaaaggagggcucgaacaucugucugacccgaacggaucguggcugguacugcgacaaugccgggucuguguccuucuuuccccaagcugaaaccuguaagguuugcucaaacagaguguucugcgauacaaugaauaguuugacucuaccuagcgaggucaaccuguguaauguggacauuuuuaacccaaaauaugauugcaagaucaugaccuccaaaacagacguaucuagcucaguuauaacuagccucggagccauuguguccuguuacgguaagaccaaaugcacagcaagcaauaagaacaagggcaucaucaaaaccuucucuaaugggugugauuaugucucaaacaagggaguggacacugucagugugggcaauacgcuguacuauguuaacaaacaggaggguaagagccuuuacgugaaaggggaacccauuaucaacuuuuaugacccucugguauucccauccgaugaguuugacgcuucuauuucgcaggucaaugaaaagauaaaccaaaguuuggccuucaucaggaaguccgaugagcuccugcacaaugugaacgcgggaaaaucaacaaccaauauuaugaucacuaccaucauuauaguuaucauugugaucuuacugagucuaauugccgucggccuccugcuuuacugcaaggcacggugaggacuaguggaagcauuuuccuggcugauuaaaagaaauuacucagcuauggucaucuguuccuguuagaaggcuaugcagcauauuauauacuaugcgcauguuaugaaaugcauaauaaaaaauuuuaaaaaaucuaaaagaucuaaaaaaaaaaaaaaaaaaaaaaaaaaaaaaaaaaaaaaaaaaaaaaaaaaaaaaaaaaaaaaaaugcaucccccccccccccccccccccccccccccccaaaggcucuuuucagagccaccagaauu

SEQ ID NO: 7328 - RNA, 1897 nt, Artificial Sequence
  mRNA product Design d-4 comprising derived and/or modified sequence from HRSV(A2)__F-del_DSCav1_mut7 (opt4)
gggagagucccgcagucggcguccagcggcucugcuuguucgugugugugucguugcaggccuuauucaagcuuaccauggagcugcugauccugaaggccaacgccaucaccaccauccugaccgccgugaccuucugcuucgccagcggccagaacaucaccgaggaguucuaccagagcaccugcagcgccgugagcaagggcuaccugagcgcccugagaaccggcugguacaccagcgugaucaccaucgagcugagcaacaucaaggagaacaagugcaacggcaccgacgccaaggugaagcugaucaagcaggagcuggacaaguacaagaacgccgugaccgagcugcagaugcugaugugcagcacccccgccaccggcagcggcagcgccaucgccagcggcguggccgugugcaaggugcugcaccuggagggcgaggugaacaagaucaagagcgcccugcugagcaccaacaaggccguggugagccugagcaacggcgugagcgugcugaccuucaaggugcuggaccugaagaacuacaucgacaagcagcugcugcccauccugaacaagcagagcugcagcaucagcaacaucgagaccgugauggaguuccagcagaagaacaacagacugcuggagaucaccagagaguucagcgugaacgccggcgugaccacccccgugagcaccuacaugcugaccaacagcgagcugcugagccugaucaacgacaugcccaucaccaacgaccagaagaagcugaugagcaacaacgugcagaucgugagacagcagagcuacagcaucaugugcaucaucaaggaggaggugcuggccuacguggugcagcugccccuguacggcgugaucgacacccccugcuggaagcugcacaccagcccccugugcaccaccaacaccaaggagggcagcaacaucugccugaccagaaccgacagaggcugguacugcgacaacgccggcagcgugagcuucuucccccaggccgagaccugcaaggugugcagcaacagaguguucugcgacaccaugaacagccugacccugcccagcgaggugaaccugugcaacguggacaucuucaaccccaaguacgacugcaagaucaugaccagcaagaccgacgugagcagcagcgugaucaccagccugggcgccaucgugagcugcuacggcaagaccaagugcaccgccagcaacaagaacaagggcaucaucaagaccuucagcaacggcugcgacuacgugagcaacaagggcguggacaccgugagcgugggcaacacccuguacuacgugaacaagcaggagggcaagagccuguacgugaagggcgagcccaucaucaacuucuacgacccccugguguuccccagcgacgaguucgacgccagcaucagccaggugaacgagaagaucaaccagagccuggccuucaucagaaagagcgacgagcugcugcacaacgugaacgccggcaagagcaccaccaacaucaugaucaccaccaucaucaucgugaucaucgugauccugcugagccugaucgccgugggccugcugcuguacugcaaggccagaugaggacuaguggaagcauuuuccuggcugauuaaaagaaauuacucagcuauggucaucuguuccuguuagaaggcuaugcagcauauuauauacuaugcgcauguuaugaaaugcauaauaaaaaauuuuaaaaaaucuaaaagaucuaaaaaaaaaaaaaaaaaaaaaaaaaaaaaaaaaaaaaaaaaaaaaaaaaaaaaaaaaaaaaaaaugcaucccccccccccccccccccccccccccccccaaaggcucuuuucagagccaccagaauu

SEQ ID NO: 7329 - RNA, 1897 nt, Artificial Sequence
  mRNA product Design d-4 comprising derived and/or modified sequence from HRSV(A2)__F-del_DSCav1_mut7 (opt5)
gggagagucccgcagucggcguccagcggcucugcuuguucgugugugugucguugcaggccuuauucaagcuuaccauggagcugcucauccugaaggccaacgcuauuaccacaauccuuacggccgugaccuucugcuuugcgagcggccagaauauuacagaagaguucuaccaauccaccuguucugcugucagcaaaggguaucuguccgcccucagaacaggaugguacaccucuguuaucacaauugaacugagcaacaucaaggagaauaaaugcaacggcaccgacgccaaggugaaacuuaucaagcaggaacuggauaaguauaaaaaugcugugacggagcuccagaugcugauguguuccacccccgccacagggucuggaagcgcuauugccuccggcgucgcggugugcaagguucugcaccucgagggggaagugaacaaaaucaagagcgcccugcuuucuaccaauaaagcugucgugucccugagcaacggaguuucugugcucacauuuaagguccuggaccuuaagaauuacauugauaaacagcugcucccuauccugaacaagcaauccuguagcauuucuaauaucgagaccgugauggaguuccagcagaaaaacaaucggcugcucgaaauuacgcgcgaguuuuccgugaacgccggcgucacaaccccgguuagcacauauaugcugaccaauuccgaacuucugucucucaucaacgacaugcccaucaccaacgaucagaagaaacugaugagcaauaacgugcaaauugugagacagcaguccuacagcaucaugugcauuaucaaggaggaaguccuugcuuaugugguucagcugccucucuacggcgugauugacacacccuguuggaaacugcauacgucuccucugugcaccacaaauaccaaggagggguccaacaucugucucacacggaccgaucgcggaugguacugcgacaaugccggcagcgucucuuucuuuccccaagcggaaacguguaaggugugcagcaacagaguuuucugcgauacaaugaacucccugacccuuccuucugaggugaaucuguguaaugucgacaucuuuaacccgaaauaugauugcaagauuaugaccagcaaaacagacguguccagcucugucaucaccucccucggggccauugugagcuguuacggaaagacaaaaugcacggcuucuaauaagaacaagggcaucauuaaaaccuucuccaaugggugugauuauguuagcaacaagggaguggacacagucuccgugggcaauacccuguacuauguuaacaaacaggagggcaagucucuuuacgugaaaggggaacccaucaucaacuuuuaugacccucuggucuuccccagcgaugaguuugacgccuccauuucucaggugaaugaaaagaucaaccaaagccucgcuuucauucggaaguccgaugagcugcugcacaaugugaacgccggaaaaagcacaaccaauaucaugauuacgaccaucauuaucguuaucauugucauccuccugucucuuauugccgugggccugcuccuguacugcaaggcucgcugaggacuaguggaagcauuuuccuggcugauuaaaagaaauuacucagcuauggucaucuguuccuguuagaaggcuaugcagcauauuauauacuaugcgcauguuaugaaaugcauaauaaaaaauuuuaaaaaaucuaaaagaucuaaaaaaaaaaaaaaaaaaaaaaaaaaaaaaaaaaaaaaaaaaaaaaaaaaaaaaaaaaaaaaaaugcaucccccccccccccccccccccccccccccccaaaggcucuuuucagagccaccagaauu

SEQ ID NO: 7330 - RNA, 1897 nt, Artificial Sequence
  mRNA product Design d-4 comprising derived and/or modified sequence from HRSV(A2)__F-del_DSCav1_mut7 (opt6)
gggagagucccgcagucggcguccagcggcucugcuuguucgugugugugucguugcaggccuuauucaagcuuaccauggaauuacuaauccucaaagcaaacgcaauuacaaccauacuaaccgcugucaccuuuuguuuugccucaggacaaaacauaacugaagaauuuuaccaaucaacaugcuccgcaguaucuaaaggauaccucagcgcguuaagaacaggaugguacacaucgguaauaaccaucgaauuauccaacauaaaagaaaauaaaugcaauggaacagacgcaaaagucaaauuaauuaaacaagaacuagacaaauauaaaaacgcaguaaccgaauuacaaaugcuaauguguucaacaccagcaacaggaucaggaucagcuauagcuucaggaguugccguaugcaaagugcuacacuuagaaggagaagugaauaaaauaaaaucagcucuauuaucaacgaacaaagccguaguaucucuaucaaauggcguaucaguacucacauucaaaguacucgaccuaaaaaacuauauagauaaacaacuauuacccauccuaaauaaacaaagcugcucuauaucaaacaucgaaacaguaauggaauuucaacaaaaaaacaacagacuacuagaaauaacccgagaguucucaguuaaugcaggaguaacaacaccagucucaacauacaugcucacaaacucagaacuccuaucacuaauaaaugacaugccaauaacaaacgaccaaaaaaaacucaugucuaacaacguccaaauaguaagacaacaauccuacagcauaauguguauaauaaaagaagaaguuuuagcauacgucguacaacuacccuuauauggcguaauagauacaccaugcuggaaacuccauaccucaccucuauguacaacaaauaccaaagaagguucuaauauaugccuaacacgaacugaccgaggaugguacugugacaacgcaggaucagucucuuucuuuccacaagcagaaaccugcaaaguaugcaguaaccgcguauuuugcgacacaaugaacucccuaaccuuaccaucagaaguaaacuuauguaacguagacauauucaauccaaaauaugacugcaaaauaaugacaucaaaaacagacguaagcucaucaguaauaacuucacuaggcgcaauuguaucaugcuauggaaaaaccaaauguaccgcauccaacaaaaauaaaggaauaauaaaaaccuucucuaacggaugcgacuacguaucaaacaaagguguagauacaguuucuguaggaaacacacucuacuauguaaauaaacaagaaggaaaaucacuauacguaaaaggagaaccaauaauaaacuucuaugacccacuuguauuuccaucugaugaauuugaugcaagcauaucacaaguaaacgaaaaaauaaaccaaucucuagccuuuauacgaaaaagcgacgaauuacuacauaacgucaacgcuggaaaaucaacaacaaacauaaugauaacaacaauaauaauaguaauaauagucauccuauuaucacuaaucgccguaggacuacuccuauacugcaaagcuagauaaggacuaguggaagcauuuuccuggcugauuaaaagaaauuacucagcuauggucaucuguuccuguuagaaggcuaugcagcauauuauauacuaugcgcauguuaugaaaugcauaauaaaaaauuuuaaaaaaucuaaaagaucuaaaaaaaaaaaaaaaaaaaaaaaaaaaaaaaaaaaaaaaaaaaaaaaaaaaaaaaaaaaaaaaaugcaucccccccccccccccccccccccccccccccaaaggcucuuuucagagccaccagaauu

SEQ ID NO: 7331 - RNA, 1897 nt, Artificial Sequence
  mRNA product Design d-4 comprising derived and/or modified sequence from HRSV(A2)__F-del_DSCav1_mut7 (opt11)
gggagagucccgcagucggcguccagcggcucugcuuguucgugugugugucguugcaggccuuauucaagcuuaccauggaacuccucauccucaaagccaacgccauaaccacuauccucacagcagucacuuucugcuucgccucaggacaaaacauaaccgaagaguucuaccaauccacaugcuccgccgucuccaaaggcuaccucucagcgcuccgcaccggcugguacacauccgucaucaccaucgaacuaagcaacauaaaagaaaacaaaugcaacggcaccgacgccaaaguuaaacucaucaagcaagaacucgacaaauacaaaaacgcagucacagaacuucaaaugcucaugugcuccacacccgccacagguucuggcucagcaaucgcaagcggcgucgccguaugcaaaguccuucaccucgaaggcgaagucaacaaaaucaaauccgcccuccucuccaccaauaaagcugucgucucacucuccaacggcgucagcguccucacauucaaaguccucgaccucaaaaacuacauagacaagcaacuccucccgauacucaacaaacaaagcugcucuaucuccaacaucgaaaccgucauggaguuccaacagaaaaacaaucgucuccucgaaaucacccgcgaguucucaguaaacgccggggucaccacaccagucuccaccuacaugcucaccaacuccgaacuccuuagccucauaaacgacaugcccauaaccaacgaccaaaagaaacucaugagcaacaacguacaaauaguccgacaacaauccuauuccaucauguguaucaucaaagaagaaguccucgcauacguaguccaacucccccuauacggcguaaucgacaccccauguuggaaacuccacaccucaccacucuguaccaccaacaccaaagaaggcucaaacaucugccucacccgcacagaccgcggcugguacugcgacaacgcgggcuccgucagcuucuuuccccaagcggaaaccugcaaagucugcagcaacagagucuucugcgacacuaugaacucccucacccuccccucagaagucaaccucugcaacgucgacaucuucaacccgaaauacgacugcaaaaucaugaccagcaaaacugacgucuccucguccgucaucaccucacucggcgcaaucgugagcugcuacggcaaaaccaaaugcaccgccuccaacaaaaacaaaggcaucauaaaaacauucagcaacggcugcgacuacgucucgaacaaaggagucgacaccguaucagugggcaacacccuauacuacguaaacaagcaagaaggcaaaucacucuacguaaaaggcgaacccaucaucaacuucuacgacccccucgucuuccccuccgacgaguucgacgccuccaucucucaagucaacgagaaaaucaaccaaucccuugccuucauacguaaaagcgacgaacuccuucacaacguaaacgccgggaaauccaccacuaacauaaugaucaccaccaucaucaucguuaucauagucauccuccucucucucauagcagucggccuacuccuguacugcaaagcgcgcuaaggacuaguggaagcauuuuccuggcugauuaaaagaaauuacucagcuauggucaucuguuccuguuagaaggcuaugcagcauauuauauacuaugcgcauguuaugaaaugcauaauaaaaaauuuuaaaaaaucuaaaagaucuaaaaaaaaaaaaaaaaaaaaaaaaaaaaaaaaaaaaaaaaaaaaaaaaaaaaaaaaaaaaaaaaugcaucccccccccccccccccccccccccccccccaaaggcucuuuucagagccaccagaauu

SEQ ID NO: 7332 - RNA, 1994 nt, Artificial Sequence
  mRNA product Design d-5 comprising derived and/or modified sequence from HRSV(A2)__F-del_DSCav1_mut7 (opt1)
gggagagggcgcuuggcuugcaaggacccugagcugcggcauugaagcacacccaacccaacucgacugaagucagccucacugaaccggaucugagaaucuucucucucugggcuugccagggcucuccgaaccuagcuagcauccucuucaauuccaacuagaaagcuuaccauggagcugcucauccugaaggccaacgccaucaccaccauccugacggcggugaccuucugcuucgccagcggccagaacaucaccgaggaguucuaccaguccacgugcagcgccgucuccaagggguaccucagcgcccugcggaccggcugguacaccuccgugaucaccaucgagcugagcaacaucaaggagaacaagugcaacgggaccgacgccaaggugaagcucaucaagcaggagcuggacaaguacaagaacgcggucacggagcugcagaugcugaugugcuccaccccggcaaccggcuccggcuccgccaucgcgagcggcgucgccgugugcaaggugcugcaccucgagggggaggucaacaagaucaagagcgcccugcuguccaccaacaaggccguggugagccucuccaacggcgucagcgugcugaccuucaaggugcuggaccucaagaacuacaucgacaagcagcugcugcccauccugaacaagcagagcugcuccaucagcaacaucgagacggugauggaguuccagcagaagaacaaccggcuccuggagaucacccgcgaguucagcgugaacgccggggucaccacccccguguccacguacaugcugaccaacagcgagcuccugucccugaucaacgacaugccgaucaccaacgaccagaagaagcucaugagcaacaacgugcagaucguccggcagcaguccuacagcaucaugugcaucaucaaggaggaggugcuggcguacgugguccagcugccccucuacggcgugaucgacacccccugcuggaagcugcacacgagcccccugugcaccaccaacaccaaggagggguccaacaucugccucacgcgcaccgaccggggcugguacugcgacaacgccggcagcgucuccuucuucccgcaggccgagaccugcaaggugugcagcaaccgcguguucugcgacaccaugaacucccugacgcugcccagcgagguaaaccucugcaacgucgacaucuucaaccccaaguacgacugcaagaucaugaccuccaagaccgacgugagcuccagcgugaucaccucccugggggccaucgucagcugcuacggcaagacgaagugcaccgccagcaacaagaacaaggggaucaucaagaccuucuccaacggcugcgacuacgugagcaacaagggcguggacaccguguccgucgggaacacccuguacuacgugaacaagcaggagggcaagagccucuacgugaagggggagcccaucaucaacuucuacgacccgcuggucuuccccuccgacgaguucgacgcgagcaucucccaggugaacgagaagaucaaccagagccuggccuucauccgcaaguccgacgagcugcuccacaacgugaacgccggcaagagcacgaccaacaucaugaucaccaccaucaucaucgucaucaucgugauccugcugucccucaucgccguggggcugcugcucuacugcaaggcccggugaggacuaguggaagcauuuuccuggcugauuaaaagaaauuacucagcuauggucaucuguuccuguuagaaggcuaugcagcauauuauauacuaugcgcauguuaugaaaugcauaauaaaaaauuuuaaaaaaucuaaaagaucuaaaaaaaaaaaaaaaaaaaaaaaaaaaaaaaaaaaaaaaaaaaaaaaaaaaaaaaaaaaaaaaaugcaucccccccccccccccccccccccccccccccaaaggcucuuuucagagccaccagaauu

SEQ ID NO: 7333 - RNA, 1994 nt, Artificial Sequence
  mRNA product Design d-5 comprising derived and/or modified sequence from HRSV(A2)__F-del_DSCav1_mut7 (opt1)
gggagagggcgcuuggcuugcaaggacccugagcugcggcauugaagcacacccaacccaacucgacugaagucagccucacugaaccggaucugagaaucuucucucucugggcuugccagggcucuccgaaccuagcuagcauccucuucaauuccaacuagaaagcuuaccauggagcugcucauccugaaggccaacgccaucaccaccauccugacggcggugaccuucugcuucgccagcggccagaacaucaccgaggaguucuaccaguccacgugcagcgccgucuccaagggguaccucagcgcccugcgcaccggcugguacaccuccgugaucaccaucgagcugagcaacaucaaggagaacaagugcaacgggaccgacgccaaggugaagcucaucaagcaggagcuggacaaguacaagaacgcggucacggagcugcagaugcucaugugcuccacccccgccaccggcagcggguccgccaucgccagcggcguggcggugugcaagguccugcaccuggagggcgaggugaacaagaucaaguccgcccuccugagcaccaacaaggccguggucucccugagcaacgggguguccgugcucacguucaagguccuggaccugaagaacuacaucgacaagcagcuccugccgauccugaacaagcagagcugcuccaucagcaacaucgagaccgugauggaguuccagcagaagaacaaccggcuccuggagaucacccgcgaguucuccgugaacgccggcgucaccacgcccgugagcaccuacaugcugaccaacagcgagcuccugucccugaucaacgacaugcccaucaccaacgaccagaagaagcucaugagcaacaacgugcagaucguccggcagcaguccuacagcaucaugugcaucaucaaggaggaggugcuggccuacgugguccagcugccccucuacggggugaucgacacgccgugcuggaagcugcacaccagcccccugugcaccaccaacacgaaggagggcagcaacaucugccucacccgcaccgaccgggggugguacugcgacaacgcgggcuccgugagcuucuucccccaggccgagaccugcaaggucugcuccaaccgcguguucugcgacacgaugaacagccugacccugcccuccgaggucaaccucugcaacguggacaucuucaacccgaaguacgacugcaagaucaugaccagcaagaccgacguguccagcuccgucaucacgagccugggcgccaucguguccugcuacgggaagaccaagugcaccgccagcaacaagaacaagggcaucaucaagaccuucuccaacgggugcgacuacgugagcaacaagggcgucgacacggugagcgugggcaacacccuguacuacgucaacaagcaggaggggaagucccucuacgugaagggcgagcccaucaucaacuucuacgacccccugguguuccccagcgacgaguucgacgccuccaucagccaggucaacgagaagaucaaccagucccuggcguucauccggaaguccgacgagcuccugcacaacgugaacgccgggaaguccaccaccaacaucaugaucaccacgaucaucaucgugaucaucgucauccugcucagccugaucgccgugggccugcuccuguacugcaaggcccgcugaggacuaguggaagcauuuuccuggcugauuaaaagaaauuacucagcuauggucaucuguuccuguuagaaggcuaugcagcauauuauauacuaugcgcauguuaugaaaugcauaauaaaaaauuuuaaaaaaucuaaaagaucuaaaaaaaaaaaaaaaaaaaaaaaaaaaaaaaaaaaaaaaaaaaaaaaaaaaaaaaaaaaaaaaaugcaucccccccccccccccccccccccccccccccaaaggcucuuuucagagccaccagaauu

SEQ ID NO: 7334 - RNA, 1994 nt, Artificial Sequence
  mRNA product Design d-5 comprising derived and/or modified sequence from HRSV(A2)__F-del_DSCav1_mut7 (opt2)
gggagagggcgcuuggcuugcaaggacccugagcugcggcauugaagcacacccaacccaacucgacugaagucagccucacugaaccggaucugagaaucuucucucucugggcuugccagggcucuccgaaccuagcuagcauccucuucaauuccaacuagaaagcuuaccauggagcuccucauccucaaggccaacgccaucaccaccauccucaccgccgucaccuucugcuucgccuccggccagaacaucaccgaggaguucuaccaguccaccugcuccgccgucuccaagggcuaccucuccgcccuccgcaccggcugguacaccuccgucaucaccaucgagcucuccaacaucaaggagaacaagugcaacggcaccgacgccaaggucaagcucaucaagcaggagcucgacaaguacaagaacgccgucaccgagcuccagaugcucaugugcuccacccccgccaccggcuccggcuccgccaucgccuccggcgucgccgucugcaagguccuccaccucgagggcgaggucaacaagaucaaguccgcccuccucuccaccaacaaggccgucgucucccucuccaacggcgucuccguccucaccuucaagguccucgaccucaagaacuacaucgacaagcagcuccuccccauccucaacaagcaguccugcuccaucuccaacaucgagaccgucauggaguuccagcagaagaacaaccgccuccucgagaucacccgcgaguucuccgucaacgccggcgucaccacccccgucuccaccuacaugcucaccaacuccgagcuccucucccucaucaacgacaugcccaucaccaacgaccagaagaagcucauguccaacaacguccagaucguccgccagcaguccuacuccaucaugugcaucaucaaggaggagguccucgccuacgucguccagcucccccucuacggcgucaucgacacccccugcuggaagcuccacaccuccccccucugcaccaccaacaccaaggagggcuccaacaucugccucacccgcaccgaccgcggcugguacugcgacaacgccggcuccgucuccuucuucccccaggccgagaccugcaaggucugcuccaaccgcgucuucugcgacaccaugaacucccucacccuccccuccgaggucaaccucugcaacgucgacaucuucaaccccaaguacgacugcaagaucaugaccuccaagaccgacgucuccuccuccgucaucaccucccucggcgccaucgucuccugcuacggcaagaccaagugcaccgccuccaacaagaacaagggcaucaucaagaccuucuccaacggcugcgacuacgucuccaacaagggcgucgacaccgucuccgucggcaacacccucuacuacgucaacaagcaggagggcaagucccucuacgucaagggcgagcccaucaucaacuucuacgacccccucgucuuccccuccgacgaguucgacgccuccaucucccaggucaacgagaagaucaaccagucccucgccuucauccgcaaguccgacgagcuccuccacaacgucaacgccggcaaguccaccaccaacaucaugaucaccaccaucaucaucgucaucaucgucauccuccucucccucaucgccgucggccuccuccucuacugcaaggcccgcugaggacuaguggaagcauuuuccuggcugauuaaaagaaauuacucagcuauggucaucuguuccuguuagaaggcuaugcagcauauuauauacuaugcgcauguuaugaaaugcauaauaaaaaauuuuaaaaaaucuaaaagaucuaaaaaaaaaaaaaaaaaaaaaaaaaaaaaaaaaaaaaaaaaaaaaaaaaaaaaaaaaaaaaaaaugcaucccccccccccccccccccccccccccccccaaaggcucuuuucagagccaccagaauu

SEQ ID NO: 7335 - RNA, 1994 nt, Artificial Sequence
  mRNA product Design d-5 comprising derived and/or modified sequence from HRSV(A2)__F-del_DSCav1_mut7 (opt3)
gggagagggcgcuuggcuugcaaggacccugagcugcggcauugaagcacacccaacccaacucgacugaagucagccucacugaaccggaucugagaaucuucucucucugggcuugccagggcucuccgaaccuagcuagcauccucuucaauuccaacuagaaagcuuaccauggagcugcucauccuuaaggccaacgcuauuaccacaauacugacugcagugacguucugcuuugccagcggccagaauaucaccgaagaguucuaccaauccacauguucugcggucucaaaaggguauuugagugcuuuaagaacuggaugguacaccagcguuauuacaaucgaacuguccaacauuaaggagaauaaaugcaacgguaccgacgccaaggugaaacuaaucaagcaggaacucgauaaguauaaaaaugcaguaacugagcugcagaugcuuauguguucuacacccgccaccggcucggggucagcuauagcaagcggaguggccgucugcaaggugcugcacuuggagggcgaaguuaacaaaaucaagagugcucuccuguccacgaauaaagccguggucucucugagcaacgguguguccguacucacuuuuaagguuuuagaccugaagaauuacauugauaaacagcuuuugccuauccugaacaagcaaucauguaguauuagcaauaucgagaccgugauggaguuccagcagaaaaacaauaggcuacucgaaauaacacgggaguuuucugucaacgcgggggugacuaccccaguguccacauauaugcugaccaauucagaacuucugagcuugauuaacgacaugccgaucacgaacgaucagaagaaacucaugaguaauaacguccaaauuguucgccagcagucuuacuccaucaugugcaucauuaaggaggaagugcuggcauauguagugcaguuaccccuguacggagucauagacacuccuuguuggaaacuccauacaagcccacuuugcaccacuaauacaaaggagggcucgaacaucugucugacccgaacggaucguggcugguacugcgacaaugccgggucuguguccuucuuuccccaagcugaaaccuguaagguuugcucaaacagaguguucugcgauacaaugaauaguuugacucuaccuagcgaggucaaccuguguaauguggacauuuuuaacccaaaauaugauugcaagaucaugaccuccaaaacagacguaucuagcucaguuauaacuagccucggagccauuguguccuguuacgguaagaccaaaugcacagcaagcaauaagaacaagggcaucaucaaaaccuucucuaaugggugugauuaugucucaaacaagggaguggacacugucagugugggcaauacgcuguacuauguuaacaaacaggaggguaagagccuuuacgugaaaggggaacccauuaucaacuuuuaugacccucugguauucccauccgaugaguuugacgcuucuauuucgcaggucaaugaaaagauaaaccaaaguuuggccuucaucaggaaguccgaugagcuccugcacaaugugaacgcgggaaaaucaacaaccaauauuaugaucacuaccaucauuauaguuaucauugugaucuuacugagucuaauugccgucggccuccugcuuuacugcaaggcacggugaggacuaguggaagcauuuuccuggcugauuaaaagaaauuacucagcuauggucaucuguuccuguuagaaggcuaugcagcauauuauauacuaugcgcauguuaugaaaugcauaauaaaaaauuuuaaaaaaucuaaaagaucuaaaaaaaaaaaaaaaaaaaaaaaaaaaaaaaaaaaaaaaaaaaaaaaaaaaaaaaaaaaaaaaaugcaucccccccccccccccccccccccccccccccaaaggcucuuuucagagccaccagaauu

SEQ ID NO: 7336 - RNA, 1994 nt, Artificial Sequence
  mRNA product Design d-5 comprising derived and/or modified sequence from HRSV(A2)__F-del_DSCav1_mut7 (opt4)
gggagagggcgcuuggcuugcaaggacccugagcugcggcauugaagcacacccaacccaacucgacugaagucagccucacugaaccggaucugagaaucuucucucucugggcuugccagggcucuccgaaccuagcuagcauccucuucaauuccaacuagaaagcuuaccauggagcugcugauccugaaggccaacgccaucaccaccauccugaccgccgugaccuucugcuucgccagcggccagaacaucaccgaggaguucuaccagagcaccugcagcgccgugagcaagggcuaccugagcgcccugagaaccggcugguacaccagcgugaucaccaucgagcugagcaacaucaaggagaacaagugcaacggcaccgacgccaaggugaagcugaucaagcaggagcuggacaaguacaagaacgccgugaccgagcugcagaugcugaugugcagcacccccgccaccggcagcggcagcgccaucgccagcggcguggccgugugcaaggugcugcaccuggagggcgaggugaacaagaucaagagcgcccugcugagcaccaacaaggccguggugagccugagcaacggcgugagcgugcugaccuucaaggugcuggaccugaagaacuacaucgacaagcagcugcugcccauccugaacaagcagagcugcagcaucagcaacaucgagaccgugauggaguuccagcagaagaacaacagacugcuggagaucaccagagaguucagcgugaacgccggcgugaccacccccgugagcaccuacaugcugaccaacagcgagcugcugagccugaucaacgacaugcccaucaccaacgaccagaagaagcugaugagcaacaacgugcagaucgugagacagcagagcuacagcaucaugugcaucaucaaggaggaggugcuggccuacguggugcagcugccccuguacggcgugaucgacacccccugcuggaagcugcacaccagcccccugugcaccaccaacaccaaggagggcagcaacaucugccugaccagaaccgacagaggcugguacugcgacaacgccggcagcgugagcuucuucccccaggccgagaccugcaaggugugcagcaacagaguguucugcgacaccaugaacagccugacccugcccagcgaggugaaccugugcaacguggacaucuucaaccccaaguacgacugcaagaucaugaccagcaagaccgacgugagcagcagcgugaucaccagccugggcgccaucgugagcugcuacggcaagaccaagugcaccgccagcaacaagaacaagggcaucaucaagaccuucagcaacggcugcgacuacgugagcaacaagggcguggacaccgugagcgugggcaacacccuguacuacgugaacaagcaggagggcaagagccuguacgugaagggcgagcccaucaucaacuucuacgacccccugguguuccccagcgacgaguucgacgccagcaucagccaggugaacgagaagaucaaccagagccuggccuucaucagaaagagcgacgagcugcugcacaacgugaacgccggcaagagcaccaccaacaucaugaucaccaccaucaucaucgugaucaucgugauccugcugagccugaucgccgugggccugcugcuguacugcaaggccagaugaggacuaguggaagcauuuuccuggcugauuaaaagaaauuacucagcuauggucaucuguuccuguuagaaggcuaugcagcauauuauauacuaugcgcauguuaugaaaugcauaauaaaaaauuuuaaaaaaucuaaaagaucuaaaaaaaaaaaaaaaaaaaaaaaaaaaaaaaaaaaaaaaaaaaaaaaaaaaaaaaaaaaaaaaaugcaucccccccccccccccccccccccccccccccaaaggcucuuuucagagccaccagaauu

SEQ ID NO: 7337 - RNA, 1994 nt, Artificial Sequence
  mRNA product Design d-5 comprising derived and/or modified sequence from HRSV(A2)__F-del_DSCav1_mut7 (opt5)
gggagagggcgcuuggcuugcaaggacccugagcugcggcauugaagcacacccaacccaacucgacugaagucagccucacugaaccggaucugagaaucuucucucucugggcuugccagggcucuccgaaccuagcuagcauccucuucaauuccaacuagaaagcuuaccauggagcugcucauccugaaggccaacgcuauuaccacaauccuuacggccgugaccuucugcuuugcgagcggccagaauauuacagaagaguucuaccaauccaccuguucugcugucagcaaaggguaucuguccgcccucagaacaggaugguacaccucuguuaucacaauugaacugagcaacaucaaggagaauaaaugcaacggcaccgacgccaaggugaaacuuaucaagcaggaacuggauaaguauaaaaaugcugugacggagcuccagaugcugauguguuccacccccgccacagggucuggaagcgcuauugccuccggcgucgcggugugcaagguucugcaccucgagggggaagugaacaaaaucaagagcgcccugcuuucuaccaauaaagcugucgugucccugagcaacggaguuucugugcucacauuuaagguccuggaccuuaagaauuacauugauaaacagcugcucccuauccugaacaagcaauccuguagcauuucuaauaucgagaccgugauggaguuccagcagaaaaacaaucggcugcucgaaauuacgcgcgaguuuuccgugaacgccggcgucacaaccccgguuagcacauauaugcugaccaauuccgaacuucugucucucaucaacgacaugcccaucaccaacgaucagaagaaacugaugagcaauaacgugcaaauugugagacagcaguccuacagcaucaugugcauuaucaaggaggaaguccuugcuuaugugguucagcugccucucuacggcgugauugacacacccuguuggaaacugcauacgucuccucugugcaccacaaauaccaaggagggguccaacaucugucucacacggaccgaucgcggaugguacugcgacaaugccggcagcgucucuuucuuuccccaagcggaaacguguaaggugugcagcaacagaguuuucugcgauacaaugaacucccugacccuuccuucugaggugaaucuguguaaugucgacaucuuuaacccgaaauaugauugcaagauuaugaccagcaaaacagacguguccagcucugucaucaccucccucggggccauugugagcuguuacggaaagacaaaaugcacggcuucuaauaagaacaagggcaucauuaaaaccuucuccaaugggugugauuauguuagcaacaagggaguggacacagucuccgugggcaauacccuguacuauguuaacaaacaggagggcaagucucuuuacgugaaaggggaacccaucaucaacuuuuaugacccucuggucuuccccagcgaugaguuugacgccuccauuucucaggugaaugaaaagaucaaccaaagccucgcuuucauucggaaguccgaugagcugcugcacaaugugaacgccggaaaaagcacaaccaauaucaugauuacgaccaucauuaucguuaucauugucauccuccugucucuuauugccgugggccugcuccuguacugcaaggcucgcugaggacuaguggaagcauuuuccuggcugauuaaaagaaauuacucagcuauggucaucuguuccuguuagaaggcuaugcagcauauuauauacuaugcgcauguuaugaaaugcauaauaaaaaauuuuaaaaaaucuaaaagaucuaaaaaaaaaaaaaaaaaaaaaaaaaaaaaaaaaaaaaaaaaaaaaaaaaaaaaaaaaaaaaaaaugcaucccccccccccccccccccccccccccccccaaaggcucuuuucagagccaccagaauu

SEQ ID NO: 7338 - RNA, 1994 nt, Artificial Sequence
  mRNA product Design d-5 comprising derived and/or modified sequence from HRSV(A2)__F-del_DSCav1_mut7 (opt6)
gggagagggcgcuuggcuugcaaggacccugagcugcggcauugaagcacacccaacccaacucgacugaagucagccucacugaaccggaucugagaaucuucucucucugggcuugccagggcucuccgaaccuagcuagcauccucuucaauuccaacuagaaagcuuaccauggaauuacuaauccucaaagcaaacgcaauuacaaccauacuaaccgcugucaccuuuuguuuugccucaggacaaaacauaacugaagaauuuuaccaaucaacaugcuccgcaguaucuaaaggauaccucagcgcguuaagaacaggaugguacacaucgguaauaaccaucgaauuauccaacauaaaagaaaauaaaugcaauggaacagacgcaaaagucaaauuaauuaaacaagaacuagacaaauauaaaaacgcaguaaccgaauuacaaaugcuaauguguucaacaccagcaacaggaucaggaucagcuauagcuucaggaguugccguaugcaaagugcuacacuuagaaggagaagugaauaaaauaaaaucagcucuauuaucaacgaacaaagccguaguaucucuaucaaauggcguaucaguacucacauucaaaguacucgaccuaaaaaacuauauagauaaacaacuauuacccauccuaaauaaacaaagcugcucuauaucaaacaucgaaacaguaauggaauuucaacaaaaaaacaacagacuacuagaaauaacccgagaguucucaguuaaugcaggaguaacaacaccagucucaacauacaugcucacaaacucagaacuccuaucacuaauaaaugacaugccaauaacaaacgaccaaaaaaaacucaugucuaacaacguccaaauaguaagacaacaauccuacagcauaauguguauaauaaaagaagaaguuuuagcauacgucguacaacuacccuuauauggcguaauagauacaccaugcuggaaacuccauaccucaccucuauguacaacaaauaccaaagaagguucuaauauaugccuaacacgaacugaccgaggaugguacugugacaacgcaggaucagucucuuucuuuccacaagcagaaaccugcaaaguaugcaguaaccgcguauuuugcgacacaaugaacucccuaaccuuaccaucagaaguaaacuuauguaacguagacauauucaauccaaaauaugacugcaaaauaaugacaucaaaaacagacguaagcucaucaguaauaacuucacuaggcgcaauuguaucaugcuauggaaaaaccaaauguaccgcauccaacaaaaauaaaggaauaauaaaaaccuucucuaacggaugcgacuacguaucaaacaaagguguagauacaguuucuguaggaaacacacucuacuauguaaauaaacaagaaggaaaaucacuauacguaaaaggagaaccaauaauaaacuucuaugacccacuuguauuuccaucugaugaauuugaugcaagcauaucacaaguaaacgaaaaaauaaaccaaucucuagccuuuauacgaaaaagcgacgaauuacuacauaacgucaacgcuggaaaaucaacaacaaacauaaugauaacaacaauaauaauaguaauaauagucauccuauuaucacuaaucgccguaggacuacuccuauacugcaaagcuagauaaggacuaguggaagcauuuuccuggcugauuaaaagaaauuacucagcuauggucaucuguuccuguuagaaggcuaugcagcauauuauauacuaugcgcauguuaugaaaugcauaauaaaaaauuuuaaaaaaucuaaaagaucuaaaaaaaaaaaaaaaaaaaaaaaaaaaaaaaaaaaaaaaaaaaaaaaaaaaaaaaaaaaaaaaaugcaucccccccccccccccccccccccccccccccaaaggcucuuuucagagccaccagaauu

SEQ ID NO: 7339 - RNA, 1994 nt, Artificial Sequence
  mRNA product Design d-5 comprising derived and/or modified sequence from HRSV(A2)__F-del_DSCav1_mut7 (opt11)
gggagagggcgcuuggcuugcaaggacccugagcugcggcauugaagcacacccaacccaacucgacugaagucagccucacugaaccggaucugagaaucuucucucucugggcuugccagggcucuccgaaccuagcuagcauccucuucaauuccaacuagaaagcuuaccauggaacuccucauccucaaagccaacgccauaaccacuauccucacagcagucacuuucugcuucgccucaggacaaaacauaaccgaagaguucuaccaauccacaugcuccgccgucuccaaaggcuaccucucagcgcuccgcaccggcugguacacauccgucaucaccaucgaacuaagcaacauaaaagaaaacaaaugcaacggcaccgacgccaaaguuaaacucaucaagcaagaacucgacaaauacaaaaacgcagucacagaacuucaaaugcucaugugcuccacacccgccacagguucuggcucagcaaucgcaagcggcgucgccguaugcaaaguccuucaccucgaaggcgaagucaacaaaaucaaauccgcccuccucuccaccaauaaagcugucgucucacucuccaacggcgucagcguccucacauucaaaguccucgaccucaaaaacuacauagacaagcaacuccucccgauacucaacaaacaaagcugcucuaucuccaacaucgaaaccgucauggaguuccaacagaaaaacaaucgucuccucgaaaucacccgcgaguucucaguaaacgccggggucaccacaccagucuccaccuacaugcucaccaacuccgaacuccuuagccucauaaacgacaugcccauaaccaacgaccaaaagaaacucaugagcaacaacguacaaauaguccgacaacaauccuauuccaucauguguaucaucaaagaagaaguccucgcauacguaguccaacucccccuauacggcguaaucgacaccccauguuggaaacuccacaccucaccacucuguaccaccaacaccaaagaaggcucaaacaucugccucacccgcacagaccgcggcugguacugcgacaacgcgggcuccgucagcuucuuuccccaagcggaaaccugcaaagucugcagcaacagagucuucugcgacacuaugaacucccucacccuccccucagaagucaaccucugcaacgucgacaucuucaacccgaaauacgacugcaaaaucaugaccagcaaaacugacgucuccucguccgucaucaccucacucggcgcaaucgugagcugcuacggcaaaaccaaaugcaccgccuccaacaaaaacaaaggcaucauaaaaacauucagcaacggcugcgacuacgucucgaacaaaggagucgacaccguaucagugggcaacacccuauacuacguaaacaagcaagaaggcaaaucacucuacguaaaaggcgaacccaucaucaacuucuacgacccccucgucuuccccuccgacgaguucgacgccuccaucucucaagucaacgagaaaaucaaccaaucccuugccuucauacguaaaagcgacgaacuccuucacaacguaaacgccgggaaauccaccacuaacauaaugaucaccaccaucaucaucguuaucauagucauccuccucucucucauagcagucggccuacuccuguacugcaaagcgcgcuaaggacuaguggaagcauuuuccuggcugauuaaaagaaauuacucagcuauggucaucuguuccuguuagaaggcuaugcagcauauuauauacuaugcgcauguuaugaaaugcauaauaaaaaauuuuaaaaaaucuaaaagaucuaaaaaaaaaaaaaaaaaaaaaaaaaaaaaaaaaaaaaaaaaaaaaaaaaaaaaaaaaaaaaaaaugcaucccccccccccccccccccccccccccccccaaaggcucuuuucagagccaccagaauu

SEQ ID NO: 7340 - RNA, 1874 nt, Artificial Sequence
  mRNA product Design e-1 comprising derived and/or modified sequence from HRSV(A2)__F-del_DSCav1_mut7 (opt1)
gggagaauauaagcguuggcggagcgucgguuguagcacucugcgcgcccgcucuucugcugcuguuugucuacuuccuccugcuuccccgccgccgccgccgccaucaagcuuaccauggagcugcucauccugaaggccaacgccaucaccaccauccugacggcggugaccuucugcuucgccagcggccagaacaucaccgaggaguucuaccaguccacgugcagcgccgucuccaagggguaccucagcgcccugcggaccggcugguacaccuccgugaucaccaucgagcugagcaacaucaaggagaacaagugcaacgggaccgacgccaaggugaagcucaucaagcaggagcuggacaaguacaagaacgcggucacggagcugcagaugcugaugugcuccaccccggcaaccggcuccggcuccgccaucgcgagcggcgucgccgugugcaaggugcugcaccucgagggggaggucaacaagaucaagagcgcccugcuguccaccaacaaggccguggugagccucuccaacggcgucagcgugcugaccuucaaggugcuggaccucaagaacuacaucgacaagcagcugcugcccauccugaacaagcagagcugcuccaucagcaacaucgagacggugauggaguuccagcagaagaacaaccggcuccuggagaucacccgcgaguucagcgugaacgccggggucaccacccccguguccacguacaugcugaccaacagcgagcuccugucccugaucaacgacaugccgaucaccaacgaccagaagaagcucaugagcaacaacgugcagaucguccggcagcaguccuacagcaucaugugcaucaucaaggaggaggugcuggcguacgugguccagcugccccucuacggcgugaucgacacccccugcuggaagcugcacacgagcccccugugcaccaccaacaccaaggagggguccaacaucugccucacgcgcaccgaccggggcugguacugcgacaacgccggcagcgucuccuucuucccgcaggccgagaccugcaaggugugcagcaaccgcguguucugcgacaccaugaacucccugacgcugcccagcgagguaaaccucugcaacgucgacaucuucaaccccaaguacgacugcaagaucaugaccuccaagaccgacgugagcuccagcgugaucaccucccugggggccaucgucagcugcuacggcaagacgaagugcaccgccagcaacaagaacaaggggaucaucaagaccuucuccaacggcugcgacuacgugagcaacaagggcguggacaccguguccgucgggaacacccuguacuacgugaacaagcaggagggcaagagccucuacgugaagggggagcccaucaucaacuucuacgacccgcuggucuuccccuccgacgaguucgacgcgagcaucucccaggugaacgagaagaucaaccagagccuggccuucauccgcaaguccgacgagcugcuccacaacgugaacgccggcaagagcacgaccaacaucaugaucaccaccaucaucaucgucaucaucgugauccugcugucccucaucgccguggggcugcugcucuacugcaaggcccggugaggacuaguguccaccugucccuccugggcugcuggauugucucguuuuccugccaaauaaacaggaucagcgcuuuacagaucuaaaaaaaaaaaaaaaaaaaaaaaaaaaaaaaaaaaaaaaaaaaaaaaaaaaaaaaaaaaaaaaaugcaucccccccccccccccccccccccccccccccaaaggcucuuuucagagccaccagaauu

SEQ ID NO: 7341 - RNA, 1874 nt, Artificial Sequence
  mRNA product Design e-1 comprising derived and/or modified sequence from HRSV(A2)__F-del_DSCav1_mut7 (opt1)
gggagaauauaagcguuggcggagcgucgguuguagcacucugcgcgcccgcucuucugcugcuguuugucuacuuccuccugcuuccccgccgccgccgccgccaucaagcuuaccauggagcugcucauccugaaggccaacgccaucaccaccauccugacggcggugaccuucugcuucgccagcggccagaacaucaccgaggaguucuaccaguccacgugcagcgccgucuccaagggguaccucagcgcccugcgcaccggcugguacaccuccgugaucaccaucgagcugagcaacaucaaggagaacaagugcaacgggaccgacgccaaggugaagcucaucaagcaggagcuggacaaguacaagaacgcggucacggagcugcagaugcucaugugcuccacccccgccaccggcagcggguccgccaucgccagcggcguggcggugugcaagguccugcaccuggagggcgaggugaacaagaucaaguccgcccuccugagcaccaacaaggccguggucucccugagcaacgggguguccgugcucacguucaagguccuggaccugaagaacuacaucgacaagcagcuccugccgauccugaacaagcagagcugcuccaucagcaacaucgagaccgugauggaguuccagcagaagaacaaccggcuccuggagaucacccgcgaguucuccgugaacgccggcgucaccacgcccgugagcaccuacaugcugaccaacagcgagcuccugucccugaucaacgacaugcccaucaccaacgaccagaagaagcucaugagcaacaacgugcagaucguccggcagcaguccuacagcaucaugugcaucaucaaggaggaggugcuggccuacgugguccagcugccccucuacggggugaucgacacgccgugcuggaagcugcacaccagcccccugugcaccaccaacacgaaggagggcagcaacaucugccucacccgcaccgaccgggggugguacugcgacaacgcgggcuccgugagcuucuucccccaggccgagaccugcaaggucugcuccaaccgcguguucugcgacacgaugaacagccugacccugcccuccgaggucaaccucugcaacguggacaucuucaacccgaaguacgacugcaagaucaugaccagcaagaccgacguguccagcuccgucaucacgagccugggcgccaucguguccugcuacgggaagaccaagugcaccgccagcaacaagaacaagggcaucaucaagaccuucuccaacgggugcgacuacgugagcaacaagggcgucgacacggugagcgugggcaacacccuguacuacgucaacaagcaggaggggaagucccucuacgugaagggcgagcccaucaucaacuucuacgacccccugguguuccccagcgacgaguucgacgccuccaucagccaggucaacgagaagaucaaccagucccuggcguucauccggaaguccgacgagcuccugcacaacgugaacgccgggaaguccaccaccaacaucaugaucaccacgaucaucaucgugaucaucgucauccugcucagccugaucgccgugggccugcuccuguacugcaaggcccgcugaggacuaguguccaccugucccuccugggcugcuggauugucucguuuuccugccaaauaaacaggaucagcgcuuuacagaucuaaaaaaaaaaaaaaaaaaaaaaaaaaaaaaaaaaaaaaaaaaaaaaaaaaaaaaaaaaaaaaaaugcaucccccccccccccccccccccccccccccccaaaggcucuuuucagagccaccagaauu

SEQ ID NO: 7342 - RNA, 1874 nt, Artificial Sequence
  mRNA product Design e-1 comprising derived and/or modified sequence from HRSV(A2)__F-del_DSCav1_mut7 (opt2)
gggagaauauaagcguuggcggagcgucgguuguagcacucugcgcgcccgcucuucugcugcuguuugucuacuuccuccugcuuccccgccgccgccgccgccaucaagcuuaccauggagcuccucauccucaaggccaacgccaucaccaccauccucaccgccgucaccuucugcuucgccuccggccagaacaucaccgaggaguucuaccaguccaccugcuccgccgucuccaagggcuaccucuccgcccuccgcaccggcugguacaccuccgucaucaccaucgagcucuccaacaucaaggagaacaagugcaacggcaccgacgccaaggucaagcucaucaagcaggagcucgacaaguacaagaacgccgucaccgagcuccagaugcucaugugcuccacccccgccaccggcuccggcuccgccaucgccuccggcgucgccgucugcaagguccuccaccucgagggcgaggucaacaagaucaaguccgcccuccucuccaccaacaaggccgucgucucccucuccaacggcgucuccguccucaccuucaagguccucgaccucaagaacuacaucgacaagcagcuccuccccauccucaacaagcaguccugcuccaucuccaacaucgagaccgucauggaguuccagcagaagaacaaccgccuccucgagaucacccgcgaguucuccgucaacgccggcgucaccacccccgucuccaccuacaugcucaccaacuccgagcuccucucccucaucaacgacaugcccaucaccaacgaccagaagaagcucauguccaacaacguccagaucguccgccagcaguccuacuccaucaugugcaucaucaaggaggagguccucgccuacgucguccagcucccccucuacggcgucaucgacacccccugcuggaagcuccacaccuccccccucugcaccaccaacaccaaggagggcuccaacaucugccucacccgcaccgaccgcggcugguacugcgacaacgccggcuccgucuccuucuucccccaggccgagaccugcaaggucugcuccaaccgcgucuucugcgacaccaugaacucccucacccuccccuccgaggucaaccucugcaacgucgacaucuucaaccccaaguacgacugcaagaucaugaccuccaagaccgacgucuccuccuccgucaucaccucccucggcgccaucgucuccugcuacggcaagaccaagugcaccgccuccaacaagaacaagggcaucaucaagaccuucuccaacggcugcgacuacgucuccaacaagggcgucgacaccgucuccgucggcaacacccucuacuacgucaacaagcaggagggcaagucccucuacgucaagggcgagcccaucaucaacuucuacgacccccucgucuuccccuccgacgaguucgacgccuccaucucccaggucaacgagaagaucaaccagucccucgccuucauccgcaaguccgacgagcuccuccacaacgucaacgccggcaaguccaccaccaacaucaugaucaccaccaucaucaucgucaucaucgucauccuccucucccucaucgccgucggccuccuccucuacugcaaggcccgcugaggacuaguguccaccugucccuccugggcugcuggauugucucguuuuccugccaaauaaacaggaucagcgcuuuacagaucuaaaaaaaaaaaaaaaaaaaaaaaaaaaaaaaaaaaaaaaaaaaaaaaaaaaaaaaaaaaaaaaaugcaucccccccccccccccccccccccccccccccaaaggcucuuuucagagccaccagaauu

SEQ ID NO: 7343 - RNA, 1874 nt, Artificial Sequence
  mRNA product Design e-1 comprising derived and/or modified sequence from HRSV(A2)__F-del_DSCav1_mut7 (opt3)
gggagaauauaagcguuggcggagcgucgguuguagcacucugcgcgcccgcucuucugcugcuguuugucuacuuccuccugcuuccccgccgccgccgccgccaucaagcuuaccauggagcugcucauccuuaaggccaacgcuauuaccacaauacugacugcagugacguucugcuuugccagcggccagaauaucaccgaagaguucuaccaauccacauguucugcggucucaaaaggguauuugagugcuuuaagaacuggaugguacaccagcguuauuacaaucgaacuguccaacauuaaggagaauaaaugcaacgguaccgacgccaaggugaaacuaaucaagcaggaacucgauaaguauaaaaaugcaguaacugagcugcagaugcuuauguguucuacacccgccaccggcucggggucagcuauagcaagcggaguggccgucugcaaggugcugcacuuggagggcgaaguuaacaaaaucaagagugcucuccuguccacgaauaaagccguggucucucugagcaacgguguguccguacucacuuuuaagguuuuagaccugaagaauuacauugauaaacagcuuuugccuauccugaacaagcaaucauguaguauuagcaauaucgagaccgugauggaguuccagcagaaaaacaauaggcuacucgaaauaacacgggaguuuucugucaacgcgggggugacuaccccaguguccacauauaugcugaccaauucagaacuucugagcuugauuaacgacaugccgaucacgaacgaucagaagaaacucaugaguaauaacguccaaauuguucgccagcagucuuacuccaucaugugcaucauuaaggaggaagugcuggcauauguagugcaguuaccccuguacggagucauagacacuccuuguuggaaacuccauacaagcccacuuugcaccacuaauacaaaggagggcucgaacaucugucugacccgaacggaucguggcugguacugcgacaaugccgggucuguguccuucuuuccccaagcugaaaccuguaagguuugcucaaacagaguguucugcgauacaaugaauaguuugacucuaccuagcgaggucaaccuguguaauguggacauuuuuaacccaaaauaugauugcaagaucaugaccuccaaaacagacguaucuagcucaguuauaacuagccucggagccauuguguccuguuacgguaagaccaaaugcacagcaagcaauaagaacaagggcaucaucaaaaccuucucuaaugggugugauuaugucucaaacaagggaguggacacugucagugugggcaauacgcuguacuauguuaacaaacaggaggguaagagccuuuacgugaaaggggaacccauuaucaacuuuuaugacccucugguauucccauccgaugaguuugacgcuucuauuucgcaggucaaugaaaagauaaaccaaaguuuggccuucaucaggaaguccgaugagcuccugcacaaugugaacgcgggaaaaucaacaaccaauauuaugaucacuaccaucauuauaguuaucauugugaucuuacugagucuaauugccgucggccuccugcuuuacugcaaggcacggugaggacuaguguccaccugucccuccugggcugcuggauugucucguuuuccugccaaauaaacaggaucagcgcuuuacagaucuaaaaaaaaaaaaaaaaaaaaaaaaaaaaaaaaaaaaaaaaaaaaaaaaaaaaaaaaaaaaaaaaugcaucccccccccccccccccccccccccccccccaaaggcucuuuucagagccaccagaauu

SEQ ID NO: 7344 - RNA, 1874 nt, Artificial Sequence
  mRNA product Design e-1 comprising derived and/or modified sequence from HRSV(A2)__F-del_DSCav1_mut7 (opt4)
gggagaauauaagcguuggcggagcgucgguuguagcacucugcgcgcccgcucuucugcugcuguuugucuacuuccuccugcuuccccgccgccgccgccgccaucaagcuuaccauggagcugcugauccugaaggccaacgccaucaccaccauccugaccgccgugaccuucugcuucgccagcggccagaacaucaccgaggaguucuaccagagcaccugcagcgccgugagcaagggcuaccugagcgcccugagaaccggcugguacaccagcgugaucaccaucgagcugagcaacaucaaggagaacaagugcaacggcaccgacgccaaggugaagcugaucaagcaggagcuggacaaguacaagaacgccgugaccgagcugcagaugcugaugugcagcacccccgccaccggcagcggcagcgccaucgccagcggcguggccgugugcaaggugcugcaccuggagggcgaggugaacaagaucaagagcgcccugcugagcaccaacaaggccguggugagccugagcaacggcgugagcgugcugaccuucaaggugcuggaccugaagaacuacaucgacaagcagcugcugcccauccugaacaagcagagcugcagcaucagcaacaucgagaccgugauggaguuccagcagaagaacaacagacugcuggagaucaccagagaguucagcgugaacgccggcgugaccacccccgugagcaccuacaugcugaccaacagcgagcugcugagccugaucaacgacaugcccaucaccaacgaccagaagaagcugaugagcaacaacgugcagaucgugagacagcagagcuacagcaucaugugcaucaucaaggaggaggugcuggccuacguggugcagcugccccuguacggcgugaucgacacccccugcuggaagcugcacaccagcccccugugcaccaccaacaccaaggagggcagcaacaucugccugaccagaaccgacagaggcugguacugcgacaacgccggcagcgugagcuucuucccccaggccgagaccugcaaggugugcagcaacagaguguucugcgacaccaugaacagccugacccugcccagcgaggugaaccugugcaacguggacaucuucaaccccaaguacgacugcaagaucaugaccagcaagaccgacgugagcagcagcgugaucaccagccugggcgccaucgugagcugcuacggcaagaccaagugcaccgccagcaacaagaacaagggcaucaucaagaccuucagcaacggcugcgacuacgugagcaacaagggcguggacaccgugagcgugggcaacacccuguacuacgugaacaagcaggagggcaagagccuguacgugaagggcgagcccaucaucaacuucuacgacccccugguguuccccagcgacgaguucgacgccagcaucagccaggugaacgagaagaucaaccagagccuggccuucaucagaaagagcgacgagcugcugcacaacgugaacgccggcaagagcaccaccaacaucaugaucaccaccaucaucaucgugaucaucgugauccugcugagccugaucgccgugggccugcugcuguacugcaaggccagaugaggacuaguguccaccugucccuccugggcugcuggauugucucguuuuccugccaaauaaacaggaucagcgcuuuacagaucuaaaaaaaaaaaaaaaaaaaaaaaaaaaaaaaaaaaaaaaaaaaaaaaaaaaaaaaaaaaaaaaaugcaucccccccccccccccccccccccccccccccaaaggcucuuuucagagccaccagaauu

SEQ ID NO: 7345 - RNA, 1874 nt, Artificial Sequence
  mRNA product Design e-1 comprising derived and/or modified sequence from HRSV(A2)__F-del_DSCav1_mut7 (opt5)
gggagaauauaagcguuggcggagcgucgguuguagcacucugcgcgcccgcucuucugcugcuguuugucuacuuccuccugcuuccccgccgccgccgccgccaucaagcuuaccauggagcugcucauccugaaggccaacgcuauuaccacaauccuuacggccgugaccuucugcuuugcgagcggccagaauauuacagaagaguucuaccaauccaccuguucugcugucagcaaaggguaucuguccgcccucagaacaggaugguacaccucuguuaucacaauugaacugagcaacaucaaggagaauaaaugcaacggcaccgacgccaaggugaaacuuaucaagcaggaacuggauaaguauaaaaaugcugugacggagcuccagaugcugauguguuccacccccgccacagggucuggaagcgcuauugccuccggcgucgcggugugcaagguucugcaccucgagggggaagugaacaaaaucaagagcgcccugcuuucuaccaauaaagcugucgugucccugagcaacggaguuucugugcucacauuuaagguccuggaccuuaagaauuacauugauaaacagcugcucccuauccugaacaagcaauccuguagcauuucuaauaucgagaccgugauggaguuccagcagaaaaacaaucggcugcucgaaauuacgcgcgaguuuuccgugaacgccggcgucacaaccccgguuagcacauauaugcugaccaauuccgaacuucugucucucaucaacgacaugcccaucaccaacgaucagaagaaacugaugagcaauaacgugcaaauugugagacagcaguccuacagcaucaugugcauuaucaaggaggaaguccuugcuuaugugguucagcugccucucuacggcgugauugacacacccuguuggaaacugcauacgucuccucugugcaccacaaauaccaaggagggguccaacaucugucucacacggaccgaucgcggaugguacugcgacaaugccggcagcgucucuuucuuuccccaagcggaaacguguaaggugugcagcaacagaguuuucugcgauacaaugaacucccugacccuuccuucugaggugaaucuguguaaugucgacaucuuuaacccgaaauaugauugcaagauuaugaccagcaaaacagacguguccagcucugucaucaccucccucggggccauugugagcuguuacggaaagacaaaaugcacggcuucuaauaagaacaagggcaucauuaaaaccuucuccaaugggugugauuauguuagcaacaagggaguggacacagucuccgugggcaauacccuguacuauguuaacaaacaggagggcaagucucuuuacgugaaaggggaacccaucaucaacuuuuaugacccucuggucuuccccagcgaugaguuugacgccuccauuucucaggugaaugaaaagaucaaccaaagccucgcuuucauucggaaguccgaugagcugcugcacaaugugaacgccggaaaaagcacaaccaauaucaugauuacgaccaucauuaucguuaucauugucauccuccugucucuuauugccgugggccugcuccuguacugcaaggcucgcugaggacuaguguccaccugucccuccugggcugcuggauugucucguuuuccugccaaauaaacaggaucagcgcuuuacagaucuaaaaaaaaaaaaaaaaaaaaaaaaaaaaaaaaaaaaaaaaaaaaaaaaaaaaaaaaaaaaaaaaugcaucccccccccccccccccccccccccccccccaaaggcucuuuucagagccaccagaauu

SEQ ID NO: 7346 - RNA, 1874 nt, Artificial Sequence
  mRNA product Design e-1 comprising derived and/or modified sequence from HRSV(A2)__F-del_DSCav1_mut7 (opt6)
gggagaauauaagcguuggcggagcgucgguuguagcacucugcgcgcccgcucuucugcugcuguuugucuacuuccuccugcuuccccgccgccgccgccgccaucaagcuuaccauggaauuacuaauccucaaagcaaacgcaauuacaaccauacuaaccgcugucaccuuuuguuuugccucaggacaaaacauaacugaagaauuuuaccaaucaacaugcuccgcaguaucuaaaggauaccucagcgcguuaagaacaggaugguacacaucgguaauaaccaucgaauuauccaacauaaaagaaaauaaaugcaauggaacagacgcaaaagucaaauuaauuaaacaagaacuagacaaauauaaaaacgcaguaaccgaauuacaaaugcuaauguguucaacaccagcaacaggaucaggaucagcuauagcuucaggaguugccguaugcaaagugcuacacuuagaaggagaagugaauaaaauaaaaucagcucuauuaucaacgaacaaagccguaguaucucuaucaaauggcguaucaguacucacauucaaaguacucgaccuaaaaaacuauauagauaaacaacuauuacccauccuaaauaaacaaagcugcucuauaucaaacaucgaaacaguaauggaauuucaacaaaaaaacaacagacuacuagaaauaacccgagaguucucaguuaaugcaggaguaacaacaccagucucaacauacaugcucacaaacucagaacuccuaucacuaauaaaugacaugccaauaacaaacgaccaaaaaaaacucaugucuaacaacguccaaauaguaagacaacaauccuacagcauaauguguauaauaaaagaagaaguuuuagcauacgucguacaacuacccuuauauggcguaauagauacaccaugcuggaaacuccauaccucaccucuauguacaacaaauaccaaagaagguucuaauauaugccuaacacgaacugaccgaggaugguacugugacaacgcaggaucagucucuuucuuuccacaagcagaaaccugcaaaguaugcaguaaccgcguauuuugcgacacaaugaacucccuaaccuuaccaucagaaguaaacuuauguaacguagacauauucaauccaaaauaugacugcaaaauaaugacaucaaaaacagacguaagcucaucaguaauaacuucacuaggcgcaauuguaucaugcuauggaaaaaccaaauguaccgcauccaacaaaaauaaaggaauaauaaaaaccuucucuaacggaugcgacuacguaucaaacaaagguguagauacaguuucuguaggaaacacacucuacuauguaaauaaacaagaaggaaaaucacuauacguaaaaggagaaccaauaauaaacuucuaugacccacuuguauuuccaucugaugaauuugaugcaagcauaucacaaguaaacgaaaaaauaaaccaaucucuagccuuuauacgaaaaagcgacgaauuacuacauaacgucaacgcuggaaaaucaacaacaaacauaaugauaacaacaauaauaauaguaauaauagucauccuauuaucacuaaucgccguaggacuacuccuauacugcaaagcuagauaaggacuaguguccaccugucccuccugggcugcuggauugucucguuuuccugccaaauaaacaggaucagcgcuuuacagaucuaaaaaaaaaaaaaaaaaaaaaaaaaaaaaaaaaaaaaaaaaaaaaaaaaaaaaaaaaaaaaaaaugcaucccccccccccccccccccccccccccccccaaaggcucuuuucagagccaccagaauu

SEQ ID NO: 7347 - RNA, 1874 nt, Artificial Sequence
  mRNA product Design e-1 comprising derived and/or modified sequence from HRSV(A2)__F-del_DSCav1_mut7 (opt11)
gggagaauauaagcguuggcggagcgucgguuguagcacucugcgcgcccgcucuucugcugcuguuugucuacuuccuccugcuuccccgccgccgccgccgccaucaagcuuaccauggaacuccucauccucaaagccaacgccauaaccacuauccucacagcagucacuuucugcuucgccucaggacaaaacauaaccgaagaguucuaccaauccacaugcuccgccgucuccaaaggcuaccucucagcgcuccgcaccggcugguacacauccgucaucaccaucgaacuaagcaacauaaaagaaaacaaaugcaacggcaccgacgccaaaguuaaacucaucaagcaagaacucgacaaauacaaaaacgcagucacagaacuucaaaugcucaugugcuccacacccgccacagguucuggcucagcaaucgcaagcggcgucgccguaugcaaaguccuucaccucgaaggcgaagucaacaaaaucaaauccgcccuccucuccaccaauaaagcugucgucucacucuccaacggcgucagcguccucacauucaaaguccucgaccucaaaaacuacauagacaagcaacuccucccgauacucaacaaacaaagcugcucuaucuccaacaucgaaaccgucauggaguuccaacagaaaaacaaucgucuccucgaaaucacccgcgaguucucaguaaacgccggggucaccacaccagucuccaccuacaugcucaccaacuccgaacuccuuagccucauaaacgacaugcccauaaccaacgaccaaaagaaacucaugagcaacaacguacaaauaguccgacaacaauccuauuccaucauguguaucaucaaagaagaaguccucgcauacguaguccaacucccccuauacggcguaaucgacaccccauguuggaaacuccacaccucaccacucuguaccaccaacaccaaagaaggcucaaacaucugccucacccgcacagaccgcggcugguacugcgacaacgcgggcuccgucagcuucuuuccccaagcggaaaccugcaaagucugcagcaacagagucuucugcgacacuaugaacucccucacccuccccucagaagucaaccucugcaacgucgacaucuucaacccgaaauacgacugcaaaaucaugaccagcaaaacugacgucuccucguccgucaucaccucacucggcgcaaucgugagcugcuacggcaaaaccaaaugcaccgccuccaacaaaaacaaaggcaucauaaaaacauucagcaacggcugcgacuacgucucgaacaaaggagucgacaccguaucagugggcaacacccuauacuacguaaacaagcaagaaggcaaaucacucuacguaaaaggcgaacccaucaucaacuucuacgacccccucgucuuccccuccgacgaguucgacgccuccaucucucaagucaacgagaaaaucaaccaaucccuugccuucauacguaaaagcgacgaacuccuucacaacguaaacgccgggaaauccaccacuaacauaaugaucaccaccaucaucaucguuaucauagucauccuccucucucucauagcagucggccuacuccuguacugcaaagcgcgcuaaggacuaguguccaccugucccuccugggcugcuggauugucucguuuuccugccaaauaaacaggaucagcgcuuuacagaucuaaaaaaaaaaaaaaaaaaaaaaaaaaaaaaaaaaaaaaaaaaaaaaaaaaaaaaaaaaaaaaaaugcaucccccccccccccccccccccccccccccccaaaggcucuuuucagagccaccagaauu

SEQ ID NO: 7348 - RNA, 1856 nt, Artificial Sequence
  mRNA product Design e-2 comprising derived and/or modified sequence from HRSV(A2)__F-del_DSCav1_mut7 (opt1)
gggagacccgugacccggaaguuguacggcuacgcgacuuucccucccacaaacccucgcgcccuuccuuuccuacuugggcccggcagaaagcuuaccauggagcugcucauccugaaggccaacgccaucaccaccauccugacggcggugaccuucugcuucgccagcggccagaacaucaccgaggaguucuaccaguccacgugcagcgccgucuccaagggguaccucagcgcccugcggaccggcugguacaccuccgugaucaccaucgagcugagcaacaucaaggagaacaagugcaacgggaccgacgccaaggugaagcucaucaagcaggagcuggacaaguacaagaacgcggucacggagcugcagaugcugaugugcuccaccccggcaaccggcuccggcuccgccaucgcgagcggcgucgccgugugcaaggugcugcaccucgagggggaggucaacaagaucaagagcgcccugcuguccaccaacaaggccguggugagccucuccaacggcgucagcgugcugaccuucaaggugcuggaccucaagaacuacaucgacaagcagcugcugcccauccugaacaagcagagcugcuccaucagcaacaucgagacggugauggaguuccagcagaagaacaaccggcuccuggagaucacccgcgaguucagcgugaacgccggggucaccacccccguguccacguacaugcugaccaacagcgagcuccugucccugaucaacgacaugccgaucaccaacgaccagaagaagcucaugagcaacaacgugcagaucguccggcagcaguccuacagcaucaugugcaucaucaaggaggaggugcuggcguacgugguccagcugccccucuacggcgugaucgacacccccugcuggaagcugcacacgagcccccugugcaccaccaacaccaaggagggguccaacaucugccucacgcgcaccgaccggggcugguacugcgacaacgccggcagcgucuccuucuucccgcaggccgagaccugcaaggugugcagcaaccgcguguucugcgacaccaugaacucccugacgcugcccagcgagguaaaccucugcaacgucgacaucuucaaccccaaguacgacugcaagaucaugaccuccaagaccgacgugagcuccagcgugaucaccucccugggggccaucgucagcugcuacggcaagacgaagugcaccgccagcaacaagaacaaggggaucaucaagaccuucuccaacggcugcgacuacgugagcaacaagggcguggacaccguguccgucgggaacacccuguacuacgugaacaagcaggagggcaagagccucuacgugaagggggagcccaucaucaacuucuacgacccgcuggucuuccccuccgacgaguucgacgcgagcaucucccaggugaacgagaagaucaaccagagccuggccuucauccgcaaguccgacgagcugcuccacaacgugaacgccggcaagagcacgaccaacaucaugaucaccaccaucaucaucgucaucaucgugauccugcugucccucaucgccguggggcugcugcucuacugcaaggcccggugaggacuaguguccaccugucccuccugggcugcuggauugucucguuuuccugccaaauaaacaggaucagcgcuuuacagaucuaaaaaaaaaaaaaaaaaaaaaaaaaaaaaaaaaaaaaaaaaaaaaaaaaaaaaaaaaaaaaaaaugcaucccccccccccccccccccccccccccccccaaaggcucuuuucagagccaccagaauu

SEQ ID NO: 7349 - RNA, 1856 nt, Artificial Sequence
  mRNA product Design e-2 comprising derived and/or modified sequence from HRSV(A2)__F-del_DSCav1_mut7 (opt1)
gggagacccgugacccggaaguuguacggcuacgcgacuuucccucccacaaacccucgcgcccuuccuuuccuacuugggcccggcagaaagcuuaccauggagcugcucauccugaaggccaacgccaucaccaccauccugacggcggugaccuucugcuucgccagcggccagaacaucaccgaggaguucuaccaguccacgugcagcgccgucuccaagggguaccucagcgcccugcgcaccggcugguacaccuccgugaucaccaucgagcugagcaacaucaaggagaacaagugcaacgggaccgacgccaaggugaagcucaucaagcaggagcuggacaaguacaagaacgcggucacggagcugcagaugcucaugugcuccacccccgccaccggcagcggguccgccaucgccagcggcguggcggugugcaagguccugcaccuggagggcgaggugaacaagaucaaguccgcccuccugagcaccaacaaggccguggucucccugagcaacgggguguccgugcucacguucaagguccuggaccugaagaacuacaucgacaagcagcuccugccgauccugaacaagcagagcugcuccaucagcaacaucgagaccgugauggaguuccagcagaagaacaaccggcuccuggagaucacccgcgaguucuccgugaacgccggcgucaccacgcccgugagcaccuacaugcugaccaacagcgagcuccugucccugaucaacgacaugcccaucaccaacgaccagaagaagcucaugagcaacaacgugcagaucguccggcagcaguccuacagcaucaugugcaucaucaaggaggaggugcuggccuacgugguccagcugccccucuacggggugaucgacacgccgugcuggaagcugcacaccagcccccugugcaccaccaacacgaaggagggcagcaacaucugccucacccgcaccgaccgggggugguacugcgacaacgcgggcuccgugagcuucuucccccaggccgagaccugcaaggucugcuccaaccgcguguucugcgacacgaugaacagccugacccugcccuccgaggucaaccucugcaacguggacaucuucaacccgaaguacgacugcaagaucaugaccagcaagaccgacguguccagcuccgucaucacgagccugggcgccaucguguccugcuacgggaagaccaagugcaccgccagcaacaagaacaagggcaucaucaagaccuucuccaacgggugcgacuacgugagcaacaagggcgucgacacggugagcgugggcaacacccuguacuacgucaacaagcaggaggggaagucccucuacgugaagggcgagcccaucaucaacuucuacgacccccugguguuccccagcgacgaguucgacgccuccaucagccaggucaacgagaagaucaaccagucccuggcguucauccggaaguccgacgagcuccugcacaacgugaacgccgggaaguccaccaccaacaucaugaucaccacgaucaucaucgugaucaucgucauccugcucagccugaucgccgugggccugcuccuguacugcaaggcccgcugaggacuaguguccaccugucccuccugggcugcuggauugucucguuuuccugccaaauaaacaggaucagcgcuuuacagaucuaaaaaaaaaaaaaaaaaaaaaaaaaaaaaaaaaaaaaaaaaaaaaaaaaaaaaaaaaaaaaaaaugcaucccccccccccccccccccccccccccccccaaaggcucuuuucagagccaccagaauu

SEQ ID NO: 7350 - RNA, 1856 nt, Artificial Sequence
  mRNA product Design e-2 comprising derived and/or modified sequence from HRSV(A2)__F-del_DSCav1_mut7 (opt2)
gggagacccgugacccggaaguuguacggcuacgcgacuuucccucccacaaacccucgcgcccuuccuuuccuacuugggcccggcagaaagcuuaccauggagcuccucauccucaaggccaacgccaucaccaccauccucaccgccgucaccuucugcuucgccuccggccagaacaucaccgaggaguucuaccaguccaccugcuccgccgucuccaagggcuaccucuccgcccuccgcaccggcugguacaccuccgucaucaccaucgagcucuccaacaucaaggagaacaagugcaacggcaccgacgccaaggucaagcucaucaagcaggagcucgacaaguacaagaacgccgucaccgagcuccagaugcucaugugcuccacccccgccaccggcuccggcuccgccaucgccuccggcgucgccgucugcaagguccuccaccucgagggcgaggucaacaagaucaaguccgcccuccucuccaccaacaaggccgucgucucccucuccaacggcgucuccguccucaccuucaagguccucgaccucaagaacuacaucgacaagcagcuccuccccauccucaacaagcaguccugcuccaucuccaacaucgagaccgucauggaguuccagcagaagaacaaccgccuccucgagaucacccgcgaguucuccgucaacgccggcgucaccacccccgucuccaccuacaugcucaccaacuccgagcuccucucccucaucaacgacaugcccaucaccaacgaccagaagaagcucauguccaacaacguccagaucguccgccagcaguccuacuccaucaugugcaucaucaaggaggagguccucgccuacgucguccagcucccccucuacggcgucaucgacacccccugcuggaagcuccacaccuccccccucugcaccaccaacaccaaggagggcuccaacaucugccucacccgcaccgaccgcggcugguacugcgacaacgccggcuccgucuccuucuucccccaggccgagaccugcaaggucugcuccaaccgcgucuucugcgacaccaugaacucccucacccuccccuccgaggucaaccucugcaacgucgacaucuucaaccccaaguacgacugcaagaucaugaccuccaagaccgacgucuccuccuccgucaucaccucccucggcgccaucgucuccugcuacggcaagaccaagugcaccgccuccaacaagaacaagggcaucaucaagaccuucuccaacggcugcgacuacgucuccaacaagggcgucgacaccgucuccgucggcaacacccucuacuacgucaacaagcaggagggcaagucccucuacgucaagggcgagcccaucaucaacuucuacgacccccucgucuuccccuccgacgaguucgacgccuccaucucccaggucaacgagaagaucaaccagucccucgccuucauccgcaaguccgacgagcuccuccacaacgucaacgccggcaaguccaccaccaacaucaugaucaccaccaucaucaucgucaucaucgucauccuccucucccucaucgccgucggccuccuccucuacugcaaggcccgcugaggacuaguguccaccugucccuccugggcugcuggauugucucguuuuccugccaaauaaacaggaucagcgcuuuacagaucuaaaaaaaaaaaaaaaaaaaaaaaaaaaaaaaaaaaaaaaaaaaaaaaaaaaaaaaaaaaaaaaaugcaucccccccccccccccccccccccccccccccaaaggcucuuuucagagccaccagaauu

SEQ ID NO: 7351 - RNA, 1856 nt, Artificial Sequence
  mRNA product Design e-2 comprising derived and/or modified sequence from HRSV(A2)__F-del_DSCav1_mut7 (opt3)
gggagacccgugacccggaaguuguacggcuacgcgacuuucccucccacaaacccucgcgcccuuccuuuccuacuugggcccggcagaaagcuuaccauggagcugcucauccuuaaggccaacgcuauuaccacaauacugacugcagugacguucugcuuugccagcggccagaauaucaccgaagaguucuaccaauccacauguucugcggucucaaaaggguauuugagugcuuuaagaacuggaugguacaccagcguuauuacaaucgaacuguccaacauuaaggagaauaaaugcaacgguaccgacgccaaggugaaacuaaucaagcaggaacucgauaaguauaaaaaugcaguaacugagcugcagaugcuuauguguucuacacccgccaccggcucggggucagcuauagcaagcggaguggccgucugcaaggugcugcacuuggagggcgaaguuaacaaaaucaagagugcucuccuguccacgaauaaagccguggucucucugagcaacgguguguccguacucacuuuuaagguuuuagaccugaagaauuacauugauaaacagcuuuugccuauccugaacaagcaaucauguaguauuagcaauaucgagaccgugauggaguuccagcagaaaaacaauaggcuacucgaaauaacacgggaguuuucugucaacgcgggggugacuaccccaguguccacauauaugcugaccaauucagaacuucugagcuugauuaacgacaugccgaucacgaacgaucagaagaaacucaugaguaauaacguccaaauuguucgccagcagucuuacuccaucaugugcaucauuaaggaggaagugcuggcauauguagugcaguuaccccuguacggagucauagacacuccuuguuggaaacuccauacaagcccacuuugcaccacuaauacaaaggagggcucgaacaucugucugacccgaacggaucguggcugguacugcgacaaugccgggucuguguccuucuuuccccaagcugaaaccuguaagguuugcucaaacagaguguucugcgauacaaugaauaguuugacucuaccuagcgaggucaaccuguguaauguggacauuuuuaacccaaaauaugauugcaagaucaugaccuccaaaacagacguaucuagcucaguuauaacuagccucggagccauuguguccuguuacgguaagaccaaaugcacagcaagcaauaagaacaagggcaucaucaaaaccuucucuaaugggugugauuaugucucaaacaagggaguggacacugucagugugggcaauacgcuguacuauguuaacaaacaggaggguaagagccuuuacgugaaaggggaacccauuaucaacuuuuaugacccucugguauucccauccgaugaguuugacgcuucuauuucgcaggucaaugaaaagauaaaccaaaguuuggccuucaucaggaaguccgaugagcuccugcacaaugugaacgcgggaaaaucaacaaccaauauuaugaucacuaccaucauuauaguuaucauugugaucuuacugagucuaauugccgucggccuccugcuuuacugcaaggcacggugaggacuaguguccaccugucccuccugggcugcuggauugucucguuuuccugccaaauaaacaggaucagcgcuuuacagaucuaaaaaaaaaaaaaaaaaaaaaaaaaaaaaaaaaaaaaaaaaaaaaaaaaaaaaaaaaaaaaaaaugcaucccccccccccccccccccccccccccccccaaaggcucuuuucagagccaccagaauu

SEQ ID NO: 7352 - RNA, 1856 nt, Artificial Sequence
  mRNA product Design e-2 comprising derived and/or modified sequence from HRSV(A2)__F-del_DSCav1_mut7 (opt4)
gggagacccgugacccggaaguuguacggcuacgcgacuuucccucccacaaacccucgcgcccuuccuuuccuacuugggcccggcagaaagcuuaccauggagcugcugauccugaaggccaacgccaucaccaccauccugaccgccgugaccuucugcuucgccagcggccagaacaucaccgaggaguucuaccagagcaccugcagcgccgugagcaagggcuaccugagcgcccugagaaccggcugguacaccagcgugaucaccaucgagcugagcaacaucaaggagaacaagugcaacggcaccgacgccaaggugaagcugaucaagcaggagcuggacaaguacaagaacgccgugaccgagcugcagaugcugaugugcagcacccccgccaccggcagcggcagcgccaucgccagcggcguggccgugugcaaggugcugcaccuggagggcgaggugaacaagaucaagagcgcccugcugagcaccaacaaggccguggugagccugagcaacggcgugagcgugcugaccuucaaggugcuggaccugaagaacuacaucgacaagcagcugcugcccauccugaacaagcagagcugcagcaucagcaacaucgagaccgugauggaguuccagcagaagaacaacagacugcuggagaucaccagagaguucagcgugaacgccggcgugaccacccccgugagcaccuacaugcugaccaacagcgagcugcugagccugaucaacgacaugcccaucaccaacgaccagaagaagcugaugagcaacaacgugcagaucgugagacagcagagcuacagcaucaugugcaucaucaaggaggaggugcuggccuacguggugcagcugccccuguacggcgugaucgacacccccugcuggaagcugcacaccagcccccugugcaccaccaacaccaaggagggcagcaacaucugccugaccagaaccgacagaggcugguacugcgacaacgccggcagcgugagcuucuucccccaggccgagaccugcaaggugugcagcaacagaguguucugcgacaccaugaacagccugacccugcccagcgaggugaaccugugcaacguggacaucuucaaccccaaguacgacugcaagaucaugaccagcaagaccgacgugagcagcagcgugaucaccagccugggcgccaucgugagcugcuacggcaagaccaagugcaccgccagcaacaagaacaagggcaucaucaagaccuucagcaacggcugcgacuacgugagcaacaagggcguggacaccgugagcgugggcaacacccuguacuacgugaacaagcaggagggcaagagccuguacgugaagggcgagcccaucaucaacuucuacgacccccugguguuccccagcgacgaguucgacgccagcaucagccaggugaacgagaagaucaaccagagccuggccuucaucagaaagagcgacgagcugcugcacaacgugaacgccggcaagagcaccaccaacaucaugaucaccaccaucaucaucgugaucaucgugauccugcugagccugaucgccgugggccugcugcuguacugcaaggccagaugaggacuaguguccaccugucccuccugggcugcuggauugucucguuuuccugccaaauaaacaggaucagcgcuuuacagaucuaaaaaaaaaaaaaaaaaaaaaaaaaaaaaaaaaaaaaaaaaaaaaaaaaaaaaaaaaaaaaaaaugcaucccccccccccccccccccccccccccccccaaaggcucuuuucagagccaccagaauu

SEQ ID NO: 7353 - RNA, 1856 nt, Artificial Sequence
  mRNA product Design e-2 comprising derived and/or modified sequence from HRSV(A2)__F-del_DSCav1_mut7 (opt5)
gggagacccgugacccggaaguuguacggcuacgcgacuuucccucccacaaacccucgcgcccuuccuuuccuacuugggcccggcagaaagcuuaccauggagcugcucauccugaaggccaacgcuauuaccacaauccuuacggccgugaccuucugcuuugcgagcggccagaauauuacagaagaguucuaccaauccaccuguucugcugucagcaaaggguaucuguccgcccucagaacaggaugguacaccucuguuaucacaauugaacugagcaacaucaaggagaauaaaugcaacggcaccgacgccaaggugaaacuuaucaagcaggaacuggauaaguauaaaaaugcugugacggagcuccagaugcugauguguuccacccccgccacagggucuggaagcgcuauugccuccggcgucgcggugugcaagguucugcaccucgagggggaagugaacaaaaucaagagcgcccugcuuucuaccaauaaagcugucgugucccugagcaacggaguuucugugcucacauuuaagguccuggaccuuaagaauuacauugauaaacagcugcucccuauccugaacaagcaauccuguagcauuucuaauaucgagaccgugauggaguuccagcagaaaaacaaucggcugcucgaaauuacgcgcgaguuuuccgugaacgccggcgucacaaccccgguuagcacauauaugcugaccaauuccgaacuucugucucucaucaacgacaugcccaucaccaacgaucagaagaaacugaugagcaauaacgugcaaauugugagacagcaguccuacagcaucaugugcauuaucaaggaggaaguccuugcuuaugugguucagcugccucucuacggcgugauugacacacccuguuggaaacugcauacgucuccucugugcaccacaaauaccaaggagggguccaacaucugucucacacggaccgaucgcggaugguacugcgacaaugccggcagcgucucuuucuuuccccaagcggaaacguguaaggugugcagcaacagaguuuucugcgauacaaugaacucccugacccuuccuucugaggugaaucuguguaaugucgacaucuuuaacccgaaauaugauugcaagauuaugaccagcaaaacagacguguccagcucugucaucaccucccucggggccauugugagcuguuacggaaagacaaaaugcacggcuucuaauaagaacaagggcaucauuaaaaccuucuccaaugggugugauuauguuagcaacaagggaguggacacagucuccgugggcaauacccuguacuauguuaacaaacaggagggcaagucucuuuacgugaaaggggaacccaucaucaacuuuuaugacccucuggucuuccccagcgaugaguuugacgccuccauuucucaggugaaugaaaagaucaaccaaagccucgcuuucauucggaaguccgaugagcugcugcacaaugugaacgccggaaaaagcacaaccaauaucaugauuacgaccaucauuaucguuaucauugucauccuccugucucuuauugccgugggccugcuccuguacugcaaggcucgcugaggacuaguguccaccugucccuccugggcugcuggauugucucguuuuccugccaaauaaacaggaucagcgcuuuacagaucuaaaaaaaaaaaaaaaaaaaaaaaaaaaaaaaaaaaaaaaaaaaaaaaaaaaaaaaaaaaaaaaaugcaucccccccccccccccccccccccccccccccaaaggcucuuuucagagccaccagaauu

SEQ ID NO: 7354 - RNA, 1856 nt, Artificial Sequence
  mRNA product Design e-2 comprising derived and/or modified sequence from HRSV(A2)__F-del_DSCav1_mut7 (opt6)
gggagacccgugacccggaaguuguacggcuacgcgacuuucccucccacaaacccucgcgcccuuccuuuccuacuugggcccggcagaaagcuuaccauggaauuacuaauccucaaagcaaacgcaauuacaaccauacuaaccgcugucaccuuuuguuuugccucaggacaaaacauaacugaagaauuuuaccaaucaacaugcuccgcaguaucuaaaggauaccucagcgcguuaagaacaggaugguacacaucgguaauaaccaucgaauuauccaacauaaaagaaaauaaaugcaauggaacagacgcaaaagucaaauuaauuaaacaagaacuagacaaauauaaaaacgcaguaaccgaauuacaaaugcuaauguguucaacaccagcaacaggaucaggaucagcuauagcuucaggaguugccguaugcaaagugcuacacuuagaaggagaagugaauaaaauaaaaucagcucuauuaucaacgaacaaagccguaguaucucuaucaaauggcguaucaguacucacauucaaaguacucgaccuaaaaaacuauauagauaaacaacuauuacccauccuaaauaaacaaagcugcucuauaucaaacaucgaaacaguaauggaauuucaacaaaaaaacaacagacuacuagaaauaacccgagaguucucaguuaaugcaggaguaacaacaccagucucaacauacaugcucacaaacucagaacuccuaucacuaauaaaugacaugccaauaacaaacgaccaaaaaaaacucaugucuaacaacguccaaauaguaagacaacaauccuacagcauaauguguauaauaaaagaagaaguuuuagcauacgucguacaacuacccuuauauggcguaauagauacaccaugcuggaaacuccauaccucaccucuauguacaacaaauaccaaagaagguucuaauauaugccuaacacgaacugaccgaggaugguacugugacaacgcaggaucagucucuuucuuuccacaagcagaaaccugcaaaguaugcaguaaccgcguauuuugcgacacaaugaacucccuaaccuuaccaucagaaguaaacuuauguaacguagacauauucaauccaaaauaugacugcaaaauaaugacaucaaaaacagacguaagcucaucaguaauaacuucacuaggcgcaauuguaucaugcuauggaaaaaccaaauguaccgcauccaacaaaaauaaaggaauaauaaaaaccuucucuaacggaugcgacuacguaucaaacaaagguguagauacaguuucuguaggaaacacacucuacuauguaaauaaacaagaaggaaaaucacuauacguaaaaggagaaccaauaauaaacuucuaugacccacuuguauuuccaucugaugaauuugaugcaagcauaucacaaguaaacgaaaaaauaaaccaaucucuagccuuuauacgaaaaagcgacgaauuacuacauaacgucaacgcuggaaaaucaacaacaaacauaaugauaacaacaauaauaauaguaauaauagucauccuauuaucacuaaucgccguaggacuacuccuauacugcaaagcuagauaaggacuaguguccaccugucccuccugggcugcuggauugucucguuuuccugccaaauaaacaggaucagcgcuuuacagaucuaaaaaaaaaaaaaaaaaaaaaaaaaaaaaaaaaaaaaaaaaaaaaaaaaaaaaaaaaaaaaaaaugcaucccccccccccccccccccccccccccccccaaaggcucuuuucagagccaccagaauu

SEQ ID NO: 7355 - RNA, 1856 nt, Artificial Sequence
  mRNA product Design e-2 comprising derived and/or modified sequence from HRSV(A2)__F-del_DSCav1_mut7 (opt11)
gggagacccgugacccggaaguuguacggcuacgcgacuuucccucccacaaacccucgcgcccuuccuuuccuacuugggcccggcagaaagcuuaccauggaacuccucauccucaaagccaacgccauaaccacuauccucacagcagucacuuucugcuucgccucaggacaaaacauaaccgaagaguucuaccaauccacaugcuccgccgucuccaaaggcuaccucucagcgcuccgcaccggcugguacacauccgucaucaccaucgaacuaagcaacauaaaagaaaacaaaugcaacggcaccgacgccaaaguuaaacucaucaagcaagaacucgacaaauacaaaaacgcagucacagaacuucaaaugcucaugugcuccacacccgccacagguucuggcucagcaaucgcaagcggcgucgccguaugcaaaguccuucaccucgaaggcgaagucaacaaaaucaaauccgcccuccucuccaccaauaaagcugucgucucacucuccaacggcgucagcguccucacauucaaaguccucgaccucaaaaacuacauagacaagcaacuccucccgauacucaacaaacaaagcugcucuaucuccaacaucgaaaccgucauggaguuccaacagaaaaacaaucgucuccucgaaaucacccgcgaguucucaguaaacgccggggucaccacaccagucuccaccuacaugcucaccaacuccgaacuccuuagccucauaaacgacaugcccauaaccaacgaccaaaagaaacucaugagcaacaacguacaaauaguccgacaacaauccuauuccaucauguguaucaucaaagaagaaguccucgcauacguaguccaacucccccuauacggcguaaucgacaccccauguuggaaacuccacaccucaccacucuguaccaccaacaccaaagaaggcucaaacaucugccucacccgcacagaccgcggcugguacugcgacaacgcgggcuccgucagcuucuuuccccaagcggaaaccugcaaagucugcagcaacagagucuucugcgacacuaugaacucccucacccuccccucagaagucaaccucugcaacgucgacaucuucaacccgaaauacgacugcaaaaucaugaccagcaaaacugacgucuccucguccgucaucaccucacucggcgcaaucgugagcugcuacggcaaaaccaaaugcaccgccuccaacaaaaacaaaggcaucauaaaaacauucagcaacggcugcgacuacgucucgaacaaaggagucgacaccguaucagugggcaacacccuauacuacguaaacaagcaagaaggcaaaucacucuacguaaaaggcgaacccaucaucaacuucuacgacccccucgucuuccccuccgacgaguucgacgccuccaucucucaagucaacgagaaaaucaaccaaucccuugccuucauacguaaaagcgacgaacuccuucacaacguaaacgccgggaaauccaccacuaacauaaugaucaccaccaucaucaucguuaucauagucauccuccucucucucauagcagucggccuacuccuguacugcaaagcgcgcuaaggacuaguguccaccugucccuccugggcugcuggauugucucguuuuccugccaaauaaacaggaucagcgcuuuacagaucuaaaaaaaaaaaaaaaaaaaaaaaaaaaaaaaaaaaaaaaaaaaaaaaaaaaaaaaaaaaaaaaaugcaucccccccccccccccccccccccccccccccaaaggcucuuuucagagccaccagaauu

SEQ ID NO: 7356 - RNA, 1826 nt, Artificial Sequence
  mRNA product Design e-3 comprising derived and/or modified sequence from HRSV(A2)__F-del_DSCav1_mut7 (opt1)
gggagacuuucccauucuguagcagaauuugguguugccuguggucuuggucccgcggagaagcuuaccauggagcugcucauccugaaggccaacgccaucaccaccauccugacggcggugaccuucugcuucgccagcggccagaacaucaccgaggaguucuaccaguccacgugcagcgccgucuccaagggguaccucagcgcccugcggaccggcugguacaccuccgugaucaccaucgagcugagcaacaucaaggagaacaagugcaacgggaccgacgccaaggugaagcucaucaagcaggagcuggacaaguacaagaacgcggucacggagcugcagaugcugaugugcuccaccccggcaaccggcuccggcuccgccaucgcgagcggcgucgccgugugcaaggugcugcaccucgagggggaggucaacaagaucaagagcgcccugcuguccaccaacaaggccguggugagccucuccaacggcgucagcgugcugaccuucaaggugcuggaccucaagaacuacaucgacaagcagcugcugcccauccugaacaagcagagcugcuccaucagcaacaucgagacggugauggaguuccagcagaagaacaaccggcuccuggagaucacccgcgaguucagcgugaacgccggggucaccacccccguguccacguacaugcugaccaacagcgagcuccugucccugaucaacgacaugccgaucaccaacgaccagaagaagcucaugagcaacaacgugcagaucguccggcagcaguccuacagcaucaugugcaucaucaaggaggaggugcuggcguacgugguccagcugccccucuacggcgugaucgacacccccugcuggaagcugcacacgagcccccugugcaccaccaacaccaaggagggguccaacaucugccucacgcgcaccgaccggggcugguacugcgacaacgccggcagcgucuccuucuucccgcaggccgagaccugcaaggugugcagcaaccgcguguucugcgacaccaugaacucccugacgcugcccagcgagguaaaccucugcaacgucgacaucuucaaccccaaguacgacugcaagaucaugaccuccaagaccgacgugagcuccagcgugaucaccucccugggggccaucgucagcugcuacggcaagacgaagugcaccgccagcaacaagaacaaggggaucaucaagaccuucuccaacggcugcgacuacgugagcaacaagggcguggacaccguguccgucgggaacacccuguacuacgugaacaagcaggagggcaagagccucuacgugaagggggagcccaucaucaacuucuacgacccgcuggucuuccccuccgacgaguucgacgcgagcaucucccaggugaacgagaagaucaaccagagccuggccuucauccgcaaguccgacgagcugcuccacaacgugaacgccggcaagagcacgaccaacaucaugaucaccaccaucaucaucgucaucaucgugauccugcugucccucaucgccguggggcugcugcucuacugcaaggcccggugaggacuaguguccaccugucccuccugggcugcuggauugucucguuuuccugccaaauaaacaggaucagcgcuuuacagaucuaaaaaaaaaaaaaaaaaaaaaaaaaaaaaaaaaaaaaaaaaaaaaaaaaaaaaaaaaaaaaaaaugcaucccccccccccccccccccccccccccccccaaaggcucuuuucagagccaccagaauu

SEQ ID NO: 7357 - RNA, 1826 nt, Artificial Sequence
  mRNA product Design e-3 comprising derived and/or modified sequence from HRSV(A2)__F-del_DSCav1_mut7 (opt1)
gggagacuuucccauucuguagcagaauuugguguugccuguggucuuggucccgcggagaagcuuaccauggagcugcucauccugaaggccaacgccaucaccaccauccugacggcggugaccuucugcuucgccagcggccagaacaucaccgaggaguucuaccaguccacgugcagcgccgucuccaagggguaccucagcgcccugcgcaccggcugguacaccuccgugaucaccaucgagcugagcaacaucaaggagaacaagugcaacgggaccgacgccaaggugaagcucaucaagcaggagcuggacaaguacaagaacgcggucacggagcugcagaugcucaugugcuccacccccgccaccggcagcggguccgccaucgccagcggcguggcggugugcaagguccugcaccuggagggcgaggugaacaagaucaaguccgcccuccugagcaccaacaaggccguggucucccugagcaacgggguguccgugcucacguucaagguccuggaccugaagaacuacaucgacaagcagcuccugccgauccugaacaagcagagcugcuccaucagcaacaucgagaccgugauggaguuccagcagaagaacaaccggcuccuggagaucacccgcgaguucuccgugaacgccggcgucaccacgcccgugagcaccuacaugcugaccaacagcgagcuccugucccugaucaacgacaugcccaucaccaacgaccagaagaagcucaugagcaacaacgugcagaucguccggcagcaguccuacagcaucaugugcaucaucaaggaggaggugcuggccuacgugguccagcugccccucuacggggugaucgacacgccgugcuggaagcugcacaccagcccccugugcaccaccaacacgaaggagggcagcaacaucugccucacccgcaccgaccgggggugguacugcgacaacgcgggcuccgugagcuucuucccccaggccgagaccugcaaggucugcuccaaccgcguguucugcgacacgaugaacagccugacccugcccuccgaggucaaccucugcaacguggacaucuucaacccgaaguacgacugcaagaucaugaccagcaagaccgacguguccagcuccgucaucacgagccugggcgccaucguguccugcuacgggaagaccaagugcaccgccagcaacaagaacaagggcaucaucaagaccuucuccaacgggugcgacuacgugagcaacaagggcgucgacacggugagcgugggcaacacccuguacuacgucaacaagcaggaggggaagucccucuacgugaagggcgagcccaucaucaacuucuacgacccccugguguuccccagcgacgaguucgacgccuccaucagccaggucaacgagaagaucaaccagucccuggcguucauccggaaguccgacgagcuccugcacaacgugaacgccgggaaguccaccaccaacaucaugaucaccacgaucaucaucgugaucaucgucauccugcucagccugaucgccgugggccugcuccuguacugcaaggcccgcugaggacuaguguccaccugucccuccugggcugcuggauugucucguuuuccugccaaauaaacaggaucagcgcuuuacagaucuaaaaaaaaaaaaaaaaaaaaaaaaaaaaaaaaaaaaaaaaaaaaaaaaaaaaaaaaaaaaaaaaugcaucccccccccccccccccccccccccccccccaaaggcucuuuucagagccaccagaauu

SEQ ID NO: 7358 - RNA, 1826 nt, Artificial Sequence
  mRNA product Design e-3 comprising derived and/or modified sequence from HRSV(A2)__F-del_DSCav1_mut7 (opt2)
gggagacuuucccauucuguagcagaauuugguguugccuguggucuuggucccgcggagaagcuuaccauggagcuccucauccucaaggccaacgccaucaccaccauccucaccgccgucaccuucugcuucgccuccggccagaacaucaccgaggaguucuaccaguccaccugcuccgccgucuccaagggcuaccucuccgcccuccgcaccggcugguacaccuccgucaucaccaucgagcucuccaacaucaaggagaacaagugcaacggcaccgacgccaaggucaagcucaucaagcaggagcucgacaaguacaagaacgccgucaccgagcuccagaugcucaugugcuccacccccgccaccggcuccggcuccgccaucgccuccggcgucgccgucugcaagguccuccaccucgagggcgaggucaacaagaucaaguccgcccuccucuccaccaacaaggccgucgucucccucuccaacggcgucuccguccucaccuucaagguccucgaccucaagaacuacaucgacaagcagcuccuccccauccucaacaagcaguccugcuccaucuccaacaucgagaccgucauggaguuccagcagaagaacaaccgccuccucgagaucacccgcgaguucuccgucaacgccggcgucaccacccccgucuccaccuacaugcucaccaacuccgagcuccucucccucaucaacgacaugcccaucaccaacgaccagaagaagcucauguccaacaacguccagaucguccgccagcaguccuacuccaucaugugcaucaucaaggaggagguccucgccuacgucguccagcucccccucuacggcgucaucgacacccccugcuggaagcuccacaccuccccccucugcaccaccaacaccaaggagggcuccaacaucugccucacccgcaccgaccgcggcugguacugcgacaacgccggcuccgucuccuucuucccccaggccgagaccugcaaggucugcuccaaccgcgucuucugcgacaccaugaacucccucacccuccccuccgaggucaaccucugcaacgucgacaucuucaaccccaaguacgacugcaagaucaugaccuccaagaccgacgucuccuccuccgucaucaccucccucggcgccaucgucuccugcuacggcaagaccaagugcaccgccuccaacaagaacaagggcaucaucaagaccuucuccaacggcugcgacuacgucuccaacaagggcgucgacaccgucuccgucggcaacacccucuacuacgucaacaagcaggagggcaagucccucuacgucaagggcgagcccaucaucaacuucuacgacccccucgucuuccccuccgacgaguucgacgccuccaucucccaggucaacgagaagaucaaccagucccucgccuucauccgcaaguccgacgagcuccuccacaacgucaacgccggcaaguccaccaccaacaucaugaucaccaccaucaucaucgucaucaucgucauccuccucucccucaucgccgucggccuccuccucuacugcaaggcccgcugaggacuaguguccaccugucccuccugggcugcuggauugucucguuuuccugccaaauaaacaggaucagcgcuuuacagaucuaaaaaaaaaaaaaaaaaaaaaaaaaaaaaaaaaaaaaaaaaaaaaaaaaaaaaaaaaaaaaaaaugcaucccccccccccccccccccccccccccccccaaaggcucuuuucagagccaccagaauu

SEQ ID NO: 7359 - RNA, 1826 nt, Artificial Sequence
  mRNA product Design e-3 comprising derived and/or modified sequence from HRSV(A2)__F-del_DSCav1_mut7 (opt3)
gggagacuuucccauucuguagcagaauuugguguugccuguggucuuggucccgcggagaagcuuaccauggagcugcucauccuuaaggccaacgcuauuaccacaauacugacugcagugacguucugcuuugccagcggccagaauaucaccgaagaguucuaccaauccacauguucugcggucucaaaaggguauuugagugcuuuaagaacuggaugguacaccagcguuauuacaaucgaacuguccaacauuaaggagaauaaaugcaacgguaccgacgccaaggugaaacuaaucaagcaggaacucgauaaguauaaaaaugcaguaacugagcugcagaugcuuauguguucuacacccgccaccggcucggggucagcuauagcaagcggaguggccgucugcaaggugcugcacuuggagggcgaaguuaacaaaaucaagagugcucuccuguccacgaauaaagccguggucucucugagcaacgguguguccguacucacuuuuaagguuuuagaccugaagaauuacauugauaaacagcuuuugccuauccugaacaagcaaucauguaguauuagcaauaucgagaccgugauggaguuccagcagaaaaacaauaggcuacucgaaauaacacgggaguuuucugucaacgcgggggugacuaccccaguguccacauauaugcugaccaauucagaacuucugagcuugauuaacgacaugccgaucacgaacgaucagaagaaacucaugaguaauaacguccaaauuguucgccagcagucuuacuccaucaugugcaucauuaaggaggaagugcuggcauauguagugcaguuaccccuguacggagucauagacacuccuuguuggaaacuccauacaagcccacuuugcaccacuaauacaaaggagggcucgaacaucugucugacccgaacggaucguggcugguacugcgacaaugccgggucuguguccuucuuuccccaagcugaaaccuguaagguuugcucaaacagaguguucugcgauacaaugaauaguuugacucuaccuagcgaggucaaccuguguaauguggacauuuuuaacccaaaauaugauugcaagaucaugaccuccaaaacagacguaucuagcucaguuauaacuagccucggagccauuguguccuguuacgguaagaccaaaugcacagcaagcaauaagaacaagggcaucaucaaaaccuucucuaaugggugugauuaugucucaaacaagggaguggacacugucagugugggcaauacgcuguacuauguuaacaaacaggaggguaagagccuuuacgugaaaggggaacccauuaucaacuuuuaugacccucugguauucccauccgaugaguuugacgcuucuauuucgcaggucaaugaaaagauaaaccaaaguuuggccuucaucaggaaguccgaugagcuccugcacaaugugaacgcgggaaaaucaacaaccaauauuaugaucacuaccaucauuauaguuaucauugugaucuuacugagucuaauugccgucggccuccugcuuuacugcaaggcacggugaggacuaguguccaccugucccuccugggcugcuggauugucucguuuuccugccaaauaaacaggaucagcgcuuuacagaucuaaaaaaaaaaaaaaaaaaaaaaaaaaaaaaaaaaaaaaaaaaaaaaaaaaaaaaaaaaaaaaaaugcaucccccccccccccccccccccccccccccccaaaggcucuuuucagagccaccagaauu

SEQ ID NO: 7360 - RNA, 1826 nt, Artificial Sequence
  mRNA product Design e-3 comprising derived and/or modified sequence from HRSV(A2)__F-del_DSCav1_mut7 (opt4)
gggagacuuucccauucuguagcagaauuugguguugccuguggucuuggucccgcggagaagcuuaccauggagcugcugauccugaaggccaacgccaucaccaccauccugaccgccgugaccuucugcuucgccagcggccagaacaucaccgaggaguucuaccagagcaccugcagcgccgugagcaagggcuaccugagcgcccugagaaccggcugguacaccagcgugaucaccaucgagcugagcaacaucaaggagaacaagugcaacggcaccgacgccaaggugaagcugaucaagcaggagcuggacaaguacaagaacgccgugaccgagcugcagaugcugaugugcagcacccccgccaccggcagcggcagcgccaucgccagcggcguggccgugugcaaggugcugcaccuggagggcgaggugaacaagaucaagagcgcccugcugagcaccaacaaggccguggugagccugagcaacggcgugagcgugcugaccuucaaggugcuggaccugaagaacuacaucgacaagcagcugcugcccauccugaacaagcagagcugcagcaucagcaacaucgagaccgugauggaguuccagcagaagaacaacagacugcuggagaucaccagagaguucagcgugaacgccggcgugaccacccccgugagcaccuacaugcugaccaacagcgagcugcugagccugaucaacgacaugcccaucaccaacgaccagaagaagcugaugagcaacaacgugcagaucgugagacagcagagcuacagcaucaugugcaucaucaaggaggaggugcuggccuacguggugcagcugccccuguacggcgugaucgacacccccugcuggaagcugcacaccagcccccugugcaccaccaacaccaaggagggcagcaacaucugccugaccagaaccgacagaggcugguacugcgacaacgccggcagcgugagcuucuucccccaggccgagaccugcaaggugugcagcaacagaguguucugcgacaccaugaacagccugacccugcccagcgaggugaaccugugcaacguggacaucuucaaccccaaguacgacugcaagaucaugaccagcaagaccgacgugagcagcagcgugaucaccagccugggcgccaucgugagcugcuacggcaagaccaagugcaccgccagcaacaagaacaagggcaucaucaagaccuucagcaacggcugcgacuacgugagcaacaagggcguggacaccgugagcgugggcaacacccuguacuacgugaacaagcaggagggcaagagccuguacgugaagggcgagcccaucaucaacuucuacgacccccugguguuccccagcgacgaguucgacgccagcaucagccaggugaacgagaagaucaaccagagccuggccuucaucagaaagagcgacgagcugcugcacaacgugaacgccggcaagagcaccaccaacaucaugaucaccaccaucaucaucgugaucaucgugauccugcugagccugaucgccgugggccugcugcuguacugcaaggccagaugaggacuaguguccaccugucccuccugggcugcuggauugucucguuuuccugccaaauaaacaggaucagcgcuuuacagaucuaaaaaaaaaaaaaaaaaaaaaaaaaaaaaaaaaaaaaaaaaaaaaaaaaaaaaaaaaaaaaaaaugcaucccccccccccccccccccccccccccccccaaaggcucuuuucagagccaccagaauu

SEQ ID NO: 7361 - RNA, 1826 nt, Artificial Sequence
  mRNA product Design e-3 comprising derived and/or modified sequence from HRSV(A2)__F-del_DSCav1_mut7 (opt5)
gggagacuuucccauucuguagcagaauuugguguugccuguggucuuggucccgcggagaagcuuaccauggagcugcucauccugaaggccaacgcuauuaccacaauccuuacggccgugaccuucugcuuugcgagcggccagaauauuacagaagaguucuaccaauccaccuguucugcugucagcaaaggguaucuguccgcccucagaacaggaugguacaccucuguuaucacaauugaacugagcaacaucaaggagaauaaaugcaacggcaccgacgccaaggugaaacuuaucaagcaggaacuggauaaguauaaaaaugcugugacggagcuccagaugcugauguguuccacccccgccacagggucuggaagcgcuauugccuccggcgucgcggugugcaagguucugcaccucgagggggaagugaacaaaaucaagagcgcccugcuuucuaccaauaaagcugucgugucccugagcaacggaguuucugugcucacauuuaagguccuggaccuuaagaauuacauugauaaacagcugcucccuauccugaacaagcaauccuguagcauuucuaauaucgagaccgugauggaguuccagcagaaaaacaaucggcugcucgaaauuacgcgcgaguuuuccgugaacgccggcgucacaaccccgguuagcacauauaugcugaccaauuccgaacuucugucucucaucaacgacaugcccaucaccaacgaucagaagaaacugaugagcaauaacgugcaaauugugagacagcaguccuacagcaucaugugcauuaucaaggaggaaguccuugcuuaugugguucagcugccucucuacggcgugauugacacacccuguuggaaacugcauacgucuccucugugcaccacaaauaccaaggagggguccaacaucugucucacacggaccgaucgcggaugguacugcgacaaugccggcagcgucucuuucuuuccccaagcggaaacguguaaggugugcagcaacagaguuuucugcgauacaaugaacucccugacccuuccuucugaggugaaucuguguaaugucgacaucuuuaacccgaaauaugauugcaagauuaugaccagcaaaacagacguguccagcucugucaucaccucccucggggccauugugagcuguuacggaaagacaaaaugcacggcuucuaauaagaacaagggcaucauuaaaaccuucuccaaugggugugauuauguuagcaacaagggaguggacacagucuccgugggcaauacccuguacuauguuaacaaacaggagggcaagucucuuuacgugaaaggggaacccaucaucaacuuuuaugacccucuggucuuccccagcgaugaguuugacgccuccauuucucaggugaaugaaaagaucaaccaaagccucgcuuucauucggaaguccgaugagcugcugcacaaugugaacgccggaaaaagcacaaccaauaucaugauuacgaccaucauuaucguuaucauugucauccuccugucucuuauugccgugggccugcuccuguacugcaaggcucgcugaggacuaguguccaccugucccuccugggcugcuggauugucucguuuuccugccaaauaaacaggaucagcgcuuuacagaucuaaaaaaaaaaaaaaaaaaaaaaaaaaaaaaaaaaaaaaaaaaaaaaaaaaaaaaaaaaaaaaaaugcaucccccccccccccccccccccccccccccccaaaggcucuuuucagagccaccagaauu

SEQ ID NO: 7362 - RNA, 1826 nt, Artificial Sequence
  mRNA product Design e-3 comprising derived and/or modified sequence from HRSV(A2)__F-del_DSCav1_mut7 (opt6)
gggagacuuucccauucuguagcagaauuugguguugccuguggucuuggucccgcggagaagcuuaccauggaauuacuaauccucaaagcaaacgcaauuacaaccauacuaaccgcugucaccuuuuguuuugccucaggacaaaacauaacugaagaauuuuaccaaucaacaugcuccgcaguaucuaaaggauaccucagcgcguuaagaacaggaugguacacaucgguaauaaccaucgaauuauccaacauaaaagaaaauaaaugcaauggaacagacgcaaaagucaaauuaauuaaacaagaacuagacaaauauaaaaacgcaguaaccgaauuacaaaugcuaauguguucaacaccagcaacaggaucaggaucagcuauagcuucaggaguugccguaugcaaagugcuacacuuagaaggagaagugaauaaaauaaaaucagcucuauuaucaacgaacaaagccguaguaucucuaucaaauggcguaucaguacucacauucaaaguacucgaccuaaaaaacuauauagauaaacaacuauuacccauccuaaauaaacaaagcugcucuauaucaaacaucgaaacaguaauggaauuucaacaaaaaaacaacagacuacuagaaauaacccgagaguucucaguuaaugcaggaguaacaacaccagucucaacauacaugcucacaaacucagaacuccuaucacuaauaaaugacaugccaauaacaaacgaccaaaaaaaacucaugucuaacaacguccaaauaguaagacaacaauccuacagcauaauguguauaauaaaagaagaaguuuuagcauacgucguacaacuacccuuauauggcguaauagauacaccaugcuggaaacuccauaccucaccucuauguacaacaaauaccaaagaagguucuaauauaugccuaacacgaacugaccgaggaugguacugugacaacgcaggaucagucucuuucuuuccacaagcagaaaccugcaaaguaugcaguaaccgcguauuuugcgacacaaugaacucccuaaccuuaccaucagaaguaaacuuauguaacguagacauauucaauccaaaauaugacugcaaaauaaugacaucaaaaacagacguaagcucaucaguaauaacuucacuaggcgcaauuguaucaugcuauggaaaaaccaaauguaccgcauccaacaaaaauaaaggaauaauaaaaaccuucucuaacggaugcgacuacguaucaaacaaagguguagauacaguuucuguaggaaacacacucuacuauguaaauaaacaagaaggaaaaucacuauacguaaaaggagaaccaauaauaaacuucuaugacccacuuguauuuccaucugaugaauuugaugcaagcauaucacaaguaaacgaaaaaauaaaccaaucucuagccuuuauacgaaaaagcgacgaauuacuacauaacgucaacgcuggaaaaucaacaacaaacauaaugauaacaacaauaauaauaguaauaauagucauccuauuaucacuaaucgccguaggacuacuccuauacugcaaagcuagauaaggacuaguguccaccugucccuccugggcugcuggauugucucguuuuccugccaaauaaacaggaucagcgcuuuacagaucuaaaaaaaaaaaaaaaaaaaaaaaaaaaaaaaaaaaaaaaaaaaaaaaaaaaaaaaaaaaaaaaaugcaucccccccccccccccccccccccccccccccaaaggcucuuuucagagccaccagaauu

SEQ ID NO: 7363 - RNA, 1826 nt, Artificial Sequence
  mRNA product Design e-3 comprising derived and/or modified sequence from HRSV(A2)__F-del_DSCav1_mut7 (opt11)
gggagacuuucccauucuguagcagaauuugguguugccuguggucuuggucccgcggagaagcuuaccauggaacuccucauccucaaagccaacgccauaaccacuauccucacagcagucacuuucugcuucgccucaggacaaaacauaaccgaagaguucuaccaauccacaugcuccgccgucuccaaaggcuaccucucagcgcuccgcaccggcugguacacauccgucaucaccaucgaacuaagcaacauaaaagaaaacaaaugcaacggcaccgacgccaaaguuaaacucaucaagcaagaacucgacaaauacaaaaacgcagucacagaacuucaaaugcucaugugcuccacacccgccacagguucuggcucagcaaucgcaagcggcgucgccguaugcaaaguccuucaccucgaaggcgaagucaacaaaaucaaauccgcccuccucuccaccaauaaagcugucgucucacucuccaacggcgucagcguccucacauucaaaguccucgaccucaaaaacuacauagacaagcaacuccucccgauacucaacaaacaaagcugcucuaucuccaacaucgaaaccgucauggaguuccaacagaaaaacaaucgucuccucgaaaucacccgcgaguucucaguaaacgccggggucaccacaccagucuccaccuacaugcucaccaacuccgaacuccuuagccucauaaacgacaugcccauaaccaacgaccaaaagaaacucaugagcaacaacguacaaauaguccgacaacaauccuauuccaucauguguaucaucaaagaagaaguccucgcauacguaguccaacucccccuauacggcguaaucgacaccccauguuggaaacuccacaccucaccacucuguaccaccaacaccaaagaaggcucaaacaucugccucacccgcacagaccgcggcugguacugcgacaacgcgggcuccgucagcuucuuuccccaagcggaaaccugcaaagucugcagcaacagagucuucugcgacacuaugaacucccucacccuccccucagaagucaaccucugcaacgucgacaucuucaacccgaaauacgacugcaaaaucaugaccagcaaaacugacgucuccucguccgucaucaccucacucggcgcaaucgugagcugcuacggcaaaaccaaaugcaccgccuccaacaaaaacaaaggcaucauaaaaacauucagcaacggcugcgacuacgucucgaacaaaggagucgacaccguaucagugggcaacacccuauacuacguaaacaagcaagaaggcaaaucacucuacguaaaaggcgaacccaucaucaacuucuacgacccccucgucuuccccuccgacgaguucgacgccuccaucucucaagucaacgagaaaaucaaccaaucccuugccuucauacguaaaagcgacgaacuccuucacaacguaaacgccgggaaauccaccacuaacauaaugaucaccaccaucaucaucguuaucauagucauccuccucucucucauagcagucggccuacuccuguacugcaaagcgcgcuaaggacuaguguccaccugucccuccugggcugcuggauugucucguuuuccugccaaauaaacaggaucagcgcuuuacagaucuaaaaaaaaaaaaaaaaaaaaaaaaaaaaaaaaaaaaaaaaaaaaaaaaaaaaaaaaaaaaaaaaugcaucccccccccccccccccccccccccccccccaaaggcucuuuucagagccaccagaauu

SEQ ID NO: 7364 - RNA, 1880 nt, Artificial Sequence
  mRNA product Design e-4 comprising derived and/or modified sequence from HRSV(A2)__F-del_DSCav1_mut7 (opt1)
gggagacuccugucgggcggaaguaggaggaguagaguuuaaaaacaguacucuuuuuccgguucgggacguaguugaagcaacgacaagccggauaaccgcucuugagacaggaagcuuaccauggagcugcucauccugaaggccaacgccaucaccaccauccugacggcggugaccuucugcuucgccagcggccagaacaucaccgaggaguucuaccaguccacgugcagcgccgucuccaagggguaccucagcgcccugcggaccggcugguacaccuccgugaucaccaucgagcugagcaacaucaaggagaacaagugcaacgggaccgacgccaaggugaagcucaucaagcaggagcuggacaaguacaagaacgcggucacggagcugcagaugcugaugugcuccaccccggcaaccggcuccggcuccgccaucgcgagcggcgucgccgugugcaaggugcugcaccucgagggggaggucaacaagaucaagagcgcccugcuguccaccaacaaggccguggugagccucuccaacggcgucagcgugcugaccuucaaggugcuggaccucaagaacuacaucgacaagcagcugcugcccauccugaacaagcagagcugcuccaucagcaacaucgagacggugauggaguuccagcagaagaacaaccggcuccuggagaucacccgcgaguucagcgugaacgccggggucaccacccccguguccacguacaugcugaccaacagcgagcuccugucccugaucaacgacaugccgaucaccaacgaccagaagaagcucaugagcaacaacgugcagaucguccggcagcaguccuacagcaucaugugcaucaucaaggaggaggugcuggcguacgugguccagcugccccucuacggcgugaucgacacccccugcuggaagcugcacacgagcccccugugcaccaccaacaccaaggagggguccaacaucugccucacgcgcaccgaccggggcugguacugcgacaacgccggcagcgucuccuucuucccgcaggccgagaccugcaaggugugcagcaaccgcguguucugcgacaccaugaacucccugacgcugcccagcgagguaaaccucugcaacgucgacaucuucaaccccaaguacgacugcaagaucaugaccuccaagaccgacgugagcuccagcgugaucaccucccugggggccaucgucagcugcuacggcaagacgaagugcaccgccagcaacaagaacaaggggaucaucaagaccuucuccaacggcugcgacuacgugagcaacaagggcguggacaccguguccgucgggaacacccuguacuacgugaacaagcaggagggcaagagccucuacgugaagggggagcccaucaucaacuucuacgacccgcuggucuuccccuccgacgaguucgacgcgagcaucucccaggugaacgagaagaucaaccagagccuggccuucauccgcaaguccgacgagcugcuccacaacgugaacgccggcaagagcacgaccaacaucaugaucaccaccaucaucaucgucaucaucgugauccugcugucccucaucgccguggggcugcugcucuacugcaaggcccggugaggacuaguguccaccugucccuccugggcugcuggauugucucguuuuccugccaaauaaacaggaucagcgcuuuacagaucuaaaaaaaaaaaaaaaaaaaaaaaaaaaaaaaaaaaaaaaaaaaaaaaaaaaaaaaaaaaaaaaaugcaucccccccccccccccccccccccccccccccaaaggcucuuuucagagccaccagaauu

SEQ ID NO: 7365 - RNA, 1880 nt, Artificial Sequence
  mRNA product Design e-4 comprising derived and/or modified sequence from HRSV(A2)__F-del_DSCav1_mut7 (opt1)
gggagacuccugucgggcggaaguaggaggaguagaguuuaaaaacaguacucuuuuuccgguucgggacguaguugaagcaacgacaagccggauaaccgcucuugagacaggaagcuuaccauggagcugcucauccugaaggccaacgccaucaccaccauccugacggcggugaccuucugcuucgccagcggccagaacaucaccgaggaguucuaccaguccacgugcagcgccgucuccaagggguaccucagcgcccugcgcaccggcugguacaccuccgugaucaccaucgagcugagcaacaucaaggagaacaagugcaacgggaccgacgccaaggugaagcucaucaagcaggagcuggacaaguacaagaacgcggucacggagcugcagaugcucaugugcuccacccccgccaccggcagcggguccgccaucgccagcggcguggcggugugcaagguccugcaccuggagggcgaggugaacaagaucaaguccgcccuccugagcaccaacaaggccguggucucccugagcaacgggguguccgugcucacguucaagguccuggaccugaagaacuacaucgacaagcagcuccugccgauccugaacaagcagagcugcuccaucagcaacaucgagaccgugauggaguuccagcagaagaacaaccggcuccuggagaucacccgcgaguucuccgugaacgccggcgucaccacgcccgugagcaccuacaugcugaccaacagcgagcuccugucccugaucaacgacaugcccaucaccaacgaccagaagaagcucaugagcaacaacgugcagaucguccggcagcaguccuacagcaucaugugcaucaucaaggaggaggugcuggccuacgugguccagcugccccucuacggggugaucgacacgccgugcuggaagcugcacaccagcccccugugcaccaccaacacgaaggagggcagcaacaucugccucacccgcaccgaccgggggugguacugcgacaacgcgggcuccgugagcuucuucccccaggccgagaccugcaaggucugcuccaaccgcguguucugcgacacgaugaacagccugacccugcccuccgaggucaaccucugcaacguggacaucuucaacccgaaguacgacugcaagaucaugaccagcaagaccgacguguccagcuccgucaucacgagccugggcgccaucguguccugcuacgggaagaccaagugcaccgccagcaacaagaacaagggcaucaucaagaccuucuccaacgggugcgacuacgugagcaacaagggcgucgacacggugagcgugggcaacacccuguacuacgucaacaagcaggaggggaagucccucuacgugaagggcgagcccaucaucaacuucuacgacccccugguguuccccagcgacgaguucgacgccuccaucagccaggucaacgagaagaucaaccagucccuggcguucauccggaaguccgacgagcuccugcacaacgugaacgccgggaaguccaccaccaacaucaugaucaccacgaucaucaucgugaucaucgucauccugcucagccugaucgccgugggccugcuccuguacugcaaggcccgcugaggacuaguguccaccugucccuccugggcugcuggauugucucguuuuccugccaaauaaacaggaucagcgcuuuacagaucuaaaaaaaaaaaaaaaaaaaaaaaaaaaaaaaaaaaaaaaaaaaaaaaaaaaaaaaaaaaaaaaaugcaucccccccccccccccccccccccccccccccaaaggcucuuuucagagccaccagaauu

SEQ ID NO: 7366 - RNA, 1880 nt, Artificial Sequence
  mRNA product Design e-4 comprising derived and/or modified sequence from HRSV(A2)__F-del_DSCav1_mut7 (opt2)
gggagacuccugucgggcggaaguaggaggaguagaguuuaaaaacaguacucuuuuuccgguucgggacguaguugaagcaacgacaagccggauaaccgcucuugagacaggaagcuuaccauggagcuccucauccucaaggccaacgccaucaccaccauccucaccgccgucaccuucugcuucgccuccggccagaacaucaccgaggaguucuaccaguccaccugcuccgccgucuccaagggcuaccucuccgcccuccgcaccggcugguacaccuccgucaucaccaucgagcucuccaacaucaaggagaacaagugcaacggcaccgacgccaaggucaagcucaucaagcaggagcucgacaaguacaagaacgccgucaccgagcuccagaugcucaugugcuccacccccgccaccggcuccggcuccgccaucgccuccggcgucgccgucugcaagguccuccaccucgagggcgaggucaacaagaucaaguccgcccuccucuccaccaacaaggccgucgucucccucuccaacggcgucuccguccucaccuucaagguccucgaccucaagaacuacaucgacaagcagcuccuccccauccucaacaagcaguccugcuccaucuccaacaucgagaccgucauggaguuccagcagaagaacaaccgccuccucgagaucacccgcgaguucuccgucaacgccggcgucaccacccccgucuccaccuacaugcucaccaacuccgagcuccucucccucaucaacgacaugcccaucaccaacgaccagaagaagcucauguccaacaacguccagaucguccgccagcaguccuacuccaucaugugcaucaucaaggaggagguccucgccuacgucguccagcucccccucuacggcgucaucgacacccccugcuggaagcuccacaccuccccccucugcaccaccaacaccaaggagggcuccaacaucugccucacccgcaccgaccgcggcugguacugcgacaacgccggcuccgucuccuucuucccccaggccgagaccugcaaggucugcuccaaccgcgucuucugcgacaccaugaacucccucacccuccccuccgaggucaaccucugcaacgucgacaucuucaaccccaaguacgacugcaagaucaugaccuccaagaccgacgucuccuccuccgucaucaccucccucggcgccaucgucuccugcuacggcaagaccaagugcaccgccuccaacaagaacaagggcaucaucaagaccuucuccaacggcugcgacuacgucuccaacaagggcgucgacaccgucuccgucggcaacacccucuacuacgucaacaagcaggagggcaagucccucuacgucaagggcgagcccaucaucaacuucuacgacccccucgucuuccccuccgacgaguucgacgccuccaucucccaggucaacgagaagaucaaccagucccucgccuucauccgcaaguccgacgagcuccuccacaacgucaacgccggcaaguccaccaccaacaucaugaucaccaccaucaucaucgucaucaucgucauccuccucucccucaucgccgucggccuccuccucuacugcaaggcccgcugaggacuaguguccaccugucccuccugggcugcuggauugucucguuuuccugccaaauaaacaggaucagcgcuuuacagaucuaaaaaaaaaaaaaaaaaaaaaaaaaaaaaaaaaaaaaaaaaaaaaaaaaaaaaaaaaaaaaaaaugcaucccccccccccccccccccccccccccccccaaaggcucuuuucagagccaccagaauu

SEQ ID NO: 7367 - RNA, 1880 nt, Artificial Sequence
  mRNA product Design e-4 comprising derived and/or modified sequence from HRSV(A2)__F-del_DSCav1_mut7 (opt3)
gggagacuccugucgggcggaaguaggaggaguagaguuuaaaaacaguacucuuuuuccgguucgggacguaguugaagcaacgacaagccggauaaccgcucuugagacaggaagcuuaccauggagcugcucauccuuaaggccaacgcuauuaccacaauacugacugcagugacguucugcuuugccagcggccagaauaucaccgaagaguucuaccaauccacauguucugcggucucaaaaggguauuugagugcuuuaagaacuggaugguacaccagcguuauuacaaucgaacuguccaacauuaaggagaauaaaugcaacgguaccgacgccaaggugaaacuaaucaagcaggaacucgauaaguauaaaaaugcaguaacugagcugcagaugcuuauguguucuacacccgccaccggcucggggucagcuauagcaagcggaguggccgucugcaaggugcugcacuuggagggcgaaguuaacaaaaucaagagugcucuccuguccacgaauaaagccguggucucucugagcaacgguguguccguacucacuuuuaagguuuuagaccugaagaauuacauugauaaacagcuuuugccuauccugaacaagcaaucauguaguauuagcaauaucgagaccgugauggaguuccagcagaaaaacaauaggcuacucgaaauaacacgggaguuuucugucaacgcgggggugacuaccccaguguccacauauaugcugaccaauucagaacuucugagcuugauuaacgacaugccgaucacgaacgaucagaagaaacucaugaguaauaacguccaaauuguucgccagcagucuuacuccaucaugugcaucauuaaggaggaagugcuggcauauguagugcaguuaccccuguacggagucauagacacuccuuguuggaaacuccauacaagcccacuuugcaccacuaauacaaaggagggcucgaacaucugucugacccgaacggaucguggcugguacugcgacaaugccgggucuguguccuucuuuccccaagcugaaaccuguaagguuugcucaaacagaguguucugcgauacaaugaauaguuugacucuaccuagcgaggucaaccuguguaauguggacauuuuuaacccaaaauaugauugcaagaucaugaccuccaaaacagacguaucuagcucaguuauaacuagccucggagccauuguguccuguuacgguaagaccaaaugcacagcaagcaauaagaacaagggcaucaucaaaaccuucucuaaugggugugauuaugucucaaacaagggaguggacacugucagugugggcaauacgcuguacuauguuaacaaacaggaggguaagagccuuuacgugaaaggggaacccauuaucaacuuuuaugacccucugguauucccauccgaugaguuugacgcuucuauuucgcaggucaaugaaaagauaaaccaaaguuuggccuucaucaggaaguccgaugagcuccugcacaaugugaacgcgggaaaaucaacaaccaauauuaugaucacuaccaucauuauaguuaucauugugaucuuacugagucuaauugccgucggccuccugcuuuacugcaaggcacggugaggacuaguguccaccugucccuccugggcugcuggauugucucguuuuccugccaaauaaacaggaucagcgcuuuacagaucuaaaaaaaaaaaaaaaaaaaaaaaaaaaaaaaaaaaaaaaaaaaaaaaaaaaaaaaaaaaaaaaaugcaucccccccccccccccccccccccccccccccaaaggcucuuuucagagccaccagaauu

SEQ ID NO: 7368 - RNA, 1880 nt, Artificial Sequence
  mRNA product Design e-4 comprising derived and/or modified sequence from HRSV(A2)__F-del_DSCav1_mut7 (opt4)
gggagacuccugucgggcggaaguaggaggaguagaguuuaaaaacaguacucuuuuuccgguucgggacguaguugaagcaacgacaagccggauaaccgcucuugagacaggaagcuuaccauggagcugcugauccugaaggccaacgccaucaccaccauccugaccgccgugaccuucugcuucgccagcggccagaacaucaccgaggaguucuaccagagcaccugcagcgccgugagcaagggcuaccugagcgcccugagaaccggcugguacaccagcgugaucaccaucgagcugagcaacaucaaggagaacaagugcaacggcaccgacgccaaggugaagcugaucaagcaggagcuggacaaguacaagaacgccgugaccgagcugcagaugcugaugugcagcacccccgccaccggcagcggcagcgccaucgccagcggcguggccgugugcaaggugcugcaccuggagggcgaggugaacaagaucaagagcgcccugcugagcaccaacaaggccguggugagccugagcaacggcgugagcgugcugaccuucaaggugcuggaccugaagaacuacaucgacaagcagcugcugcccauccugaacaagcagagcugcagcaucagcaacaucgagaccgugauggaguuccagcagaagaacaacagacugcuggagaucaccagagaguucagcgugaacgccggcgugaccacccccgugagcaccuacaugcugaccaacagcgagcugcugagccugaucaacgacaugcccaucaccaacgaccagaagaagcugaugagcaacaacgugcagaucgugagacagcagagcuacagcaucaugugcaucaucaaggaggaggugcuggccuacguggugcagcugccccuguacggcgugaucgacacccccugcuggaagcugcacaccagcccccugugcaccaccaacaccaaggagggcagcaacaucugccugaccagaaccgacagaggcugguacugcgacaacgccggcagcgugagcuucuucccccaggccgagaccugcaaggugugcagcaacagaguguucugcgacaccaugaacagccugacccugcccagcgaggugaaccugugcaacguggacaucuucaaccccaaguacgacugcaagaucaugaccagcaagaccgacgugagcagcagcgugaucaccagccugggcgccaucgugagcugcuacggcaagaccaagugcaccgccagcaacaagaacaagggcaucaucaagaccuucagcaacggcugcgacuacgugagcaacaagggcguggacaccgugagcgugggcaacacccuguacuacgugaacaagcaggagggcaagagccuguacgugaagggcgagcccaucaucaacuucuacgacccccugguguuccccagcgacgaguucgacgccagcaucagccaggugaacgagaagaucaaccagagccuggccuucaucagaaagagcgacgagcugcugcacaacgugaacgccggcaagagcaccaccaacaucaugaucaccaccaucaucaucgugaucaucgugauccugcugagccugaucgccgugggccugcugcuguacugcaaggccagaugaggacuaguguccaccugucccuccugggcugcuggauugucucguuuuccugccaaauaaacaggaucagcgcuuuacagaucuaaaaaaaaaaaaaaaaaaaaaaaaaaaaaaaaaaaaaaaaaaaaaaaaaaaaaaaaaaaaaaaaugcaucccccccccccccccccccccccccccccccaaaggcucuuuucagagccaccagaauu

SEQ ID NO: 7369 - RNA, 1880 nt, Artificial Sequence
  mRNA product Design e-4 comprising derived and/or modified sequence from HRSV(A2)__F-del_DSCav1_mut7 (opt5)
gggagacuccugucgggcggaaguaggaggaguagaguuuaaaaacaguacucuuuuuccgguucgggacguaguugaagcaacgacaagccggauaaccgcucuugagacaggaagcuuaccauggagcugcucauccugaaggccaacgcuauuaccacaauccuuacggccgugaccuucugcuuugcgagcggccagaauauuacagaagaguucuaccaauccaccuguucugcugucagcaaaggguaucuguccgcccucagaacaggaugguacaccucuguuaucacaauugaacugagcaacaucaaggagaauaaaugcaacggcaccgacgccaaggugaaacuuaucaagcaggaacuggauaaguauaaaaaugcugugacggagcuccagaugcugauguguuccacccccgccacagggucuggaagcgcuauugccuccggcgucgcggugugcaagguucugcaccucgagggggaagugaacaaaaucaagagcgcccugcuuucuaccaauaaagcugucgugucccugagcaacggaguuucugugcucacauuuaagguccuggaccuuaagaauuacauugauaaacagcugcucccuauccugaacaagcaauccuguagcauuucuaauaucgagaccgugauggaguuccagcagaaaaacaaucggcugcucgaaauuacgcgcgaguuuuccgugaacgccggcgucacaaccccgguuagcacauauaugcugaccaauuccgaacuucugucucucaucaacgacaugcccaucaccaacgaucagaagaaacugaugagcaauaacgugcaaauugugagacagcaguccuacagcaucaugugcauuaucaaggaggaaguccuugcuuaugugguucagcugccucucuacggcgugauugacacacccuguuggaaacugcauacgucuccucugugcaccacaaauaccaaggagggguccaacaucugucucacacggaccgaucgcggaugguacugcgacaaugccggcagcgucucuuucuuuccccaagcggaaacguguaaggugugcagcaacagaguuuucugcgauacaaugaacucccugacccuuccuucugaggugaaucuguguaaugucgacaucuuuaacccgaaauaugauugcaagauuaugaccagcaaaacagacguguccagcucugucaucaccucccucggggccauugugagcuguuacggaaagacaaaaugcacggcuucuaauaagaacaagggcaucauuaaaaccuucuccaaugggugugauuauguuagcaacaagggaguggacacagucuccgugggcaauacccuguacuauguuaacaaacaggagggcaagucucuuuacgugaaaggggaacccaucaucaacuuuuaugacccucuggucuuccccagcgaugaguuugacgccuccauuucucaggugaaugaaaagaucaaccaaagccucgcuuucauucggaaguccgaugagcugcugcacaaugugaacgccggaaaaagcacaaccaauaucaugauuacgaccaucauuaucguuaucauugucauccuccugucucuuauugccgugggccugcuccuguacugcaaggcucgcugaggacuaguguccaccugucccuccugggcugcuggauugucucguuuuccugccaaauaaacaggaucagcgcuuuacagaucuaaaaaaaaaaaaaaaaaaaaaaaaaaaaaaaaaaaaaaaaaaaaaaaaaaaaaaaaaaaaaaaaugcaucccccccccccccccccccccccccccccccaaaggcucuuuucagagccaccagaauu

SEQ ID NO: 7370 - RNA, 1880 nt, Artificial Sequence
  mRNA product Design e-4 comprising derived and/or modified sequence from HRSV(A2)__F-del_DSCav1_mut7 (opt6)
gggagacuccugucgggcggaaguaggaggaguagaguuuaaaaacaguacucuuuuuccgguucgggacguaguugaagcaacgacaagccggauaaccgcucuugagacaggaagcuuaccauggaauuacuaauccucaaagcaaacgcaauuacaaccauacuaaccgcugucaccuuuuguuuugccucaggacaaaacauaacugaagaauuuuaccaaucaacaugcuccgcaguaucuaaaggauaccucagcgcguuaagaacaggaugguacacaucgguaauaaccaucgaauuauccaacauaaaagaaaauaaaugcaauggaacagacgcaaaagucaaauuaauuaaacaagaacuagacaaauauaaaaacgcaguaaccgaauuacaaaugcuaauguguucaacaccagcaacaggaucaggaucagcuauagcuucaggaguugccguaugcaaagugcuacacuuagaaggagaagugaauaaaauaaaaucagcucuauuaucaacgaacaaagccguaguaucucuaucaaauggcguaucaguacucacauucaaaguacucgaccuaaaaaacuauauagauaaacaacuauuacccauccuaaauaaacaaagcugcucuauaucaaacaucgaaacaguaauggaauuucaacaaaaaaacaacagacuacuagaaauaacccgagaguucucaguuaaugcaggaguaacaacaccagucucaacauacaugcucacaaacucagaacuccuaucacuaauaaaugacaugccaauaacaaacgaccaaaaaaaacucaugucuaacaacguccaaauaguaagacaacaauccuacagcauaauguguauaauaaaagaagaaguuuuagcauacgucguacaacuacccuuauauggcguaauagauacaccaugcuggaaacuccauaccucaccucuauguacaacaaauaccaaagaagguucuaauauaugccuaacacgaacugaccgaggaugguacugugacaacgcaggaucagucucuuucuuuccacaagcagaaaccugcaaaguaugcaguaaccgcguauuuugcgacacaaugaacucccuaaccuuaccaucagaaguaaacuuauguaacguagacauauucaauccaaaauaugacugcaaaauaaugacaucaaaaacagacguaagcucaucaguaauaacuucacuaggcgcaauuguaucaugcuauggaaaaaccaaauguaccgcauccaacaaaaauaaaggaauaauaaaaaccuucucuaacggaugcgacuacguaucaaacaaagguguagauacaguuucuguaggaaacacacucuacuauguaaauaaacaagaaggaaaaucacuauacguaaaaggagaaccaauaauaaacuucuaugacccacuuguauuuccaucugaugaauuugaugcaagcauaucacaaguaaacgaaaaaauaaaccaaucucuagccuuuauacgaaaaagcgacgaauuacuacauaacgucaacgcuggaaaaucaacaacaaacauaaugauaacaacaauaauaauaguaauaauagucauccuauuaucacuaaucgccguaggacuacuccuauacugcaaagcuagauaaggacuaguguccaccugucccuccugggcugcuggauugucucguuuuccugccaaauaaacaggaucagcgcuuuacagaucuaaaaaaaaaaaaaaaaaaaaaaaaaaaaaaaaaaaaaaaaaaaaaaaaaaaaaaaaaaaaaaaaugcaucccccccccccccccccccccccccccccccaaaggcucuuuucagagccaccagaauu

SEQ ID NO: 7371 - RNA, 1880 nt, Artificial Sequence
  mRNA product Design e-4 comprising derived and/or modified sequence from HRSV(A2)__F-del_DSCav1_mut7 (opt11)
gggagacuccugucgggcggaaguaggaggaguagaguuuaaaaacaguacucuuuuuccgguucgggacguaguugaagcaacgacaagccggauaaccgcucuugagacaggaagcuuaccauggaacuccucauccucaaagccaacgccauaaccacuauccucacagcagucacuuucugcuucgccucaggacaaaacauaaccgaagaguucuaccaauccacaugcuccgccgucuccaaaggcuaccucucagcgcuccgcaccggcugguacacauccgucaucaccaucgaacuaagcaacauaaaagaaaacaaaugcaacggcaccgacgccaaaguuaaacucaucaagcaagaacucgacaaauacaaaaacgcagucacagaacuucaaaugcucaugugcuccacacccgccacagguucuggcucagcaaucgcaagcggcgucgccguaugcaaaguccuucaccucgaaggcgaagucaacaaaaucaaauccgcccuccucuccaccaauaaagcugucgucucacucuccaacggcgucagcguccucacauucaaaguccucgaccucaaaaacuacauagacaagcaacuccucccgauacucaacaaacaaagcugcucuaucuccaacaucgaaaccgucauggaguuccaacagaaaaacaaucgucuccucgaaaucacccgcgaguucucaguaaacgccggggucaccacaccagucuccaccuacaugcucaccaacuccgaacuccuuagccucauaaacgacaugcccauaaccaacgaccaaaagaaacucaugagcaacaacguacaaauaguccgacaacaauccuauuccaucauguguaucaucaaagaagaaguccucgcauacguaguccaacucccccuauacggcguaaucgacaccccauguuggaaacuccacaccucaccacucuguaccaccaacaccaaagaaggcucaaacaucugccucacccgcacagaccgcggcugguacugcgacaacgcgggcuccgucagcuucuuuccccaagcggaaaccugcaaagucugcagcaacagagucuucugcgacacuaugaacucccucacccuccccucagaagucaaccucugcaacgucgacaucuucaacccgaaauacgacugcaaaaucaugaccagcaaaacugacgucuccucguccgucaucaccucacucggcgcaaucgugagcugcuacggcaaaaccaaaugcaccgccuccaacaaaaacaaaggcaucauaaaaacauucagcaacggcugcgacuacgucucgaacaaaggagucgacaccguaucagugggcaacacccuauacuacguaaacaagcaagaaggcaaaucacucuacguaaaaggcgaacccaucaucaacuucuacgacccccucgucuuccccuccgacgaguucgacgccuccaucucucaagucaacgagaaaaucaaccaaucccuugccuucauacguaaaagcgacgaacuccuucacaacguaaacgccgggaaauccaccacuaacauaaugaucaccaccaucaucaucguuaucauagucauccuccucucucucauagcagucggccuacuccuguacugcaaagcgcgcuaaggacuaguguccaccugucccuccugggcugcuggauugucucguuuuccugccaaauaaacaggaucagcgcuuuacagaucuaaaaaaaaaaaaaaaaaaaaaaaaaaaaaaaaaaaaaaaaaaaaaaaaaaaaaaaaaaaaaaaaugcaucccccccccccccccccccccccccccccccaaaggcucuuuucagagccaccagaauu

SEQ ID NO: 7372 - RNA, 1847 nt, Artificial Sequence
  mRNA product Design e-5 comprising derived and/or modified sequence from HRSV(A2)__F-del_DSCav1_mut7 (opt1)
gggagagcggcucggccauuuugucccagucaguccggaggcugcggcugcagaaguaccgccugcggaguaacugcaaagaagcuuaccauggagcugcucauccugaaggccaacgccaucaccaccauccugacggcggugaccuucugcuucgccagcggccagaacaucaccgaggaguucuaccaguccacgugcagcgccgucuccaagggguaccucagcgcccugcggaccggcugguacaccuccgugaucaccaucgagcugagcaacaucaaggagaacaagugcaacgggaccgacgccaaggugaagcucaucaagcaggagcuggacaaguacaagaacgcggucacggagcugcagaugcugaugugcuccaccccggcaaccggcuccggcuccgccaucgcgagcggcgucgccgugugcaaggugcugcaccucgagggggaggucaacaagaucaagagcgcccugcuguccaccaacaaggccguggugagccucuccaacggcgucagcgugcugaccuucaaggugcuggaccucaagaacuacaucgacaagcagcugcugcccauccugaacaagcagagcugcuccaucagcaacaucgagacggugauggaguuccagcagaagaacaaccggcuccuggagaucacccgcgaguucagcgugaacgccggggucaccacccccguguccacguacaugcugaccaacagcgagcuccugucccugaucaacgacaugccgaucaccaacgaccagaagaagcucaugagcaacaacgugcagaucguccggcagcaguccuacagcaucaugugcaucaucaaggaggaggugcuggcguacgugguccagcugccccucuacggcgugaucgacacccccugcuggaagcugcacacgagcccccugugcaccaccaacaccaaggagggguccaacaucugccucacgcgcaccgaccggggcugguacugcgacaacgccggcagcgucuccuucuucccgcaggccgagaccugcaaggugugcagcaaccgcguguucugcgacaccaugaacucccugacgcugcccagcgagguaaaccucugcaacgucgacaucuucaaccccaaguacgacugcaagaucaugaccuccaagaccgacgugagcuccagcgugaucaccucccugggggccaucgucagcugcuacggcaagacgaagugcaccgccagcaacaagaacaaggggaucaucaagaccuucuccaacggcugcgacuacgugagcaacaagggcguggacaccguguccgucgggaacacccuguacuacgugaacaagcaggagggcaagagccucuacgugaagggggagcccaucaucaacuucuacgacccgcuggucuuccccuccgacgaguucgacgcgagcaucucccaggugaacgagaagaucaaccagagccuggccuucauccgcaaguccgacgagcugcuccacaacgugaacgccggcaagagcacgaccaacaucaugaucaccaccaucaucaucgucaucaucgugauccugcugucccucaucgccguggggcugcugcucuacugcaaggcccggugaggacuaguguccaccugucccuccugggcugcuggauugucucguuuuccugccaaauaaacaggaucagcgcuuuacagaucuaaaaaaaaaaaaaaaaaaaaaaaaaaaaaaaaaaaaaaaaaaaaaaaaaaaaaaaaaaaaaaaaugcaucccccccccccccccccccccccccccccccaaaggcucuuuucagagccaccagaauu

SEQ ID NO: 7373 - RNA, 1847 nt, Artificial Sequence
  mRNA product Design e-5 comprising derived and/or modified sequence from HRSV(A2)__F-del_DSCav1_mut7 (opt1)
gggagagcggcucggccauuuugucccagucaguccggaggcugcggcugcagaaguaccgccugcggaguaacugcaaagaagcuuaccauggagcugcucauccugaaggccaacgccaucaccaccauccugacggcggugaccuucugcuucgccagcggccagaacaucaccgaggaguucuaccaguccacgugcagcgccgucuccaagggguaccucagcgcccugcgcaccggcugguacaccuccgugaucaccaucgagcugagcaacaucaaggagaacaagugcaacgggaccgacgccaaggugaagcucaucaagcaggagcuggacaaguacaagaacgcggucacggagcugcagaugcucaugugcuccacccccgccaccggcagcggguccgccaucgccagcggcguggcggugugcaagguccugcaccuggagggcgaggugaacaagaucaaguccgcccuccugagcaccaacaaggccguggucucccugagcaacgggguguccgugcucacguucaagguccuggaccugaagaacuacaucgacaagcagcuccugccgauccugaacaagcagagcugcuccaucagcaacaucgagaccgugauggaguuccagcagaagaacaaccggcuccuggagaucacccgcgaguucuccgugaacgccggcgucaccacgcccgugagcaccuacaugcugaccaacagcgagcuccugucccugaucaacgacaugcccaucaccaacgaccagaagaagcucaugagcaacaacgugcagaucguccggcagcaguccuacagcaucaugugcaucaucaaggaggaggugcuggccuacgugguccagcugccccucuacggggugaucgacacgccgugcuggaagcugcacaccagcccccugugcaccaccaacacgaaggagggcagcaacaucugccucacccgcaccgaccgggggugguacugcgacaacgcgggcuccgugagcuucuucccccaggccgagaccugcaaggucugcuccaaccgcguguucugcgacacgaugaacagccugacccugcccuccgaggucaaccucugcaacguggacaucuucaacccgaaguacgacugcaagaucaugaccagcaagaccgacguguccagcuccgucaucacgagccugggcgccaucguguccugcuacgggaagaccaagugcaccgccagcaacaagaacaagggcaucaucaagaccuucuccaacgggugcgacuacgugagcaacaagggcgucgacacggugagcgugggcaacacccuguacuacgucaacaagcaggaggggaagucccucuacgugaagggcgagcccaucaucaacuucuacgacccccugguguuccccagcgacgaguucgacgccuccaucagccaggucaacgagaagaucaaccagucccuggcguucauccggaaguccgacgagcuccugcacaacgugaacgccgggaaguccaccaccaacaucaugaucaccacgaucaucaucgugaucaucgucauccugcucagccugaucgccgugggccugcuccuguacugcaaggcccgcugaggacuaguguccaccugucccuccugggcugcuggauugucucguuuuccugccaaauaaacaggaucagcgcuuuacagaucuaaaaaaaaaaaaaaaaaaaaaaaaaaaaaaaaaaaaaaaaaaaaaaaaaaaaaaaaaaaaaaaaugcaucccccccccccccccccccccccccccccccaaaggcucuuuucagagccaccagaauu

SEQ ID NO: 7374 - RNA, 1847 nt, Artificial Sequence
  mRNA product Design e-5 comprising derived and/or modified sequence from HRSV(A2)__F-del_DSCav1_mut7 (opt2)
gggagagcggcucggccauuuugucccagucaguccggaggcugcggcugcagaaguaccgccugcggaguaacugcaaagaagcuuaccauggagcuccucauccucaaggccaacgccaucaccaccauccucaccgccgucaccuucugcuucgccuccggccagaacaucaccgaggaguucuaccaguccaccugcuccgccgucuccaagggcuaccucuccgcccuccgcaccggcugguacaccuccgucaucaccaucgagcucuccaacaucaaggagaacaagugcaacggcaccgacgccaaggucaagcucaucaagcaggagcucgacaaguacaagaacgccgucaccgagcuccagaugcucaugugcuccacccccgccaccggcuccggcuccgccaucgccuccggcgucgccgucugcaagguccuccaccucgagggcgaggucaacaagaucaaguccgcccuccucuccaccaacaaggccgucgucucccucuccaacggcgucuccguccucaccuucaagguccucgaccucaagaacuacaucgacaagcagcuccuccccauccucaacaagcaguccugcuccaucuccaacaucgagaccgucauggaguuccagcagaagaacaaccgccuccucgagaucacccgcgaguucuccgucaacgccggcgucaccacccccgucuccaccuacaugcucaccaacuccgagcuccucucccucaucaacgacaugcccaucaccaacgaccagaagaagcucauguccaacaacguccagaucguccgccagcaguccuacuccaucaugugcaucaucaaggaggagguccucgccuacgucguccagcucccccucuacggcgucaucgacacccccugcuggaagcuccacaccuccccccucugcaccaccaacaccaaggagggcuccaacaucugccucacccgcaccgaccgcggcugguacugcgacaacgccggcuccgucuccuucuucccccaggccgagaccugcaaggucugcuccaaccgcgucuucugcgacaccaugaacucccucacccuccccuccgaggucaaccucugcaacgucgacaucuucaaccccaaguacgacugcaagaucaugaccuccaagaccgacgucuccuccuccgucaucaccucccucggcgccaucgucuccugcuacggcaagaccaagugcaccgccuccaacaagaacaagggcaucaucaagaccuucuccaacggcugcgacuacgucuccaacaagggcgucgacaccgucuccgucggcaacacccucuacuacgucaacaagcaggagggcaagucccucuacgucaagggcgagcccaucaucaacuucuacgacccccucgucuuccccuccgacgaguucgacgccuccaucucccaggucaacgagaagaucaaccagucccucgccuucauccgcaaguccgacgagcuccuccacaacgucaacgccggcaaguccaccaccaacaucaugaucaccaccaucaucaucgucaucaucgucauccuccucucccucaucgccgucggccuccuccucuacugcaaggcccgcugaggacuaguguccaccugucccuccugggcugcuggauugucucguuuuccugccaaauaaacaggaucagcgcuuuacagaucuaaaaaaaaaaaaaaaaaaaaaaaaaaaaaaaaaaaaaaaaaaaaaaaaaaaaaaaaaaaaaaaaugcaucccccccccccccccccccccccccccccccaaaggcucuuuucagagccaccagaauu

SEQ ID NO: 7375 - RNA, 1847 nt, Artificial Sequence
  mRNA product Design e-5 comprising derived and/or modified sequence from HRSV(A2)__F-del_DSCav1_mut7 (opt3)
gggagagcggcucggccauuuugucccagucaguccggaggcugcggcugcagaaguaccgccugcggaguaacugcaaagaagcuuaccauggagcugcucauccuuaaggccaacgcuauuaccacaauacugacugcagugacguucugcuuugccagcggccagaauaucaccgaagaguucuaccaauccacauguucugcggucucaaaaggguauuugagugcuuuaagaacuggaugguacaccagcguuauuacaaucgaacuguccaacauuaaggagaauaaaugcaacgguaccgacgccaaggugaaacuaaucaagcaggaacucgauaaguauaaaaaugcaguaacugagcugcagaugcuuauguguucuacacccgccaccggcucggggucagcuauagcaagcggaguggccgucugcaaggugcugcacuuggagggcgaaguuaacaaaaucaagagugcucuccuguccacgaauaaagccguggucucucugagcaacgguguguccguacucacuuuuaagguuuuagaccugaagaauuacauugauaaacagcuuuugccuauccugaacaagcaaucauguaguauuagcaauaucgagaccgugauggaguuccagcagaaaaacaauaggcuacucgaaauaacacgggaguuuucugucaacgcgggggugacuaccccaguguccacauauaugcugaccaauucagaacuucugagcuugauuaacgacaugccgaucacgaacgaucagaagaaacucaugaguaauaacguccaaauuguucgccagcagucuuacuccaucaugugcaucauuaaggaggaagugcuggcauauguagugcaguuaccccuguacggagucauagacacuccuuguuggaaacuccauacaagcccacuuugcaccacuaauacaaaggagggcucgaacaucugucugacccgaacggaucguggcugguacugcgacaaugccgggucuguguccuucuuuccccaagcugaaaccuguaagguuugcucaaacagaguguucugcgauacaaugaauaguuugacucuaccuagcgaggucaaccuguguaauguggacauuuuuaacccaaaauaugauugcaagaucaugaccuccaaaacagacguaucuagcucaguuauaacuagccucggagccauuguguccuguuacgguaagaccaaaugcacagcaagcaauaagaacaagggcaucaucaaaaccuucucuaaugggugugauuaugucucaaacaagggaguggacacugucagugugggcaauacgcuguacuauguuaacaaacaggaggguaagagccuuuacgugaaaggggaacccauuaucaacuuuuaugacccucugguauucccauccgaugaguuugacgcuucuauuucgcaggucaaugaaaagauaaaccaaaguuuggccuucaucaggaaguccgaugagcuccugcacaaugugaacgcgggaaaaucaacaaccaauauuaugaucacuaccaucauuauaguuaucauugugaucuuacugagucuaauugccgucggccuccugcuuuacugcaaggcacggugaggacuaguguccaccugucccuccugggcugcuggauugucucguuuuccugccaaauaaacaggaucagcgcuuuacagaucuaaaaaaaaaaaaaaaaaaaaaaaaaaaaaaaaaaaaaaaaaaaaaaaaaaaaaaaaaaaaaaaaugcaucccccccccccccccccccccccccccccccaaaggcucuuuucagagccaccagaauu

SEQ ID NO: 7376 - RNA, 1847 nt, Artificial Sequence
  mRNA product Design e-5 comprising derived and/or modified sequence from HRSV(A2)__F-del_DSCav1_mut7 (opt4)
gggagagcggcucggccauuuugucccagucaguccggaggcugcggcugcagaaguaccgccugcggaguaacugcaaagaagcuuaccauggagcugcugauccugaaggccaacgccaucaccaccauccugaccgccgugaccuucugcuucgccagcggccagaacaucaccgaggaguucuaccagagcaccugcagcgccgugagcaagggcuaccugagcgcccugagaaccggcugguacaccagcgugaucaccaucgagcugagcaacaucaaggagaacaagugcaacggcaccgacgccaaggugaagcugaucaagcaggagcuggacaaguacaagaacgccgugaccgagcugcagaugcugaugugcagcacccccgccaccggcagcggcagcgccaucgccagcggcguggccgugugcaaggugcugcaccuggagggcgaggugaacaagaucaagagcgcccugcugagcaccaacaaggccguggugagccugagcaacggcgugagcgugcugaccuucaaggugcuggaccugaagaacuacaucgacaagcagcugcugcccauccugaacaagcagagcugcagcaucagcaacaucgagaccgugauggaguuccagcagaagaacaacagacugcuggagaucaccagagaguucagcgugaacgccggcgugaccacccccgugagcaccuacaugcugaccaacagcgagcugcugagccugaucaacgacaugcccaucaccaacgaccagaagaagcugaugagcaacaacgugcagaucgugagacagcagagcuacagcaucaugugcaucaucaaggaggaggugcuggccuacguggugcagcugccccuguacggcgugaucgacacccccugcuggaagcugcacaccagcccccugugcaccaccaacaccaaggagggcagcaacaucugccugaccagaaccgacagaggcugguacugcgacaacgccggcagcgugagcuucuucccccaggccgagaccugcaaggugugcagcaacagaguguucugcgacaccaugaacagccugacccugcccagcgaggugaaccugugcaacguggacaucuucaaccccaaguacgacugcaagaucaugaccagcaagaccgacgugagcagcagcgugaucaccagccugggcgccaucgugagcugcuacggcaagaccaagugcaccgccagcaacaagaacaagggcaucaucaagaccuucagcaacggcugcgacuacgugagcaacaagggcguggacaccgugagcgugggcaacacccuguacuacgugaacaagcaggagggcaagagccuguacgugaagggcgagcccaucaucaacuucuacgacccccugguguuccccagcgacgaguucgacgccagcaucagccaggugaacgagaagaucaaccagagccuggccuucaucagaaagagcgacgagcugcugcacaacgugaacgccggcaagagcaccaccaacaucaugaucaccaccaucaucaucgugaucaucgugauccugcugagccugaucgccgugggccugcugcuguacugcaaggccagaugaggacuaguguccaccugucccuccugggcugcuggauugucucguuuuccugccaaauaaacaggaucagcgcuuuacagaucuaaaaaaaaaaaaaaaaaaaaaaaaaaaaaaaaaaaaaaaaaaaaaaaaaaaaaaaaaaaaaaaaugcaucccccccccccccccccccccccccccccccaaaggcucuuuucagagccaccagaauu

SEQ ID NO: 7377 - RNA, 1847 nt, Artificial Sequence
  mRNA product Design e-5 comprising derived and/or modified sequence from HRSV(A2)__F-del_DSCav1_mut7 (opt5)
gggagagcggcucggccauuuugucccagucaguccggaggcugcggcugcagaaguaccgccugcggaguaacugcaaagaagcuuaccauggagcugcucauccugaaggccaacgcuauuaccacaauccuuacggccgugaccuucugcuuugcgagcggccagaauauuacagaagaguucuaccaauccaccuguucugcugucagcaaaggguaucuguccgcccucagaacaggaugguacaccucuguuaucacaauugaacugagcaacaucaaggagaauaaaugcaacggcaccgacgccaaggugaaacuuaucaagcaggaacuggauaaguauaaaaaugcugugacggagcuccagaugcugauguguuccacccccgccacagggucuggaagcgcuauugccuccggcgucgcggugugcaagguucugcaccucgagggggaagugaacaaaaucaagagcgcccugcuuucuaccaauaaagcugucgugucccugagcaacggaguuucugugcucacauuuaagguccuggaccuuaagaauuacauugauaaacagcugcucccuauccugaacaagcaauccuguagcauuucuaauaucgagaccgugauggaguuccagcagaaaaacaaucggcugcucgaaauuacgcgcgaguuuuccgugaacgccggcgucacaaccccgguuagcacauauaugcugaccaauuccgaacuucugucucucaucaacgacaugcccaucaccaacgaucagaagaaacugaugagcaauaacgugcaaauugugagacagcaguccuacagcaucaugugcauuaucaaggaggaaguccuugcuuaugugguucagcugccucucuacggcgugauugacacacccuguuggaaacugcauacgucuccucugugcaccacaaauaccaaggagggguccaacaucugucucacacggaccgaucgcggaugguacugcgacaaugccggcagcgucucuuucuuuccccaagcggaaacguguaaggugugcagcaacagaguuuucugcgauacaaugaacucccugacccuuccuucugaggugaaucuguguaaugucgacaucuuuaacccgaaauaugauugcaagauuaugaccagcaaaacagacguguccagcucugucaucaccucccucggggccauugugagcuguuacggaaagacaaaaugcacggcuucuaauaagaacaagggcaucauuaaaaccuucuccaaugggugugauuauguuagcaacaagggaguggacacagucuccgugggcaauacccuguacuauguuaacaaacaggagggcaagucucuuuacgugaaaggggaacccaucaucaacuuuuaugacccucuggucuuccccagcgaugaguuugacgccuccauuucucaggugaaugaaaagaucaaccaaagccucgcuuucauucggaaguccgaugagcugcugcacaaugugaacgccggaaaaagcacaaccaauaucaugauuacgaccaucauuaucguuaucauugucauccuccugucucuuauugccgugggccugcuccuguacugcaaggcucgcugaggacuaguguccaccugucccuccugggcugcuggauugucucguuuuccugccaaauaaacaggaucagcgcuuuacagaucuaaaaaaaaaaaaaaaaaaaaaaaaaaaaaaaaaaaaaaaaaaaaaaaaaaaaaaaaaaaaaaaaugcaucccccccccccccccccccccccccccccccaaaggcucuuuucagagccaccagaauu

SEQ ID NO: 7378 - RNA, 1847 nt, Artificial Sequence
  mRNA product Design e-5 comprising derived and/or modified sequence from HRSV(A2)__F-del_DSCav1_mut7 (opt6)
gggagagcggcucggccauuuugucccagucaguccggaggcugcggcugcagaaguaccgccugcggaguaacugcaaagaagcuuaccauggaauuacuaauccucaaagcaaacgcaauuacaaccauacuaaccgcugucaccuuuuguuuugccucaggacaaaacauaacugaagaauuuuaccaaucaacaugcuccgcaguaucuaaaggauaccucagcgcguuaagaacaggaugguacacaucgguaauaaccaucgaauuauccaacauaaaagaaaauaaaugcaauggaacagacgcaaaagucaaauuaauuaaacaagaacuagacaaauauaaaaacgcaguaaccgaauuacaaaugcuaauguguucaacaccagcaacaggaucaggaucagcuauagcuucaggaguugccguaugcaaagugcuacacuuagaaggagaagugaauaaaauaaaaucagcucuauuaucaacgaacaaagccguaguaucucuaucaaauggcguaucaguacucacauucaaaguacucgaccuaaaaaacuauauagauaaacaacuauuacccauccuaaauaaacaaagcugcucuauaucaaacaucgaaacaguaauggaauuucaacaaaaaaacaacagacuacuagaaauaacccgagaguucucaguuaaugcaggaguaacaacaccagucucaacauacaugcucacaaacucagaacuccuaucacuaauaaaugacaugccaauaacaaacgaccaaaaaaaacucaugucuaacaacguccaaauaguaagacaacaauccuacagcauaauguguauaauaaaagaagaaguuuuagcauacgucguacaacuacccuuauauggcguaauagauacaccaugcuggaaacuccauaccucaccucuauguacaacaaauaccaaagaagguucuaauauaugccuaacacgaacugaccgaggaugguacugugacaacgcaggaucagucucuuucuuuccacaagcagaaaccugcaaaguaugcaguaaccgcguauuuugcgacacaaugaacucccuaaccuuaccaucagaaguaaacuuauguaacguagacauauucaauccaaaauaugacugcaaaauaaugacaucaaaaacagacguaagcucaucaguaauaacuucacuaggcgcaauuguaucaugcuauggaaaaaccaaauguaccgcauccaacaaaaauaaaggaauaauaaaaaccuucucuaacggaugcgacuacguaucaaacaaagguguagauacaguuucuguaggaaacacacucuacuauguaaauaaacaagaaggaaaaucacuauacguaaaaggagaaccaauaauaaacuucuaugacccacuuguauuuccaucugaugaauuugaugcaagcauaucacaaguaaacgaaaaaauaaaccaaucucuagccuuuauacgaaaaagcgacgaauuacuacauaacgucaacgcuggaaaaucaacaacaaacauaaugauaacaacaauaauaauaguaauaauagucauccuauuaucacuaaucgccguaggacuacuccuauacugcaaagcuagauaaggacuaguguccaccugucccuccugggcugcuggauugucucguuuuccugccaaauaaacaggaucagcgcuuuacagaucuaaaaaaaaaaaaaaaaaaaaaaaaaaaaaaaaaaaaaaaaaaaaaaaaaaaaaaaaaaaaaaaaugcaucccccccccccccccccccccccccccccccaaaggcucuuuucagagccaccagaauu

SEQ ID NO: 7379 - RNA, 1847 nt, Artificial Sequence
  mRNA product Design e-5 comprising derived and/or modified sequence from HRSV(A2)__F-del_DSCav1_mut7 (opt11)
gggagagcggcucggccauuuugucccagucaguccggaggcugcggcugcagaaguaccgccugcggaguaacugcaaagaagcuuaccauggaacuccucauccucaaagccaacgccauaaccacuauccucacagcagucacuuucugcuucgccucaggacaaaacauaaccgaagaguucuaccaauccacaugcuccgccgucuccaaaggcuaccucucagcgcuccgcaccggcugguacacauccgucaucaccaucgaacuaagcaacauaaaagaaaacaaaugcaacggcaccgacgccaaaguuaaacucaucaagcaagaacucgacaaauacaaaaacgcagucacagaacuucaaaugcucaugugcuccacacccgccacagguucuggcucagcaaucgcaagcggcgucgccguaugcaaaguccuucaccucgaaggcgaagucaacaaaaucaaauccgcccuccucuccaccaauaaagcugucgucucacucuccaacggcgucagcguccucacauucaaaguccucgaccucaaaaacuacauagacaagcaacuccucccgauacucaacaaacaaagcugcucuaucuccaacaucgaaaccgucauggaguuccaacagaaaaacaaucgucuccucgaaaucacccgcgaguucucaguaaacgccggggucaccacaccagucuccaccuacaugcucaccaacuccgaacuccuuagccucauaaacgacaugcccauaaccaacgaccaaaagaaacucaugagcaacaacguacaaauaguccgacaacaauccuauuccaucauguguaucaucaaagaagaaguccucgcauacguaguccaacucccccuauacggcguaaucgacaccccauguuggaaacuccacaccucaccacucuguaccaccaacaccaaagaaggcucaaacaucugccucacccgcacagaccgcggcugguacugcgacaacgcgggcuccgucagcuucuuuccccaagcggaaaccugcaaagucugcagcaacagagucuucugcgacacuaugaacucccucacccuccccucagaagucaaccucugcaacgucgacaucuucaacccgaaauacgacugcaaaaucaugaccagcaaaacugacgucuccucguccgucaucaccucacucggcgcaaucgugagcugcuacggcaaaaccaaaugcaccgccuccaacaaaaacaaaggcaucauaaaaacauucagcaacggcugcgacuacgucucgaacaaaggagucgacaccguaucagugggcaacacccuauacuacguaaacaagcaagaaggcaaaucacucuacguaaaaggcgaacccaucaucaacuucuacgacccccucgucuuccccuccgacgaguucgacgccuccaucucucaagucaacgagaaaaucaaccaaucccuugccuucauacguaaaagcgacgaacuccuucacaacguaaacgccgggaaauccaccacuaacauaaugaucaccaccaucaucaucguuaucauagucauccuccucucucucauagcagucggccuacuccuguacugcaaagcgcgcuaaggacuaguguccaccugucccuccugggcugcuggauugucucguuuuccugccaaauaaacaggaucagcgcuuuacagaucuaaaaaaaaaaaaaaaaaaaaaaaaaaaaaaaaaaaaaaaaaaaaaaaaaaaaaaaaaaaaaaaaugcaucccccccccccccccccccccccccccccccaaaggcucuuuucagagccaccagaauu

SEQ ID NO: 7380 - RNA, 1914 nt, Artificial Sequence
  mRNA product Design e-6 comprising derived and/or modified sequence from HRSV(A2)__F-del_DSCav1_mut7 (opt1)
gggagagcggcucggccauuuugucccagucaguccggaggcugcggcugcagaaguaccgccugcggaguaacugcaaagaagcuuaccauggagcugcucauccugaaggccaacgccaucaccaccauccugacggcggugaccuucugcuucgccagcggccagaacaucaccgaggaguucuaccaguccacgugcagcgccgucuccaagggguaccucagcgcccugcggaccggcugguacaccuccgugaucaccaucgagcugagcaacaucaaggagaacaagugcaacgggaccgacgccaaggugaagcucaucaagcaggagcuggacaaguacaagaacgcggucacggagcugcagaugcugaugugcuccaccccggcaaccggcuccggcuccgccaucgcgagcggcgucgccgugugcaaggugcugcaccucgagggggaggucaacaagaucaagagcgcccugcuguccaccaacaaggccguggugagccucuccaacggcgucagcgugcugaccuucaaggugcuggaccucaagaacuacaucgacaagcagcugcugcccauccugaacaagcagagcugcuccaucagcaacaucgagacggugauggaguuccagcagaagaacaaccggcuccuggagaucacccgcgaguucagcgugaacgccggggucaccacccccguguccacguacaugcugaccaacagcgagcuccugucccugaucaacgacaugccgaucaccaacgaccagaagaagcucaugagcaacaacgugcagaucguccggcagcaguccuacagcaucaugugcaucaucaaggaggaggugcuggcguacgugguccagcugccccucuacggcgugaucgacacccccugcuggaagcugcacacgagcccccugugcaccaccaacaccaaggagggguccaacaucugccucacgcgcaccgaccggggcugguacugcgacaacgccggcagcgucuccuucuucccgcaggccgagaccugcaaggugugcagcaaccgcguguucugcgacaccaugaacucccugacgcugcccagcgagguaaaccucugcaacgucgacaucuucaaccccaaguacgacugcaagaucaugaccuccaagaccgacgugagcuccagcgugaucaccucccugggggccaucgucagcugcuacggcaagacgaagugcaccgccagcaacaagaacaaggggaucaucaagaccuucuccaacggcugcgacuacgugagcaacaagggcguggacaccguguccgucgggaacacccuguacuacgugaacaagcaggagggcaagagccucuacgugaagggggagcccaucaucaacuucuacgacccgcuggucuuccccuccgacgaguucgacgcgagcaucucccaggugaacgagaagaucaaccagagccuggccuucauccgcaaguccgacgagcugcuccacaacgugaacgccggcaagagcacgaccaacaucaugaucaccaccaucaucaucgucaucaucgugauccugcugucccucaucgccguggggcugcugcucuacugcaaggcccggugaggacuaguacuggcugcaucucccuuuccucuguccuccauccuucucccaggauggugaagggggaccugguacccagugauccccaccccaggauccuaaaucaugacuuaccugcuaauaaaaacucauuggaaaagugagaagaucuaaaaaaaaaaaaaaaaaaaaaaaaaaaaaaaaaaaaaaaaaaaaaaaaaaaaaaaaaaaaaaaaugcaucccccccccccccccccccccccccccccccaaaggcucuuuucagagccaccagaauu

SEQ ID NO: 7381 - RNA, 1914 nt, Artificial Sequence
  mRNA product Design e-6 comprising derived and/or modified sequence from HRSV(A2)__F-del_DSCav1_mut7 (opt1)
gggagagcggcucggccauuuugucccagucaguccggaggcugcggcugcagaaguaccgccugcggaguaacugcaaagaagcuuaccauggagcugcucauccugaaggccaacgccaucaccaccauccugacggcggugaccuucugcuucgccagcggccagaacaucaccgaggaguucuaccaguccacgugcagcgccgucuccaagggguaccucagcgcccugcgcaccggcugguacaccuccgugaucaccaucgagcugagcaacaucaaggagaacaagugcaacgggaccgacgccaaggugaagcucaucaagcaggagcuggacaaguacaagaacgcggucacggagcugcagaugcucaugugcuccacccccgccaccggcagcggguccgccaucgccagcggcguggcggugugcaagguccugcaccuggagggcgaggugaacaagaucaaguccgcccuccugagcaccaacaaggccguggucucccugagcaacgggguguccgugcucacguucaagguccuggaccugaagaacuacaucgacaagcagcuccugccgauccugaacaagcagagcugcuccaucagcaacaucgagaccgugauggaguuccagcagaagaacaaccggcuccuggagaucacccgcgaguucuccgugaacgccggcgucaccacgcccgugagcaccuacaugcugaccaacagcgagcuccugucccugaucaacgacaugcccaucaccaacgaccagaagaagcucaugagcaacaacgugcagaucguccggcagcaguccuacagcaucaugugcaucaucaaggaggaggugcuggccuacgugguccagcugccccucuacggggugaucgacacgccgugcuggaagcugcacaccagcccccugugcaccaccaacacgaaggagggcagcaacaucugccucacccgcaccgaccgggggugguacugcgacaacgcgggcuccgugagcuucuucccccaggccgagaccugcaaggucugcuccaaccgcguguucugcgacacgaugaacagccugacccugcccuccgaggucaaccucugcaacguggacaucuucaacccgaaguacgacugcaagaucaugaccagcaagaccgacguguccagcuccgucaucacgagccugggcgccaucguguccugcuacgggaagaccaagugcaccgccagcaacaagaacaagggcaucaucaagaccuucuccaacgggugcgacuacgugagcaacaagggcgucgacacggugagcgugggcaacacccuguacuacgucaacaagcaggaggggaagucccucuacgugaagggcgagcccaucaucaacuucuacgacccccugguguuccccagcgacgaguucgacgccuccaucagccaggucaacgagaagaucaaccagucccuggcguucauccggaaguccgacgagcuccugcacaacgugaacgccgggaaguccaccaccaacaucaugaucaccacgaucaucaucgugaucaucgucauccugcucagccugaucgccgugggccugcuccuguacugcaaggcccgcugaggacuaguacuggcugcaucucccuuuccucuguccuccauccuucucccaggauggugaagggggaccugguacccagugauccccaccccaggauccuaaaucaugacuuaccugcuaauaaaaacucauuggaaaagugagaagaucuaaaaaaaaaaaaaaaaaaaaaaaaaaaaaaaaaaaaaaaaaaaaaaaaaaaaaaaaaaaaaaaaugcaucccccccccccccccccccccccccccccccaaaggcucuuuucagagccaccagaauu

SEQ ID NO: 7382 - RNA, 1914 nt, Artificial Sequence
  mRNA product Design e-6 comprising derived and/or modified sequence from HRSV(A2)__F-del_DSCav1_mut7 (opt2)
gggagagcggcucggccauuuugucccagucaguccggaggcugcggcugcagaaguaccgccugcggaguaacugcaaagaagcuuaccauggagcuccucauccucaaggccaacgccaucaccaccauccucaccgccgucaccuucugcuucgccuccggccagaacaucaccgaggaguucuaccaguccaccugcuccgccgucuccaagggcuaccucuccgcccuccgcaccggcugguacaccuccgucaucaccaucgagcucuccaacaucaaggagaacaagugcaacggcaccgacgccaaggucaagcucaucaagcaggagcucgacaaguacaagaacgccgucaccgagcuccagaugcucaugugcuccacccccgccaccggcuccggcuccgccaucgccuccggcgucgccgucugcaagguccuccaccucgagggcgaggucaacaagaucaaguccgcccuccucuccaccaacaaggccgucgucucccucuccaacggcgucuccguccucaccuucaagguccucgaccucaagaacuacaucgacaagcagcuccuccccauccucaacaagcaguccugcuccaucuccaacaucgagaccgucauggaguuccagcagaagaacaaccgccuccucgagaucacccgcgaguucuccgucaacgccggcgucaccacccccgucuccaccuacaugcucaccaacuccgagcuccucucccucaucaacgacaugcccaucaccaacgaccagaagaagcucauguccaacaacguccagaucguccgccagcaguccuacuccaucaugugcaucaucaaggaggagguccucgccuacgucguccagcucccccucuacggcgucaucgacacccccugcuggaagcuccacaccuccccccucugcaccaccaacaccaaggagggcuccaacaucugccucacccgcaccgaccgcggcugguacugcgacaacgccggcuccgucuccuucuucccccaggccgagaccugcaaggucugcuccaaccgcgucuucugcgacaccaugaacucccucacccuccccuccgaggucaaccucugcaacgucgacaucuucaaccccaaguacgacugcaagaucaugaccuccaagaccgacgucuccuccuccgucaucaccucccucggcgccaucgucuccugcuacggcaagaccaagugcaccgccuccaacaagaacaagggcaucaucaagaccuucuccaacggcugcgacuacgucuccaacaagggcgucgacaccgucuccgucggcaacacccucuacuacgucaacaagcaggagggcaagucccucuacgucaagggcgagcccaucaucaacuucuacgacccccucgucuuccccuccgacgaguucgacgccuccaucucccaggucaacgagaagaucaaccagucccucgccuucauccgcaaguccgacgagcuccuccacaacgucaacgccggcaaguccaccaccaacaucaugaucaccaccaucaucaucgucaucaucgucauccuccucucccucaucgccgucggccuccuccucuacugcaaggcccgcugaggacuaguacuggcugcaucucccuuuccucuguccuccauccuucucccaggauggugaagggggaccugguacccagugauccccaccccaggauccuaaaucaugacuuaccugcuaauaaaaacucauuggaaaagugagaagaucuaaaaaaaaaaaaaaaaaaaaaaaaaaaaaaaaaaaaaaaaaaaaaaaaaaaaaaaaaaaaaaaaugcaucccccccccccccccccccccccccccccccaaaggcucuuuucagagccaccagaauu

SEQ ID NO: 7383 - RNA, 1914 nt, Artificial Sequence
  mRNA product Design e-6 comprising derived and/or modified sequence from HRSV(A2)__F-del_DSCav1_mut7 (opt3)
gggagagcggcucggccauuuugucccagucaguccggaggcugcggcugcagaaguaccgccugcggaguaacugcaaagaagcuuaccauggagcugcucauccuuaaggccaacgcuauuaccacaauacugacugcagugacguucugcuuugccagcggccagaauaucaccgaagaguucuaccaauccacauguucugcggucucaaaaggguauuugagugcuuuaagaacuggaugguacaccagcguuauuacaaucgaacuguccaacauuaaggagaauaaaugcaacgguaccgacgccaaggugaaacuaaucaagcaggaacucgauaaguauaaaaaugcaguaacugagcugcagaugcuuauguguucuacacccgccaccggcucggggucagcuauagcaagcggaguggccgucugcaaggugcugcacuuggagggcgaaguuaacaaaaucaagagugcucuccuguccacgaauaaagccguggucucucugagcaacgguguguccguacucacuuuuaagguuuuagaccugaagaauuacauugauaaacagcuuuugccuauccugaacaagcaaucauguaguauuagcaauaucgagaccgugauggaguuccagcagaaaaacaauaggcuacucgaaauaacacgggaguuuucugucaacgcgggggugacuaccccaguguccacauauaugcugaccaauucagaacuucugagcuugauuaacgacaugccgaucacgaacgaucagaagaaacucaugaguaauaacguccaaauuguucgccagcagucuuacuccaucaugugcaucauuaaggaggaagugcuggcauauguagugcaguuaccccuguacggagucauagacacuccuuguuggaaacuccauacaagcccacuuugcaccacuaauacaaaggagggcucgaacaucugucugacccgaacggaucguggcugguacugcgacaaugccgggucuguguccuucuuuccccaagcugaaaccuguaagguuugcucaaacagaguguucugcgauacaaugaauaguuugacucuaccuagcgaggucaaccuguguaauguggacauuuuuaacccaaaauaugauugcaagaucaugaccuccaaaacagacguaucuagcucaguuauaacuagccucggagccauuguguccuguuacgguaagaccaaaugcacagcaagcaauaagaacaagggcaucaucaaaaccuucucuaaugggugugauuaugucucaaacaagggaguggacacugucagugugggcaauacgcuguacuauguuaacaaacaggaggguaagagccuuuacgugaaaggggaacccauuaucaacuuuuaugacccucugguauucccauccgaugaguuugacgcuucuauuucgcaggucaaugaaaagauaaaccaaaguuuggccuucaucaggaaguccgaugagcuccugcacaaugugaacgcgggaaaaucaacaaccaauauuaugaucacuaccaucauuauaguuaucauugugaucuuacugagucuaauugccgucggccuccugcuuuacugcaaggcacggugaggacuaguacuggcugcaucucccuuuccucuguccuccauccuucucccaggauggugaagggggaccugguacccagugauccccaccccaggauccuaaaucaugacuuaccugcuaauaaaaacucauuggaaaagugagaagaucuaaaaaaaaaaaaaaaaaaaaaaaaaaaaaaaaaaaaaaaaaaaaaaaaaaaaaaaaaaaaaaaaugcaucccccccccccccccccccccccccccccccaaaggcucuuuucagagccaccagaauu

SEQ ID NO: 7384 - RNA, 1914 nt, Artificial Sequence
  mRNA product Design e-6 comprising derived and/or modified sequence from HRSV(A2)__F-del_DSCav1_mut7 (opt4)
gggagagcggcucggccauuuugucccagucaguccggaggcugcggcugcagaaguaccgccugcggaguaacugcaaagaagcuuaccauggagcugcugauccugaaggccaacgccaucaccaccauccugaccgccgugaccuucugcuucgccagcggccagaacaucaccgaggaguucuaccagagcaccugcagcgccgugagcaagggcuaccugagcgcccugagaaccggcugguacaccagcgugaucaccaucgagcugagcaacaucaaggagaacaagugcaacggcaccgacgccaaggugaagcugaucaagcaggagcuggacaaguacaagaacgccgugaccgagcugcagaugcugaugugcagcacccccgccaccggcagcggcagcgccaucgccagcggcguggccgugugcaaggugcugcaccuggagggcgaggugaacaagaucaagagcgcccugcugagcaccaacaaggccguggugagccugagcaacggcgugagcgugcugaccuucaaggugcuggaccugaagaacuacaucgacaagcagcugcugcccauccugaacaagcagagcugcagcaucagcaacaucgagaccgugauggaguuccagcagaagaacaacagacugcuggagaucaccagagaguucagcgugaacgccggcgugaccacccccgugagcaccuacaugcugaccaacagcgagcugcugagccugaucaacgacaugcccaucaccaacgaccagaagaagcugaugagcaacaacgugcagaucgugagacagcagagcuacagcaucaugugcaucaucaaggaggaggugcuggccuacguggugcagcugccccuguacggcgugaucgacacccccugcuggaagcugcacaccagcccccugugcaccaccaacaccaaggagggcagcaacaucugccugaccagaaccgacagaggcugguacugcgacaacgccggcagcgugagcuucuucccccaggccgagaccugcaaggugugcagcaacagaguguucugcgacaccaugaacagccugacccugcccagcgaggugaaccugugcaacguggacaucuucaaccccaaguacgacugcaagaucaugaccagcaagaccgacgugagcagcagcgugaucaccagccugggcgccaucgugagcugcuacggcaagaccaagugcaccgccagcaacaagaacaagggcaucaucaagaccuucagcaacggcugcgacuacgugagcaacaagggcguggacaccgugagcgugggcaacacccuguacuacgugaacaagcaggagggcaagagccuguacgugaagggcgagcccaucaucaacuucuacgacccccugguguuccccagcgacgaguucgacgccagcaucagccaggugaacgagaagaucaaccagagccuggccuucaucagaaagagcgacgagcugcugcacaacgugaacgccggcaagagcaccaccaacaucaugaucaccaccaucaucaucgugaucaucgugauccugcugagccugaucgccgugggccugcugcuguacugcaaggccagaugaggacuaguacuggcugcaucucccuuuccucuguccuccauccuucucccaggauggugaagggggaccugguacccagugauccccaccccaggauccuaaaucaugacuuaccugcuaauaaaaacucauuggaaaagugagaagaucuaaaaaaaaaaaaaaaaaaaaaaaaaaaaaaaaaaaaaaaaaaaaaaaaaaaaaaaaaaaaaaaaugcaucccccccccccccccccccccccccccccccaaaggcucuuuucagagccaccagaauu

SEQ ID NO: 7385 - RNA, 1914 nt, Artificial Sequence
  mRNA product Design e-6 comprising derived and/or modified sequence from HRSV(A2)__F-del_DSCav1_mut7 (opt5)
gggagagcggcucggccauuuugucccagucaguccggaggcugcggcugcagaaguaccgccugcggaguaacugcaaagaagcuuaccauggagcugcucauccugaaggccaacgcuauuaccacaauccuuacggccgugaccuucugcuuugcgagcggccagaauauuacagaagaguucuaccaauccaccuguucugcugucagcaaaggguaucuguccgcccucagaacaggaugguacaccucuguuaucacaauugaacugagcaacaucaaggagaauaaaugcaacggcaccgacgccaaggugaaacuuaucaagcaggaacuggauaaguauaaaaaugcugugacggagcuccagaugcugauguguuccacccccgccacagggucuggaagcgcuauugccuccggcgucgcggugugcaagguucugcaccucgagggggaagugaacaaaaucaagagcgcccugcuuucuaccaauaaagcugucgugucccugagcaacggaguuucugugcucacauuuaagguccuggaccuuaagaauuacauugauaaacagcugcucccuauccugaacaagcaauccuguagcauuucuaauaucgagaccgugauggaguuccagcagaaaaacaaucggcugcucgaaauuacgcgcgaguuuuccgugaacgccggcgucacaaccccgguuagcacauauaugcugaccaauuccgaacuucugucucucaucaacgacaugcccaucaccaacgaucagaagaaacugaugagcaauaacgugcaaauugugagacagcaguccuacagcaucaugugcauuaucaaggaggaaguccuugcuuaugugguucagcugccucucuacggcgugauugacacacccuguuggaaacugcauacgucuccucugugcaccacaaauaccaaggagggguccaacaucugucucacacggaccgaucgcggaugguacugcgacaaugccggcagcgucucuuucuuuccccaagcggaaacguguaaggugugcagcaacagaguuuucugcgauacaaugaacucccugacccuuccuucugaggugaaucuguguaaugucgacaucuuuaacccgaaauaugauugcaagauuaugaccagcaaaacagacguguccagcucugucaucaccucccucggggccauugugagcuguuacggaaagacaaaaugcacggcuucuaauaagaacaagggcaucauuaaaaccuucuccaaugggugugauuauguuagcaacaagggaguggacacagucuccgugggcaauacccuguacuauguuaacaaacaggagggcaagucucuuuacgugaaaggggaacccaucaucaacuuuuaugacccucuggucuuccccagcgaugaguuugacgccuccauuucucaggugaaugaaaagaucaaccaaagccucgcuuucauucggaaguccgaugagcugcugcacaaugugaacgccggaaaaagcacaaccaauaucaugauuacgaccaucauuaucguuaucauugucauccuccugucucuuauugccgugggccugcuccuguacugcaaggcucgcugaggacuaguacuggcugcaucucccuuuccucuguccuccauccuucucccaggauggugaagggggaccugguacccagugauccccaccccaggauccuaaaucaugacuuaccugcuaauaaaaacucauuggaaaagugagaagaucuaaaaaaaaaaaaaaaaaaaaaaaaaaaaaaaaaaaaaaaaaaaaaaaaaaaaaaaaaaaaaaaaugcaucccccccccccccccccccccccccccccccaaaggcucuuuucagagccaccagaauu

SEQ ID NO: 7386 - RNA, 1914 nt, Artificial Sequence
  mRNA product Design e-6 comprising derived and/or modified sequence from HRSV(A2)__F-del_DSCav1_mut7 (opt6)
gggagagcggcucggccauuuugucccagucaguccggaggcugcggcugcagaaguaccgccugcggaguaacugcaaagaagcuuaccauggaauuacuaauccucaaagcaaacgcaauuacaaccauacuaaccgcugucaccuuuuguuuugccucaggacaaaacauaacugaagaauuuuaccaaucaacaugcuccgcaguaucuaaaggauaccucagcgcguuaagaacaggaugguacacaucgguaauaaccaucgaauuauccaacauaaaagaaaauaaaugcaauggaacagacgcaaaagucaaauuaauuaaacaagaacuagacaaauauaaaaacgcaguaaccgaauuacaaaugcuaauguguucaacaccagcaacaggaucaggaucagcuauagcuucaggaguugccguaugcaaagugcuacacuuagaaggagaagugaauaaaauaaaaucagcucuauuaucaacgaacaaagccguaguaucucuaucaaauggcguaucaguacucacauucaaaguacucgaccuaaaaaacuauauagauaaacaacuauuacccauccuaaauaaacaaagcugcucuauaucaaacaucgaaacaguaauggaauuucaacaaaaaaacaacagacuacuagaaauaacccgagaguucucaguuaaugcaggaguaacaacaccagucucaacauacaugcucacaaacucagaacuccuaucacuaauaaaugacaugccaauaacaaacgaccaaaaaaaacucaugucuaacaacguccaaauaguaagacaacaauccuacagcauaauguguauaauaaaagaagaaguuuuagcauacgucguacaacuacccuuauauggcguaauagauacaccaugcuggaaacuccauaccucaccucuauguacaacaaauaccaaagaagguucuaauauaugccuaacacgaacugaccgaggaugguacugugacaacgcaggaucagucucuuucuuuccacaagcagaaaccugcaaaguaugcaguaaccgcguauuuugcgacacaaugaacucccuaaccuuaccaucagaaguaaacuuauguaacguagacauauucaauccaaaauaugacugcaaaauaaugacaucaaaaacagacguaagcucaucaguaauaacuucacuaggcgcaauuguaucaugcuauggaaaaaccaaauguaccgcauccaacaaaaauaaaggaauaauaaaaaccuucucuaacggaugcgacuacguaucaaacaaagguguagauacaguuucuguaggaaacacacucuacuauguaaauaaacaagaaggaaaaucacuauacguaaaaggagaaccaauaauaaacuucuaugacccacuuguauuuccaucugaugaauuugaugcaagcauaucacaaguaaacgaaaaaauaaaccaaucucuagccuuuauacgaaaaagcgacgaauuacuacauaacgucaacgcuggaaaaucaacaacaaacauaaugauaacaacaauaauaauaguaauaauagucauccuauuaucacuaaucgccguaggacuacuccuauacugcaaagcuagauaaggacuaguacuggcugcaucucccuuuccucuguccuccauccuucucccaggauggugaagggggaccugguacccagugauccccaccccaggauccuaaaucaugacuuaccugcuaauaaaaacucauuggaaaagugagaagaucuaaaaaaaaaaaaaaaaaaaaaaaaaaaaaaaaaaaaaaaaaaaaaaaaaaaaaaaaaaaaaaaaugcaucccccccccccccccccccccccccccccccaaaggcucuuuucagagccaccagaauu

SEQ ID NO: 7387 - RNA, 1914 nt, Artificial Sequence
  mRNA product Design e-6 comprising derived and/or modified sequence from HRSV(A2)__F-del_DSCav1_mut7 (opt11)
gggagagcggcucggccauuuugucccagucaguccggaggcugcggcugcagaaguaccgccugcggaguaacugcaaagaagcuuaccauggaacuccucauccucaaagccaacgccauaaccacuauccucacagcagucacuuucugcuucgccucaggacaaaacauaaccgaagaguucuaccaauccacaugcuccgccgucuccaaaggcuaccucucagcgcuccgcaccggcugguacacauccgucaucaccaucgaacuaagcaacauaaaagaaaacaaaugcaacggcaccgacgccaaaguuaaacucaucaagcaagaacucgacaaauacaaaaacgcagucacagaacuucaaaugcucaugugcuccacacccgccacagguucuggcucagcaaucgcaagcggcgucgccguaugcaaaguccuucaccucgaaggcgaagucaacaaaaucaaauccgcccuccucuccaccaauaaagcugucgucucacucuccaacggcgucagcguccucacauucaaaguccucgaccucaaaaacuacauagacaagcaacuccucccgauacucaacaaacaaagcugcucuaucuccaacaucgaaaccgucauggaguuccaacagaaaaacaaucgucuccucgaaaucacccgcgaguucucaguaaacgccggggucaccacaccagucuccaccuacaugcucaccaacuccgaacuccuuagccucauaaacgacaugcccauaaccaacgaccaaaagaaacucaugagcaacaacguacaaauaguccgacaacaauccuauuccaucauguguaucaucaaagaagaaguccucgcauacguaguccaacucccccuauacggcguaaucgacaccccauguuggaaacuccacaccucaccacucuguaccaccaacaccaaagaaggcucaaacaucugccucacccgcacagaccgcggcugguacugcgacaacgcgggcuccgucagcuucuuuccccaagcggaaaccugcaaagucugcagcaacagagucuucugcgacacuaugaacucccucacccuccccucagaagucaaccucugcaacgucgacaucuucaacccgaaauacgacugcaaaaucaugaccagcaaaacugacgucuccucguccgucaucaccucacucggcgcaaucgugagcugcuacggcaaaaccaaaugcaccgccuccaacaaaaacaaaggcaucauaaaaacauucagcaacggcugcgacuacgucucgaacaaaggagucgacaccguaucagugggcaacacccuauacuacguaaacaagcaagaaggcaaaucacucuacguaaaaggcgaacccaucaucaacuucuacgacccccucgucuuccccuccgacgaguucgacgccuccaucucucaagucaacgagaaaaucaaccaaucccuugccuucauacguaaaagcgacgaacuccuucacaacguaaacgccgggaaauccaccacuaacauaaugaucaccaccaucaucaucguuaucauagucauccuccucucucucauagcagucggccuacuccuguacugcaaagcgcgcuaaggacuaguacuggcugcaucucccuuuccucuguccuccauccuucucccaggauggugaagggggaccugguacccagugauccccaccccaggauccuaaaucaugacuuaccugcuaauaaaaacucauuggaaaagugagaagaucuaaaaaaaaaaaaaaaaaaaaaaaaaaaaaaaaaaaaaaaaaaaaaaaaaaaaaaaaaaaaaaaaugcaucccccccccccccccccccccccccccccccaaaggcucuuuucagagccaccagaauu

SEQ ID NO: 7388 - RNA, 2130 nt, Artificial Sequence
  mRNA product Design f-1 comprising derived and/or modified sequence from HRSV(A2)__F-del_DSCav1_mut7 (opt1)
gggagagcggcucggccauuuugucccagucaguccggaggcugcggcugcagaaguaccgccugcggaguaacugcaaagaagcuuaccauggagcugcucauccugaaggccaacgccaucaccaccauccugacggcggugaccuucugcuucgccagcggccagaacaucaccgaggaguucuaccaguccacgugcagcgccgucuccaagggguaccucagcgcccugcggaccggcugguacaccuccgugaucaccaucgagcugagcaacaucaaggagaacaagugcaacgggaccgacgccaaggugaagcucaucaagcaggagcuggacaaguacaagaacgcggucacggagcugcagaugcugaugugcuccaccccggcaaccggcuccggcuccgccaucgcgagcggcgucgccgugugcaaggugcugcaccucgagggggaggucaacaagaucaagagcgcccugcuguccaccaacaaggccguggugagccucuccaacggcgucagcgugcugaccuucaaggugcuggaccucaagaacuacaucgacaagcagcugcugcccauccugaacaagcagagcugcuccaucagcaacaucgagacggugauggaguuccagcagaagaacaaccggcuccuggagaucacccgcgaguucagcgugaacgccggggucaccacccccguguccacguacaugcugaccaacagcgagcuccugucccugaucaacgacaugccgaucaccaacgaccagaagaagcucaugagcaacaacgugcagaucguccggcagcaguccuacagcaucaugugcaucaucaaggaggaggugcuggcguacgugguccagcugccccucuacggcgugaucgacacccccugcuggaagcugcacacgagcccccugugcaccaccaacaccaaggagggguccaacaucugccucacgcgcaccgaccggggcugguacugcgacaacgccggcagcgucuccuucuucccgcaggccgagaccugcaaggugugcagcaaccgcguguucugcgacaccaugaacucccugacgcugcccagcgagguaaaccucugcaacgucgacaucuucaaccccaaguacgacugcaagaucaugaccuccaagaccgacgugagcuccagcgugaucaccucccugggggccaucgucagcugcuacggcaagacgaagugcaccgccagcaacaagaacaaggggaucaucaagaccuucuccaacggcugcgacuacgugagcaacaagggcguggacaccguguccgucgggaacacccuguacuacgugaacaagcaggagggcaagagccucuacgugaagggggagcccaucaucaacuucuacgacccgcuggucuuccccuccgacgaguucgacgcgagcaucucccaggugaacgagaagaucaaccagagccuggccuucauccgcaaguccgacgagcugcuccacaacgugaacgccggcaagagcacgaccaacaucaugaucaccaccaucaucaucgucaucaucgugauccugcugucccucaucgccguggggcugcugcucuacugcaaggcccggugaggacuagugaagggaacacccaaauuuaauucagccuuaagcacaauuaauuaagagugaaacguaauuguacaagcaguuggucacccaccauagggcaugaucaacaccgcaaccuuuccuuuuucccccagugauucugaaaaaccccucuucccuucagcuugcuuagauguuccaaauuuaguaagcuuaaggcggccuacagaagaaaaagaaaaaaaaggccacaaaaguucccucucacuuucaguaaauaaaauaaaagcagcaacagaaauaaagaaauaaaugaaauucaaaaugaaauaaauauuguguugugcagcauuaaaaaaucaauaaaaauuaaaaaugagcaagaucuaaaaaaaaaaaaaaaaaaaaaaaaaaaaaaaaaaaaaaaaaaaaaaaaaaaaaaaaaaaaaaaaugcaucccccccccccccccccccccccccccccccaaaggcucuuuucagagccaccagaauu

SEQ ID NO: 7389 - RNA, 2130 nt, Artificial Sequence
  mRNA product Design f-1 comprising derived and/or modified sequence from HRSV(A2)__F-del_DSCav1_mut7 (opt1)
gggagagcggcucggccauuuugucccagucaguccggaggcugcggcugcagaaguaccgccugcggaguaacugcaaagaagcuuaccauggagcugcucauccugaaggccaacgccaucaccaccauccugacggcggugaccuucugcuucgccagcggccagaacaucaccgaggaguucuaccaguccacgugcagcgccgucuccaagggguaccucagcgcccugcgcaccggcugguacaccuccgugaucaccaucgagcugagcaacaucaaggagaacaagugcaacgggaccgacgccaaggugaagcucaucaagcaggagcuggacaaguacaagaacgcggucacggagcugcagaugcucaugugcuccacccccgccaccggcagcggguccgccaucgccagcggcguggcggugugcaagguccugcaccuggagggcgaggugaacaagaucaaguccgcccuccugagcaccaacaaggccguggucucccugagcaacgggguguccgugcucacguucaagguccuggaccugaagaacuacaucgacaagcagcuccugccgauccugaacaagcagagcugcuccaucagcaacaucgagaccgugauggaguuccagcagaagaacaaccggcuccuggagaucacccgcgaguucuccgugaacgccggcgucaccacgcccgugagcaccuacaugcugaccaacagcgagcuccugucccugaucaacgacaugcccaucaccaacgaccagaagaagcucaugagcaacaacgugcagaucguccggcagcaguccuacagcaucaugugcaucaucaaggaggaggugcuggccuacgugguccagcugccccucuacggggugaucgacacgccgugcuggaagcugcacaccagcccccugugcaccaccaacacgaaggagggcagcaacaucugccucacccgcaccgaccgggggugguacugcgacaacgcgggcuccgugagcuucuucccccaggccgagaccugcaaggucugcuccaaccgcguguucugcgacacgaugaacagccugacccugcccuccgaggucaaccucugcaacguggacaucuucaacccgaaguacgacugcaagaucaugaccagcaagaccgacguguccagcuccgucaucacgagccugggcgccaucguguccugcuacgggaagaccaagugcaccgccagcaacaagaacaagggcaucaucaagaccuucuccaacgggugcgacuacgugagcaacaagggcgucgacacggugagcgugggcaacacccuguacuacgucaacaagcaggaggggaagucccucuacgugaagggcgagcccaucaucaacuucuacgacccccugguguuccccagcgacgaguucgacgccuccaucagccaggucaacgagaagaucaaccagucccuggcguucauccggaaguccgacgagcuccugcacaacgugaacgccgggaaguccaccaccaacaucaugaucaccacgaucaucaucgugaucaucgucauccugcucagccugaucgccgugggccugcuccuguacugcaaggcccgcugaggacuagugaagggaacacccaaauuuaauucagccuuaagcacaauuaauuaagagugaaacguaauuguacaagcaguuggucacccaccauagggcaugaucaacaccgcaaccuuuccuuuuucccccagugauucugaaaaaccccucuucccuucagcuugcuuagauguuccaaauuuaguaagcuuaaggcggccuacagaagaaaaagaaaaaaaaggccacaaaaguucccucucacuuucaguaaauaaaauaaaagcagcaacagaaauaaagaaauaaaugaaauucaaaaugaaauaaauauuguguugugcagcauuaaaaaaucaauaaaaauuaaaaaugagcaagaucuaaaaaaaaaaaaaaaaaaaaaaaaaaaaaaaaaaaaaaaaaaaaaaaaaaaaaaaaaaaaaaaaugcaucccccccccccccccccccccccccccccccaaaggcucuuuucagagccaccagaauu

SEQ ID NO: 7390 - RNA, 2130 nt, Artificial Sequence
  mRNA product Design f-1 comprising derived and/or modified sequence from HRSV(A2)__F-del_DSCav1_mut7 (opt2)
gggagagcggcucggccauuuugucccagucaguccggaggcugcggcugcagaaguaccgccugcggaguaacugcaaagaagcuuaccauggagcuccucauccucaaggccaacgccaucaccaccauccucaccgccgucaccuucugcuucgccuccggccagaacaucaccgaggaguucuaccaguccaccugcuccgccgucuccaagggcuaccucuccgcccuccgcaccggcugguacaccuccgucaucaccaucgagcucuccaacaucaaggagaacaagugcaacggcaccgacgccaaggucaagcucaucaagcaggagcucgacaaguacaagaacgccgucaccgagcuccagaugcucaugugcuccacccccgccaccggcuccggcuccgccaucgccuccggcgucgccgucugcaagguccuccaccucgagggcgaggucaacaagaucaaguccgcccuccucuccaccaacaaggccgucgucucccucuccaacggcgucuccguccucaccuucaagguccucgaccucaagaacuacaucgacaagcagcuccuccccauccucaacaagcaguccugcuccaucuccaacaucgagaccgucauggaguuccagcagaagaacaaccgccuccucgagaucacccgcgaguucuccgucaacgccggcgucaccacccccgucuccaccuacaugcucaccaacuccgagcuccucucccucaucaacgacaugcccaucaccaacgaccagaagaagcucauguccaacaacguccagaucguccgccagcaguccuacuccaucaugugcaucaucaaggaggagguccucgccuacgucguccagcucccccucuacggcgucaucgacacccccugcuggaagcuccacaccuccccccucugcaccaccaacaccaaggagggcuccaacaucugccucacccgcaccgaccgcggcugguacugcgacaacgccggcuccgucuccuucuucccccaggccgagaccugcaaggucugcuccaaccgcgucuucugcgacaccaugaacucccucacccuccccuccgaggucaaccucugcaacgucgacaucuucaaccccaaguacgacugcaagaucaugaccuccaagaccgacgucuccuccuccgucaucaccucccucggcgccaucgucuccugcuacggcaagaccaagugcaccgccuccaacaagaacaagggcaucaucaagaccuucuccaacggcugcgacuacgucuccaacaagggcgucgacaccgucuccgucggcaacacccucuacuacgucaacaagcaggagggcaagucccucuacgucaagggcgagcccaucaucaacuucuacgacccccucgucuuccccuccgacgaguucgacgccuccaucucccaggucaacgagaagaucaaccagucccucgccuucauccgcaaguccgacgagcuccuccacaacgucaacgccggcaaguccaccaccaacaucaugaucaccaccaucaucaucgucaucaucgucauccuccucucccucaucgccgucggccuccuccucuacugcaaggcccgcugaggacuagugaagggaacacccaaauuuaauucagccuuaagcacaauuaauuaagagugaaacguaauuguacaagcaguuggucacccaccauagggcaugaucaacaccgcaaccuuuccuuuuucccccagugauucugaaaaaccccucuucccuucagcuugcuuagauguuccaaauuuaguaagcuuaaggcggccuacagaagaaaaagaaaaaaaaggccacaaaaguucccucucacuuucaguaaauaaaauaaaagcagcaacagaaauaaagaaauaaaugaaauucaaaaugaaauaaauauuguguugugcagcauuaaaaaaucaauaaaaauuaaaaaugagcaagaucuaaaaaaaaaaaaaaaaaaaaaaaaaaaaaaaaaaaaaaaaaaaaaaaaaaaaaaaaaaaaaaaaugcaucccccccccccccccccccccccccccccccaaaggcucuuuucagagccaccagaauu

SEQ ID NO: 7391 - RNA, 2130 nt, Artificial Sequence
  mRNA product Design f-1 comprising derived and/or modified sequence from HRSV(A2)__F-del_DSCav1_mut7 (opt3)
gggagagcggcucggccauuuugucccagucaguccggaggcugcggcugcagaaguaccgccugcggaguaacugcaaagaagcuuaccauggagcugcucauccuuaaggccaacgcuauuaccacaauacugacugcagugacguucugcuuugccagcggccagaauaucaccgaagaguucuaccaauccacauguucugcggucucaaaaggguauuugagugcuuuaagaacuggaugguacaccagcguuauuacaaucgaacuguccaacauuaaggagaauaaaugcaacgguaccgacgccaaggugaaacuaaucaagcaggaacucgauaaguauaaaaaugcaguaacugagcugcagaugcuuauguguucuacacccgccaccggcucggggucagcuauagcaagcggaguggccgucugcaaggugcugcacuuggagggcgaaguuaacaaaaucaagagugcucuccuguccacgaauaaagccguggucucucugagcaacgguguguccguacucacuuuuaagguuuuagaccugaagaauuacauugauaaacagcuuuugccuauccugaacaagcaaucauguaguauuagcaauaucgagaccgugauggaguuccagcagaaaaacaauaggcuacucgaaauaacacgggaguuuucugucaacgcgggggugacuaccccaguguccacauauaugcugaccaauucagaacuucugagcuugauuaacgacaugccgaucacgaacgaucagaagaaacucaugaguaauaacguccaaauuguucgccagcagucuuacuccaucaugugcaucauuaaggaggaagugcuggcauauguagugcaguuaccccuguacggagucauagacacuccuuguuggaaacuccauacaagcccacuuugcaccacuaauacaaaggagggcucgaacaucugucugacccgaacggaucguggcugguacugcgacaaugccgggucuguguccuucuuuccccaagcugaaaccuguaagguuugcucaaacagaguguucugcgauacaaugaauaguuugacucuaccuagcgaggucaaccuguguaauguggacauuuuuaacccaaaauaugauugcaagaucaugaccuccaaaacagacguaucuagcucaguuauaacuagccucggagccauuguguccuguuacgguaagaccaaaugcacagcaagcaauaagaacaagggcaucaucaaaaccuucucuaaugggugugauuaugucucaaacaagggaguggacacugucagugugggcaauacgcuguacuauguuaacaaacaggaggguaagagccuuuacgugaaaggggaacccauuaucaacuuuuaugacccucugguauucccauccgaugaguuugacgcuucuauuucgcaggucaaugaaaagauaaaccaaaguuuggccuucaucaggaaguccgaugagcuccugcacaaugugaacgcgggaaaaucaacaaccaauauuaugaucacuaccaucauuauaguuaucauugugaucuuacugagucuaauugccgucggccuccugcuuuacugcaaggcacggugaggacuagugaagggaacacccaaauuuaauucagccuuaagcacaauuaauuaagagugaaacguaauuguacaagcaguuggucacccaccauagggcaugaucaacaccgcaaccuuuccuuuuucccccagugauucugaaaaaccccucuucccuucagcuugcuuagauguuccaaauuuaguaagcuuaaggcggccuacagaagaaaaagaaaaaaaaggccacaaaaguucccucucacuuucaguaaauaaaauaaaagcagcaacagaaauaaagaaauaaaugaaauucaaaaugaaauaaauauuguguugugcagcauuaaaaaaucaauaaaaauuaaaaaugagcaagaucuaaaaaaaaaaaaaaaaaaaaaaaaaaaaaaaaaaaaaaaaaaaaaaaaaaaaaaaaaaaaaaaaugcaucccccccccccccccccccccccccccccccaaaggcucuuuucagagccaccagaauu

SEQ ID NO: 7392 - RNA, 2130 nt, Artificial Sequence
  mRNA product Design f-1 comprising derived and/or modified sequence from HRSV(A2)__F-del_DSCav1_mut7 (opt4)
gggagagcggcucggccauuuugucccagucaguccggaggcugcggcugcagaaguaccgccugcggaguaacugcaaagaagcuuaccauggagcugcugauccugaaggccaacgccaucaccaccauccugaccgccgugaccuucugcuucgccagcggccagaacaucaccgaggaguucuaccagagcaccugcagcgccgugagcaagggcuaccugagcgcccugagaaccggcugguacaccagcgugaucaccaucgagcugagcaacaucaaggagaacaagugcaacggcaccgacgccaaggugaagcugaucaagcaggagcuggacaaguacaagaacgccgugaccgagcugcagaugcugaugugcagcacccccgccaccggcagcggcagcgccaucgccagcggcguggccgugugcaaggugcugcaccuggagggcgaggugaacaagaucaagagcgcccugcugagcaccaacaaggccguggugagccugagcaacggcgugagcgugcugaccuucaaggugcuggaccugaagaacuacaucgacaagcagcugcugcccauccugaacaagcagagcugcagcaucagcaacaucgagaccgugauggaguuccagcagaagaacaacagacugcuggagaucaccagagaguucagcgugaacgccggcgugaccacccccgugagcaccuacaugcugaccaacagcgagcugcugagccugaucaacgacaugcccaucaccaacgaccagaagaagcugaugagcaacaacgugcagaucgugagacagcagagcuacagcaucaugugcaucaucaaggaggaggugcuggccuacguggugcagcugccccuguacggcgugaucgacacccccugcuggaagcugcacaccagcccccugugcaccaccaacaccaaggagggcagcaacaucugccugaccagaaccgacagaggcugguacugcgacaacgccggcagcgugagcuucuucccccaggccgagaccugcaaggugugcagcaacagaguguucugcgacaccaugaacagccugacccugcccagcgaggugaaccugugcaacguggacaucuucaaccccaaguacgacugcaagaucaugaccagcaagaccgacgugagcagcagcgugaucaccagccugggcgccaucgugagcugcuacggcaagaccaagugcaccgccagcaacaagaacaagggcaucaucaagaccuucagcaacggcugcgacuacgugagcaacaagggcguggacaccgugagcgugggcaacacccuguacuacgugaacaagcaggagggcaagagccuguacgugaagggcgagcccaucaucaacuucuacgacccccugguguuccccagcgacgaguucgacgccagcaucagccaggugaacgagaagaucaaccagagccuggccuucaucagaaagagcgacgagcugcugcacaacgugaacgccggcaagagcaccaccaacaucaugaucaccaccaucaucaucgugaucaucgugauccugcugagccugaucgccgugggccugcugcuguacugcaaggccagaugaggacuagugaagggaacacccaaauuuaauucagccuuaagcacaauuaauuaagagugaaacguaauuguacaagcaguuggucacccaccauagggcaugaucaacaccgcaaccuuuccuuuuucccccagugauucugaaaaaccccucuucccuucagcuugcuuagauguuccaaauuuaguaagcuuaaggcggccuacagaagaaaaagaaaaaaaaggccacaaaaguucccucucacuuucaguaaauaaaauaaaagcagcaacagaaauaaagaaauaaaugaaauucaaaaugaaauaaauauuguguugugcagcauuaaaaaaucaauaaaaauuaaaaaugagcaagaucuaaaaaaaaaaaaaaaaaaaaaaaaaaaaaaaaaaaaaaaaaaaaaaaaaaaaaaaaaaaaaaaaugcaucccccccccccccccccccccccccccccccaaaggcucuuuucagagccaccagaauu

SEQ ID NO: 7393 - RNA, 2130 nt, Artificial Sequence
  mRNA product Design f-1 comprising derived and/or modified sequence from HRSV(A2)__F-del_DSCav1_mut7 (opt5)
gggagagcggcucggccauuuugucccagucaguccggaggcugcggcugcagaaguaccgccugcggaguaacugcaaagaagcuuaccauggagcugcucauccugaaggccaacgcuauuaccacaauccuuacggccgugaccuucugcuuugcgagcggccagaauauuacagaagaguucuaccaauccaccuguucugcugucagcaaaggguaucuguccgcccucagaacaggaugguacaccucuguuaucacaauugaacugagcaacaucaaggagaauaaaugcaacggcaccgacgccaaggugaaacuuaucaagcaggaacuggauaaguauaaaaaugcugugacggagcuccagaugcugauguguuccacccccgccacagggucuggaagcgcuauugccuccggcgucgcggugugcaagguucugcaccucgagggggaagugaacaaaaucaagagcgcccugcuuucuaccaauaaagcugucgugucccugagcaacggaguuucugugcucacauuuaagguccuggaccuuaagaauuacauugauaaacagcugcucccuauccugaacaagcaauccuguagcauuucuaauaucgagaccgugauggaguuccagcagaaaaacaaucggcugcucgaaauuacgcgcgaguuuuccgugaacgccggcgucacaaccccgguuagcacauauaugcugaccaauuccgaacuucugucucucaucaacgacaugcccaucaccaacgaucagaagaaacugaugagcaauaacgugcaaauugugagacagcaguccuacagcaucaugugcauuaucaaggaggaaguccuugcuuaugugguucagcugccucucuacggcgugauugacacacccuguuggaaacugcauacgucuccucugugcaccacaaauaccaaggagggguccaacaucugucucacacggaccgaucgcggaugguacugcgacaaugccggcagcgucucuuucuuuccccaagcggaaacguguaaggugugcagcaacagaguuuucugcgauacaaugaacucccugacccuuccuucugaggugaaucuguguaaugucgacaucuuuaacccgaaauaugauugcaagauuaugaccagcaaaacagacguguccagcucugucaucaccucccucggggccauugugagcuguuacggaaagacaaaaugcacggcuucuaauaagaacaagggcaucauuaaaaccuucuccaaugggugugauuauguuagcaacaagggaguggacacagucuccgugggcaauacccuguacuauguuaacaaacaggagggcaagucucuuuacgugaaaggggaacccaucaucaacuuuuaugacccucuggucuuccccagcgaugaguuugacgccuccauuucucaggugaaugaaaagaucaaccaaagccucgcuuucauucggaaguccgaugagcugcugcacaaugugaacgccggaaaaagcacaaccaauaucaugauuacgaccaucauuaucguuaucauugucauccuccugucucuuauugccgugggccugcuccuguacugcaaggcucgcugaggacuagugaagggaacacccaaauuuaauucagccuuaagcacaauuaauuaagagugaaacguaauuguacaagcaguuggucacccaccauagggcaugaucaacaccgcaaccuuuccuuuuucccccagugauucugaaaaaccccucuucccuucagcuugcuuagauguuccaaauuuaguaagcuuaaggcggccuacagaagaaaaagaaaaaaaaggccacaaaaguucccucucacuuucaguaaauaaaauaaaagcagcaacagaaauaaagaaauaaaugaaauucaaaaugaaauaaauauuguguugugcagcauuaaaaaaucaauaaaaauuaaaaaugagcaagaucuaaaaaaaaaaaaaaaaaaaaaaaaaaaaaaaaaaaaaaaaaaaaaaaaaaaaaaaaaaaaaaaaugcaucccccccccccccccccccccccccccccccaaaggcucuuuucagagccaccagaauu

SEQ ID NO: 7394 - RNA, 2130 nt, Artificial Sequence
  mRNA product Design f-1 comprising derived and/or modified sequence from HRSV(A2)__F-del_DSCav1_mut7 (opt6)
gggagagcggcucggccauuuugucccagucaguccggaggcugcggcugcagaaguaccgccugcggaguaacugcaaagaagcuuaccauggaauuacuaauccucaaagcaaacgcaauuacaaccauacuaaccgcugucaccuuuuguuuugccucaggacaaaacauaacugaagaauuuuaccaaucaacaugcuccgcaguaucuaaaggauaccucagcgcguuaagaacaggaugguacacaucgguaauaaccaucgaauuauccaacauaaaagaaaauaaaugcaauggaacagacgcaaaagucaaauuaauuaaacaagaacuagacaaauauaaaaacgcaguaaccgaauuacaaaugcuaauguguucaacaccagcaacaggaucaggaucagcuauagcuucaggaguugccguaugcaaagugcuacacuuagaaggagaagugaauaaaauaaaaucagcucuauuaucaacgaacaaagccguaguaucucuaucaaauggcguaucaguacucacauucaaaguacucgaccuaaaaaacuauauagauaaacaacuauuacccauccuaaauaaacaaagcugcucuauaucaaacaucgaaacaguaauggaauuucaacaaaaaaacaacagacuacuagaaauaacccgagaguucucaguuaaugcaggaguaacaacaccagucucaacauacaugcucacaaacucagaacuccuaucacuaauaaaugacaugccaauaacaaacgaccaaaaaaaacucaugucuaacaacguccaaauaguaagacaacaauccuacagcauaauguguauaauaaaagaagaaguuuuagcauacgucguacaacuacccuuauauggcguaauagauacaccaugcuggaaacuccauaccucaccucuauguacaacaaauaccaaagaagguucuaauauaugccuaacacgaacugaccgaggaugguacugugacaacgcaggaucagucucuuucuuuccacaagcagaaaccugcaaaguaugcaguaaccgcguauuuugcgacacaaugaacucccuaaccuuaccaucagaaguaaacuuauguaacguagacauauucaauccaaaauaugacugcaaaauaaugacaucaaaaacagacguaagcucaucaguaauaacuucacuaggcgcaauuguaucaugcuauggaaaaaccaaauguaccgcauccaacaaaaauaaaggaauaauaaaaaccuucucuaacggaugcgacuacguaucaaacaaagguguagauacaguuucuguaggaaacacacucuacuauguaaauaaacaagaaggaaaaucacuauacguaaaaggagaaccaauaauaaacuucuaugacccacuuguauuuccaucugaugaauuugaugcaagcauaucacaaguaaacgaaaaaauaaaccaaucucuagccuuuauacgaaaaagcgacgaauuacuacauaacgucaacgcuggaaaaucaacaacaaacauaaugauaacaacaauaauaauaguaauaauagucauccuauuaucacuaaucgccguaggacuacuccuauacugcaaagcuagauaaggacuagugaagggaacacccaaauuuaauucagccuuaagcacaauuaauuaagagugaaacguaauuguacaagcaguuggucacccaccauagggcaugaucaacaccgcaaccuuuccuuuuucccccagugauucugaaaaaccccucuucccuucagcuugcuuagauguuccaaauuuaguaagcuuaaggcggccuacagaagaaaaagaaaaaaaaggccacaaaaguucccucucacuuucaguaaauaaaauaaaagcagcaacagaaauaaagaaauaaaugaaauucaaaaugaaauaaauauuguguugugcagcauuaaaaaaucaauaaaaauuaaaaaugagcaagaucuaaaaaaaaaaaaaaaaaaaaaaaaaaaaaaaaaaaaaaaaaaaaaaaaaaaaaaaaaaaaaaaaugcaucccccccccccccccccccccccccccccccaaaggcucuuuucagagccaccagaauu

SEQ ID NO: 7395 - RNA, 2130 nt, Artificial Sequence
  mRNA product Design f-1 comprising derived and/or modified sequence from HRSV(A2)__F-del_DSCav1_mut7 (opt11)
gggagagcggcucggccauuuugucccagucaguccggaggcugcggcugcagaaguaccgccugcggaguaacugcaaagaagcuuaccauggaacuccucauccucaaagccaacgccauaaccacuauccucacagcagucacuuucugcuucgccucaggacaaaacauaaccgaagaguucuaccaauccacaugcuccgccgucuccaaaggcuaccucucagcgcuccgcaccggcugguacacauccgucaucaccaucgaacuaagcaacauaaaagaaaacaaaugcaacggcaccgacgccaaaguuaaacucaucaagcaagaacucgacaaauacaaaaacgcagucacagaacuucaaaugcucaugugcuccacacccgccacagguucuggcucagcaaucgcaagcggcgucgccguaugcaaaguccuucaccucgaaggcgaagucaacaaaaucaaauccgcccuccucuccaccaauaaagcugucgucucacucuccaacggcgucagcguccucacauucaaaguccucgaccucaaaaacuacauagacaagcaacuccucccgauacucaacaaacaaagcugcucuaucuccaacaucgaaaccgucauggaguuccaacagaaaaacaaucgucuccucgaaaucacccgcgaguucucaguaaacgccggggucaccacaccagucuccaccuacaugcucaccaacuccgaacuccuuagccucauaaacgacaugcccauaaccaacgaccaaaagaaacucaugagcaacaacguacaaauaguccgacaacaauccuauuccaucauguguaucaucaaagaagaaguccucgcauacguaguccaacucccccuauacggcguaaucgacaccccauguuggaaacuccacaccucaccacucuguaccaccaacaccaaagaaggcucaaacaucugccucacccgcacagaccgcggcugguacugcgacaacgcgggcuccgucagcuucuuuccccaagcggaaaccugcaaagucugcagcaacagagucuucugcgacacuaugaacucccucacccuccccucagaagucaaccucugcaacgucgacaucuucaacccgaaauacgacugcaaaaucaugaccagcaaaacugacgucuccucguccgucaucaccucacucggcgcaaucgugagcugcuacggcaaaaccaaaugcaccgccuccaacaaaaacaaaggcaucauaaaaacauucagcaacggcugcgacuacgucucgaacaaaggagucgacaccguaucagugggcaacacccuauacuacguaaacaagcaagaaggcaaaucacucuacguaaaaggcgaacccaucaucaacuucuacgacccccucgucuuccccuccgacgaguucgacgccuccaucucucaagucaacgagaaaaucaaccaaucccuugccuucauacguaaaagcgacgaacuccuucacaacguaaacgccgggaaauccaccacuaacauaaugaucaccaccaucaucaucguuaucauagucauccuccucucucucauagcagucggccuacuccuguacugcaaagcgcgcuaaggacuagugaagggaacacccaaauuuaauucagccuuaagcacaauuaauuaagagugaaacguaauuguacaagcaguuggucacccaccauagggcaugaucaacaccgcaaccuuuccuuuuucccccagugauucugaaaaaccccucuucccuucagcuugcuuagauguuccaaauuuaguaagcuuaaggcggccuacagaagaaaaagaaaaaaaaggccacaaaaguucccucucacuuucaguaaauaaaauaaaagcagcaacagaaauaaagaaauaaaugaaauucaaaaugaaauaaauauuguguugugcagcauuaaaaaaucaauaaaaauuaaaaaugagcaagaucuaaaaaaaaaaaaaaaaaaaaaaaaaaaaaaaaaaaaaaaaaaaaaaaaaaaaaaaaaaaaaaaaugcaucccccccccccccccccccccccccccccccaaaggcucuuuucagagccaccagaauu

SEQ ID NO: 7396 - RNA, 1910 nt, Artificial Sequence
  mRNA product Design f-2 comprising derived and/or modified sequence from HRSV(A2)__F-del_DSCav1_mut7 (opt1)
gggagagcggcucggccauuuugucccagucaguccggaggcugcggcugcagaaguaccgccugcggaguaacugcaaagaagcuuaccauggagcugcucauccugaaggccaacgccaucaccaccauccugacggcggugaccuucugcuucgccagcggccagaacaucaccgaggaguucuaccaguccacgugcagcgccgucuccaagggguaccucagcgcccugcggaccggcugguacaccuccgugaucaccaucgagcugagcaacaucaaggagaacaagugcaacgggaccgacgccaaggugaagcucaucaagcaggagcuggacaaguacaagaacgcggucacggagcugcagaugcugaugugcuccaccccggcaaccggcuccggcuccgccaucgcgagcggcgucgccgugugcaaggugcugcaccucgagggggaggucaacaagaucaagagcgcccugcuguccaccaacaaggccguggugagccucuccaacggcgucagcgugcugaccuucaaggugcuggaccucaagaacuacaucgacaagcagcugcugcccauccugaacaagcagagcugcuccaucagcaacaucgagacggugauggaguuccagcagaagaacaaccggcuccuggagaucacccgcgaguucagcgugaacgccggggucaccacccccguguccacguacaugcugaccaacagcgagcuccugucccugaucaacgacaugccgaucaccaacgaccagaagaagcucaugagcaacaacgugcagaucguccggcagcaguccuacagcaucaugugcaucaucaaggaggaggugcuggcguacgugguccagcugccccucuacggcgugaucgacacccccugcuggaagcugcacacgagcccccugugcaccaccaacaccaaggagggguccaacaucugccucacgcgcaccgaccggggcugguacugcgacaacgccggcagcgucuccuucuucccgcaggccgagaccugcaaggugugcagcaaccgcguguucugcgacaccaugaacucccugacgcugcccagcgagguaaaccucugcaacgucgacaucuucaaccccaaguacgacugcaagaucaugaccuccaagaccgacgugagcuccagcgugaucaccucccugggggccaucgucagcugcuacggcaagacgaagugcaccgccagcaacaagaacaaggggaucaucaagaccuucuccaacggcugcgacuacgugagcaacaagggcguggacaccguguccgucgggaacacccuguacuacgugaacaagcaggagggcaagagccucuacgugaagggggagcccaucaucaacuucuacgacccgcuggucuuccccuccgacgaguucgacgcgagcaucucccaggugaacgagaagaucaaccagagccuggccuucauccgcaaguccgacgagcugcuccacaacgugaacgccggcaagagcacgaccaacaucaugaucaccaccaucaucaucgucaucaucgugauccugcugucccucaucgccguggggcugcugcucuacugcaaggcccggugaggacuaguggaagcauuuuccuggcugauuaaaagaaauuacucagcuauggucaucuguuccuguuagaaggcuaugcagcauauuauauacuaugcgcauguuaugaaaugcauaauaaaaaauuuuaaaaaaucuaaaagaucuaaaaaaaaaaaaaaaaaaaaaaaaaaaaaaaaaaaaaaaaaaaaaaaaaaaaaaaaaaaaaaaaugcaucccccccccccccccccccccccccccccccaaaggcucuuuucagagccaccagaauu

SEQ ID NO: 7397 - RNA, 1910 nt, Artificial Sequence
  mRNA product Design f-2 comprising derived and/or modified sequence from HRSV(A2)__F-del_DSCav1_mut7 (opt1)
gggagagcggcucggccauuuugucccagucaguccggaggcugcggcugcagaaguaccgccugcggaguaacugcaaagaagcuuaccauggagcugcucauccugaaggccaacgccaucaccaccauccugacggcggugaccuucugcuucgccagcggccagaacaucaccgaggaguucuaccaguccacgugcagcgccgucuccaagggguaccucagcgcccugcgcaccggcugguacaccuccgugaucaccaucgagcugagcaacaucaaggagaacaagugcaacgggaccgacgccaaggugaagcucaucaagcaggagcuggacaaguacaagaacgcggucacggagcugcagaugcucaugugcuccacccccgccaccggcagcggguccgccaucgccagcggcguggcggugugcaagguccugcaccuggagggcgaggugaacaagaucaaguccgcccuccugagcaccaacaaggccguggucucccugagcaacgggguguccgugcucacguucaagguccuggaccugaagaacuacaucgacaagcagcuccugccgauccugaacaagcagagcugcuccaucagcaacaucgagaccgugauggaguuccagcagaagaacaaccggcuccuggagaucacccgcgaguucuccgugaacgccggcgucaccacgcccgugagcaccuacaugcugaccaacagcgagcuccugucccugaucaacgacaugcccaucaccaacgaccagaagaagcucaugagcaacaacgugcagaucguccggcagcaguccuacagcaucaugugcaucaucaaggaggaggugcuggccuacgugguccagcugccccucuacggggugaucgacacgccgugcuggaagcugcacaccagcccccugugcaccaccaacacgaaggagggcagcaacaucugccucacccgcaccgaccgggggugguacugcgacaacgcgggcuccgugagcuucuucccccaggccgagaccugcaaggucugcuccaaccgcguguucugcgacacgaugaacagccugacccugcccuccgaggucaaccucugcaacguggacaucuucaacccgaaguacgacugcaagaucaugaccagcaagaccgacguguccagcuccgucaucacgagccugggcgccaucguguccugcuacgggaagaccaagugcaccgccagcaacaagaacaagggcaucaucaagaccuucuccaacgggugcgacuacgugagcaacaagggcgucgacacggugagcgugggcaacacccuguacuacgucaacaagcaggaggggaagucccucuacgugaagggcgagcccaucaucaacuucuacgacccccugguguuccccagcgacgaguucgacgccuccaucagccaggucaacgagaagaucaaccagucccuggcguucauccggaaguccgacgagcuccugcacaacgugaacgccgggaaguccaccaccaacaucaugaucaccacgaucaucaucgugaucaucgucauccugcucagccugaucgccgugggccugcuccuguacugcaaggcccgcugaggacuaguggaagcauuuuccuggcugauuaaaagaaauuacucagcuauggucaucuguuccuguuagaaggcuaugcagcauauuauauacuaugcgcauguuaugaaaugcauaauaaaaaauuuuaaaaaaucuaaaagaucuaaaaaaaaaaaaaaaaaaaaaaaaaaaaaaaaaaaaaaaaaaaaaaaaaaaaaaaaaaaaaaaaugcaucccccccccccccccccccccccccccccccaaaggcucuuuucagagccaccagaauu

SEQ ID NO: 7398 - RNA, 1910 nt, Artificial Sequence
  mRNA product Design f-2 comprising derived and/or modified sequence from HRSV(A2)__F-del_DSCav1_mut7 (opt2)
gggagagcggcucggccauuuugucccagucaguccggaggcugcggcugcagaaguaccgccugcggaguaacugcaaagaagcuuaccauggagcuccucauccucaaggccaacgccaucaccaccauccucaccgccgucaccuucugcuucgccuccggccagaacaucaccgaggaguucuaccaguccaccugcuccgccgucuccaagggcuaccucuccgcccuccgcaccggcugguacaccuccgucaucaccaucgagcucuccaacaucaaggagaacaagugcaacggcaccgacgccaaggucaagcucaucaagcaggagcucgacaaguacaagaacgccgucaccgagcuccagaugcucaugugcuccacccccgccaccggcuccggcuccgccaucgccuccggcgucgccgucugcaagguccuccaccucgagggcgaggucaacaagaucaaguccgcccuccucuccaccaacaaggccgucgucucccucuccaacggcgucuccguccucaccuucaagguccucgaccucaagaacuacaucgacaagcagcuccuccccauccucaacaagcaguccugcuccaucuccaacaucgagaccgucauggaguuccagcagaagaacaaccgccuccucgagaucacccgcgaguucuccgucaacgccggcgucaccacccccgucuccaccuacaugcucaccaacuccgagcuccucucccucaucaacgacaugcccaucaccaacgaccagaagaagcucauguccaacaacguccagaucguccgccagcaguccuacuccaucaugugcaucaucaaggaggagguccucgccuacgucguccagcucccccucuacggcgucaucgacacccccugcuggaagcuccacaccuccccccucugcaccaccaacaccaaggagggcuccaacaucugccucacccgcaccgaccgcggcugguacugcgacaacgccggcuccgucuccuucuucccccaggccgagaccugcaaggucugcuccaaccgcgucuucugcgacaccaugaacucccucacccuccccuccgaggucaaccucugcaacgucgacaucuucaaccccaaguacgacugcaagaucaugaccuccaagaccgacgucuccuccuccgucaucaccucccucggcgccaucgucuccugcuacggcaagaccaagugcaccgccuccaacaagaacaagggcaucaucaagaccuucuccaacggcugcgacuacgucuccaacaagggcgucgacaccgucuccgucggcaacacccucuacuacgucaacaagcaggagggcaagucccucuacgucaagggcgagcccaucaucaacuucuacgacccccucgucuuccccuccgacgaguucgacgccuccaucucccaggucaacgagaagaucaaccagucccucgccuucauccgcaaguccgacgagcuccuccacaacgucaacgccggcaaguccaccaccaacaucaugaucaccaccaucaucaucgucaucaucgucauccuccucucccucaucgccgucggccuccuccucuacugcaaggcccgcugaggacuaguggaagcauuuuccuggcugauuaaaagaaauuacucagcuauggucaucuguuccuguuagaaggcuaugcagcauauuauauacuaugcgcauguuaugaaaugcauaauaaaaaauuuuaaaaaaucuaaaagaucuaaaaaaaaaaaaaaaaaaaaaaaaaaaaaaaaaaaaaaaaaaaaaaaaaaaaaaaaaaaaaaaaugcaucccccccccccccccccccccccccccccccaaaggcucuuuucagagccaccagaauu

SEQ ID NO: 7399 - RNA, 1910 nt, Artificial Sequence
  mRNA product Design f-2 comprising derived and/or modified sequence from HRSV(A2)__F-del_DSCav1_mut7 (opt3)
gggagagcggcucggccauuuugucccagucaguccggaggcugcggcugcagaaguaccgccugcggaguaacugcaaagaagcuuaccauggagcugcucauccuuaaggccaacgcuauuaccacaauacugacugcagugacguucugcuuugccagcggccagaauaucaccgaagaguucuaccaauccacauguucugcggucucaaaaggguauuugagugcuuuaagaacuggaugguacaccagcguuauuacaaucgaacuguccaacauuaaggagaauaaaugcaacgguaccgacgccaaggugaaacuaaucaagcaggaacucgauaaguauaaaaaugcaguaacugagcugcagaugcuuauguguucuacacccgccaccggcucggggucagcuauagcaagcggaguggccgucugcaaggugcugcacuuggagggcgaaguuaacaaaaucaagagugcucuccuguccacgaauaaagccguggucucucugagcaacgguguguccguacucacuuuuaagguuuuagaccugaagaauuacauugauaaacagcuuuugccuauccugaacaagcaaucauguaguauuagcaauaucgagaccgugauggaguuccagcagaaaaacaauaggcuacucgaaauaacacgggaguuuucugucaacgcgggggugacuaccccaguguccacauauaugcugaccaauucagaacuucugagcuugauuaacgacaugccgaucacgaacgaucagaagaaacucaugaguaauaacguccaaauuguucgccagcagucuuacuccaucaugugcaucauuaaggaggaagugcuggcauauguagugcaguuaccccuguacggagucauagacacuccuuguuggaaacuccauacaagcccacuuugcaccacuaauacaaaggagggcucgaacaucugucugacccgaacggaucguggcugguacugcgacaaugccgggucuguguccuucuuuccccaagcugaaaccuguaagguuugcucaaacagaguguucugcgauacaaugaauaguuugacucuaccuagcgaggucaaccuguguaauguggacauuuuuaacccaaaauaugauugcaagaucaugaccuccaaaacagacguaucuagcucaguuauaacuagccucggagccauuguguccuguuacgguaagaccaaaugcacagcaagcaauaagaacaagggcaucaucaaaaccuucucuaaugggugugauuaugucucaaacaagggaguggacacugucagugugggcaauacgcuguacuauguuaacaaacaggaggguaagagccuuuacgugaaaggggaacccauuaucaacuuuuaugacccucugguauucccauccgaugaguuugacgcuucuauuucgcaggucaaugaaaagauaaaccaaaguuuggccuucaucaggaaguccgaugagcuccugcacaaugugaacgcgggaaaaucaacaaccaauauuaugaucacuaccaucauuauaguuaucauugugaucuuacugagucuaauugccgucggccuccugcuuuacugcaaggcacggugaggacuaguggaagcauuuuccuggcugauuaaaagaaauuacucagcuauggucaucuguuccuguuagaaggcuaugcagcauauuauauacuaugcgcauguuaugaaaugcauaauaaaaaauuuuaaaaaaucuaaaagaucuaaaaaaaaaaaaaaaaaaaaaaaaaaaaaaaaaaaaaaaaaaaaaaaaaaaaaaaaaaaaaaaaugcaucccccccccccccccccccccccccccccccaaaggcucuuuucagagccaccagaauu

SEQ ID NO: 7400 - RNA, 1910 nt, Artificial Sequence
  mRNA product Design f-2 comprising derived and/or modified sequence from HRSV(A2)__F-del_DSCav1_mut7 (opt4)
gggagagcggcucggccauuuugucccagucaguccggaggcugcggcugcagaaguaccgccugcggaguaacugcaaagaagcuuaccauggagcugcugauccugaaggccaacgccaucaccaccauccugaccgccgugaccuucugcuucgccagcggccagaacaucaccgaggaguucuaccagagcaccugcagcgccgugagcaagggcuaccugagcgcccugagaaccggcugguacaccagcgugaucaccaucgagcugagcaacaucaaggagaacaagugcaacggcaccgacgccaaggugaagcugaucaagcaggagcuggacaaguacaagaacgccgugaccgagcugcagaugcugaugugcagcacccccgccaccggcagcggcagcgccaucgccagcggcguggccgugugcaaggugcugcaccuggagggcgaggugaacaagaucaagagcgcccugcugagcaccaacaaggccguggugagccugagcaacggcgugagcgugcugaccuucaaggugcuggaccugaagaacuacaucgacaagcagcugcugcccauccugaacaagcagagcugcagcaucagcaacaucgagaccgugauggaguuccagcagaagaacaacagacugcuggagaucaccagagaguucagcgugaacgccggcgugaccacccccgugagcaccuacaugcugaccaacagcgagcugcugagccugaucaacgacaugcccaucaccaacgaccagaagaagcugaugagcaacaacgugcagaucgugagacagcagagcuacagcaucaugugcaucaucaaggaggaggugcuggccuacguggugcagcugccccuguacggcgugaucgacacccccugcuggaagcugcacaccagcccccugugcaccaccaacaccaaggagggcagcaacaucugccugaccagaaccgacagaggcugguacugcgacaacgccggcagcgugagcuucuucccccaggccgagaccugcaaggugugcagcaacagaguguucugcgacaccaugaacagccugacccugcccagcgaggugaaccugugcaacguggacaucuucaaccccaaguacgacugcaagaucaugaccagcaagaccgacgugagcagcagcgugaucaccagccugggcgccaucgugagcugcuacggcaagaccaagugcaccgccagcaacaagaacaagggcaucaucaagaccuucagcaacggcugcgacuacgugagcaacaagggcguggacaccgugagcgugggcaacacccuguacuacgugaacaagcaggagggcaagagccuguacgugaagggcgagcccaucaucaacuucuacgacccccugguguuccccagcgacgaguucgacgccagcaucagccaggugaacgagaagaucaaccagagccuggccuucaucagaaagagcgacgagcugcugcacaacgugaacgccggcaagagcaccaccaacaucaugaucaccaccaucaucaucgugaucaucgugauccugcugagccugaucgccgugggccugcugcuguacugcaaggccagaugaggacuaguggaagcauuuuccuggcugauuaaaagaaauuacucagcuauggucaucuguuccuguuagaaggcuaugcagcauauuauauacuaugcgcauguuaugaaaugcauaauaaaaaauuuuaaaaaaucuaaaagaucuaaaaaaaaaaaaaaaaaaaaaaaaaaaaaaaaaaaaaaaaaaaaaaaaaaaaaaaaaaaaaaaaugcaucccccccccccccccccccccccccccccccaaaggcucuuuucagagccaccagaauu

SEQ ID NO: 7401 - RNA, 1910 nt, Artificial Sequence
  mRNA product Design f-2 comprising derived and/or modified sequence from HRSV(A2)__F-del_DSCav1_mut7 (opt5)
gggagagcggcucggccauuuugucccagucaguccggaggcugcggcugcagaaguaccgccugcggaguaacugcaaagaagcuuaccauggagcugcucauccugaaggccaacgcuauuaccacaauccuuacggccgugaccuucugcuuugcgagcggccagaauauuacagaagaguucuaccaauccaccuguucugcugucagcaaaggguaucuguccgcccucagaacaggaugguacaccucuguuaucacaauugaacugagcaacaucaaggagaauaaaugcaacggcaccgacgccaaggugaaacuuaucaagcaggaacuggauaaguauaaaaaugcugugacggagcuccagaugcugauguguuccacccccgccacagggucuggaagcgcuauugccuccggcgucgcggugugcaagguucugcaccucgagggggaagugaacaaaaucaagagcgcccugcuuucuaccaauaaagcugucgugucccugagcaacggaguuucugugcucacauuuaagguccuggaccuuaagaauuacauugauaaacagcugcucccuauccugaacaagcaauccuguagcauuucuaauaucgagaccgugauggaguuccagcagaaaaacaaucggcugcucgaaauuacgcgcgaguuuuccgugaacgccggcgucacaaccccgguuagcacauauaugcugaccaauuccgaacuucugucucucaucaacgacaugcccaucaccaacgaucagaagaaacugaugagcaauaacgugcaaauugugagacagcaguccuacagcaucaugugcauuaucaaggaggaaguccuugcuuaugugguucagcugccucucuacggcgugauugacacacccuguuggaaacugcauacgucuccucugugcaccacaaauaccaaggagggguccaacaucugucucacacggaccgaucgcggaugguacugcgacaaugccggcagcgucucuuucuuuccccaagcggaaacguguaaggugugcagcaacagaguuuucugcgauacaaugaacucccugacccuuccuucugaggugaaucuguguaaugucgacaucuuuaacccgaaauaugauugcaagauuaugaccagcaaaacagacguguccagcucugucaucaccucccucggggccauugugagcuguuacggaaagacaaaaugcacggcuucuaauaagaacaagggcaucauuaaaaccuucuccaaugggugugauuauguuagcaacaagggaguggacacagucuccgugggcaauacccuguacuauguuaacaaacaggagggcaagucucuuuacgugaaaggggaacccaucaucaacuuuuaugacccucuggucuuccccagcgaugaguuugacgccuccauuucucaggugaaugaaaagaucaaccaaagccucgcuuucauucggaaguccgaugagcugcugcacaaugugaacgccggaaaaagcacaaccaauaucaugauuacgaccaucauuaucguuaucauugucauccuccugucucuuauugccgugggccugcuccuguacugcaaggcucgcugaggacuaguggaagcauuuuccuggcugauuaaaagaaauuacucagcuauggucaucuguuccuguuagaaggcuaugcagcauauuauauacuaugcgcauguuaugaaaugcauaauaaaaaauuuuaaaaaaucuaaaagaucuaaaaaaaaaaaaaaaaaaaaaaaaaaaaaaaaaaaaaaaaaaaaaaaaaaaaaaaaaaaaaaaaugcaucccccccccccccccccccccccccccccccaaaggcucuuuucagagccaccagaauu

SEQ ID NO: 7402 - RNA, 1910 nt, Artificial Sequence
  mRNA product Design f-2 comprising derived and/or modified sequence from HRSV(A2)__F-del_DSCav1_mut7 (opt6)
gggagagcggcucggccauuuugucccagucaguccggaggcugcggcugcagaaguaccgccugcggaguaacugcaaagaagcuuaccauggaauuacuaauccucaaagcaaacgcaauuacaaccauacuaaccgcugucaccuuuuguuuugccucaggacaaaacauaacugaagaauuuuaccaaucaacaugcuccgcaguaucuaaaggauaccucagcgcguuaagaacaggaugguacacaucgguaauaaccaucgaauuauccaacauaaaagaaaauaaaugcaauggaacagacgcaaaagucaaauuaauuaaacaagaacuagacaaauauaaaaacgcaguaaccgaauuacaaaugcuaauguguucaacaccagcaacaggaucaggaucagcuauagcuucaggaguugccguaugcaaagugcuacacuuagaaggagaagugaauaaaauaaaaucagcucuauuaucaacgaacaaagccguaguaucucuaucaaauggcguaucaguacucacauucaaaguacucgaccuaaaaaacuauauagauaaacaacuauuacccauccuaaauaaacaaagcugcucuauaucaaacaucgaaacaguaauggaauuucaacaaaaaaacaacagacuacuagaaauaacccgagaguucucaguuaaugcaggaguaacaacaccagucucaacauacaugcucacaaacucagaacuccuaucacuaauaaaugacaugccaauaacaaacgaccaaaaaaaacucaugucuaacaacguccaaauaguaagacaacaauccuacagcauaauguguauaauaaaagaagaaguuuuagcauacgucguacaacuacccuuauauggcguaauagauacaccaugcuggaaacuccauaccucaccucuauguacaacaaauaccaaagaagguucuaauauaugccuaacacgaacugaccgaggaugguacugugacaacgcaggaucagucucuuucuuuccacaagcagaaaccugcaaaguaugcaguaaccgcguauuuugcgacacaaugaacucccuaaccuuaccaucagaaguaaacuuauguaacguagacauauucaauccaaaauaugacugcaaaauaaugacaucaaaaacagacguaagcucaucaguaauaacuucacuaggcgcaauuguaucaugcuauggaaaaaccaaauguaccgcauccaacaaaaauaaaggaauaauaaaaaccuucucuaacggaugcgacuacguaucaaacaaagguguagauacaguuucuguaggaaacacacucuacuauguaaauaaacaagaaggaaaaucacuauacguaaaaggagaaccaauaauaaacuucuaugacccacuuguauuuccaucugaugaauuugaugcaagcauaucacaaguaaacgaaaaaauaaaccaaucucuagccuuuauacgaaaaagcgacgaauuacuacauaacgucaacgcuggaaaaucaacaacaaacauaaugauaacaacaauaauaauaguaauaauagucauccuauuaucacuaaucgccguaggacuacuccuauacugcaaagcuagauaaggacuaguggaagcauuuuccuggcugauuaaaagaaauuacucagcuauggucaucuguuccuguuagaaggcuaugcagcauauuauauacuaugcgcauguuaugaaaugcauaauaaaaaauuuuaaaaaaucuaaaagaucuaaaaaaaaaaaaaaaaaaaaaaaaaaaaaaaaaaaaaaaaaaaaaaaaaaaaaaaaaaaaaaaaugcaucccccccccccccccccccccccccccccccaaaggcucuuuucagagccaccagaauu

SEQ ID NO: 7403 - RNA, 1910 nt, Artificial Sequence
  mRNA product Design f-2 comprising derived and/or modified sequence from HRSV(A2)__F-del_DSCav1_mut7 (opt11)
gggagagcggcucggccauuuugucccagucaguccggaggcugcggcugcagaaguaccgccugcggaguaacugcaaagaagcuuaccauggaacuccucauccucaaagccaacgccauaaccacuauccucacagcagucacuuucugcuucgccucaggacaaaacauaaccgaagaguucuaccaauccacaugcuccgccgucuccaaaggcuaccucucagcgcuccgcaccggcugguacacauccgucaucaccaucgaacuaagcaacauaaaagaaaacaaaugcaacggcaccgacgccaaaguuaaacucaucaagcaagaacucgacaaauacaaaaacgcagucacagaacuucaaaugcucaugugcuccacacccgccacagguucuggcucagcaaucgcaagcggcgucgccguaugcaaaguccuucaccucgaaggcgaagucaacaaaaucaaauccgcccuccucuccaccaauaaagcugucgucucacucuccaacggcgucagcguccucacauucaaaguccucgaccucaaaaacuacauagacaagcaacuccucccgauacucaacaaacaaagcugcucuaucuccaacaucgaaaccgucauggaguuccaacagaaaaacaaucgucuccucgaaaucacccgcgaguucucaguaaacgccggggucaccacaccagucuccaccuacaugcucaccaacuccgaacuccuuagccucauaaacgacaugcccauaaccaacgaccaaaagaaacucaugagcaacaacguacaaauaguccgacaacaauccuauuccaucauguguaucaucaaagaagaaguccucgcauacguaguccaacucccccuauacggcguaaucgacaccccauguuggaaacuccacaccucaccacucuguaccaccaacaccaaagaaggcucaaacaucugccucacccgcacagaccgcggcugguacugcgacaacgcgggcuccgucagcuucuuuccccaagcggaaaccugcaaagucugcagcaacagagucuucugcgacacuaugaacucccucacccuccccucagaagucaaccucugcaacgucgacaucuucaacccgaaauacgacugcaaaaucaugaccagcaaaacugacgucuccucguccgucaucaccucacucggcgcaaucgugagcugcuacggcaaaaccaaaugcaccgccuccaacaaaaacaaaggcaucauaaaaacauucagcaacggcugcgacuacgucucgaacaaaggagucgacaccguaucagugggcaacacccuauacuacguaaacaagcaagaaggcaaaucacucuacguaaaaggcgaacccaucaucaacuucuacgacccccucgucuuccccuccgacgaguucgacgccuccaucucucaagucaacgagaaaaucaaccaaucccuugccuucauacguaaaagcgacgaacuccuucacaacguaaacgccgggaaauccaccacuaacauaaugaucaccaccaucaucaucguuaucauagucauccuccucucucucauagcagucggccuacuccuguacugcaaagcgcgcuaaggacuaguggaagcauuuuccuggcugauuaaaagaaauuacucagcuauggucaucuguuccuguuagaaggcuaugcagcauauuauauacuaugcgcauguuaugaaaugcauaauaaaaaauuuuaaaaaaucuaaaagaucuaaaaaaaaaaaaaaaaaaaaaaaaaaaaaaaaaaaaaaaaaaaaaaaaaaaaaaaaaaaaaaaaugcaucccccccccccccccccccccccccccccccaaaggcucuuuucagagccaccagaauu

SEQ ID NO: 7404 - RNA, 1901 nt, Artificial Sequence
  mRNA product Design f-3 comprising derived and/or modified sequence from HRSV(A2)__F-del_DSCav1_mut7 (opt1)
gggagagucccgcagucggcguccagcggcucugcuuguucgugugugugucguugcaggccuuauucaagcuuaccauggagcugcucauccugaaggccaacgccaucaccaccauccugacggcggugaccuucugcuucgccagcggccagaacaucaccgaggaguucuaccaguccacgugcagcgccgucuccaagggguaccucagcgcccugcggaccggcugguacaccuccgugaucaccaucgagcugagcaacaucaaggagaacaagugcaacgggaccgacgccaaggugaagcucaucaagcaggagcuggacaaguacaagaacgcggucacggagcugcagaugcugaugugcuccaccccggcaaccggcuccggcuccgccaucgcgagcggcgucgccgugugcaaggugcugcaccucgagggggaggucaacaagaucaagagcgcccugcuguccaccaacaaggccguggugagccucuccaacggcgucagcgugcugaccuucaaggugcuggaccucaagaacuacaucgacaagcagcugcugcccauccugaacaagcagagcugcuccaucagcaacaucgagacggugauggaguuccagcagaagaacaaccggcuccuggagaucacccgcgaguucagcgugaacgccggggucaccacccccguguccacguacaugcugaccaacagcgagcuccugucccugaucaacgacaugccgaucaccaacgaccagaagaagcucaugagcaacaacgugcagaucguccggcagcaguccuacagcaucaugugcaucaucaaggaggaggugcuggcguacgugguccagcugccccucuacggcgugaucgacacccccugcuggaagcugcacacgagcccccugugcaccaccaacaccaaggagggguccaacaucugccucacgcgcaccgaccggggcugguacugcgacaacgccggcagcgucuccuucuucccgcaggccgagaccugcaaggugugcagcaaccgcguguucugcgacaccaugaacucccugacgcugcccagcgagguaaaccucugcaacgucgacaucuucaaccccaaguacgacugcaagaucaugaccuccaagaccgacgugagcuccagcgugaucaccucccugggggccaucgucagcugcuacggcaagacgaagugcaccgccagcaacaagaacaaggggaucaucaagaccuucuccaacggcugcgacuacgugagcaacaagggcguggacaccguguccgucgggaacacccuguacuacgugaacaagcaggagggcaagagccucuacgugaagggggagcccaucaucaacuucuacgacccgcuggucuuccccuccgacgaguucgacgcgagcaucucccaggugaacgagaagaucaaccagagccuggccuucauccgcaaguccgacgagcugcuccacaacgugaacgccggcaagagcacgaccaacaucaugaucaccaccaucaucaucgucaucaucgugauccugcugucccucaucgccguggggcugcugcucuacugcaaggcccggugaggacuaguacuggcugcaucucccuuuccucuguccuccauccuucucccaggauggugaagggggaccugguacccagugauccccaccccaggauccuaaaucaugacuuaccugcuaauaaaaacucauuggaaaagugagaagaucuaaaaaaaaaaaaaaaaaaaaaaaaaaaaaaaaaaaaaaaaaaaaaaaaaaaaaaaaaaaaaaaaugcaucccccccccccccccccccccccccccccccaaaggcucuuuucagagccaccagaauu

SEQ ID NO: 7405 - RNA, 1901 nt, Artificial Sequence
  mRNA product Design f-3 comprising derived and/or modified sequence from HRSV(A2)__F-del_DSCav1_mut7 (opt1)
gggagagucccgcagucggcguccagcggcucugcuuguucgugugugugucguugcaggccuuauucaagcuuaccauggagcugcucauccugaaggccaacgccaucaccaccauccugacggcggugaccuucugcuucgccagcggccagaacaucaccgaggaguucuaccaguccacgugcagcgccgucuccaagggguaccucagcgcccugcgcaccggcugguacaccuccgugaucaccaucgagcugagcaacaucaaggagaacaagugcaacgggaccgacgccaaggugaagcucaucaagcaggagcuggacaaguacaagaacgcggucacggagcugcagaugcucaugugcuccacccccgccaccggcagcggguccgccaucgccagcggcguggcggugugcaagguccugcaccuggagggcgaggugaacaagaucaaguccgcccuccugagcaccaacaaggccguggucucccugagcaacgggguguccgugcucacguucaagguccuggaccugaagaacuacaucgacaagcagcuccugccgauccugaacaagcagagcugcuccaucagcaacaucgagaccgugauggaguuccagcagaagaacaaccggcuccuggagaucacccgcgaguucuccgugaacgccggcgucaccacgcccgugagcaccuacaugcugaccaacagcgagcuccugucccugaucaacgacaugcccaucaccaacgaccagaagaagcucaugagcaacaacgugcagaucguccggcagcaguccuacagcaucaugugcaucaucaaggaggaggugcuggccuacgugguccagcugccccucuacggggugaucgacacgccgugcuggaagcugcacaccagcccccugugcaccaccaacacgaaggagggcagcaacaucugccucacccgcaccgaccgggggugguacugcgacaacgcgggcuccgugagcuucuucccccaggccgagaccugcaaggucugcuccaaccgcguguucugcgacacgaugaacagccugacccugcccuccgaggucaaccucugcaacguggacaucuucaacccgaaguacgacugcaagaucaugaccagcaagaccgacguguccagcuccgucaucacgagccugggcgccaucguguccugcuacgggaagaccaagugcaccgccagcaacaagaacaagggcaucaucaagaccuucuccaacgggugcgacuacgugagcaacaagggcgucgacacggugagcgugggcaacacccuguacuacgucaacaagcaggaggggaagucccucuacgugaagggcgagcccaucaucaacuucuacgacccccugguguuccccagcgacgaguucgacgccuccaucagccaggucaacgagaagaucaaccagucccuggcguucauccggaaguccgacgagcuccugcacaacgugaacgccgggaaguccaccaccaacaucaugaucaccacgaucaucaucgugaucaucgucauccugcucagccugaucgccgugggccugcuccuguacugcaaggcccgcugaggacuaguacuggcugcaucucccuuuccucuguccuccauccuucucccaggauggugaagggggaccugguacccagugauccccaccccaggauccuaaaucaugacuuaccugcuaauaaaaacucauuggaaaagugagaagaucuaaaaaaaaaaaaaaaaaaaaaaaaaaaaaaaaaaaaaaaaaaaaaaaaaaaaaaaaaaaaaaaaugcaucccccccccccccccccccccccccccccccaaaggcucuuuucagagccaccagaauu

SEQ ID NO: 7406 - RNA, 1901 nt, Artificial Sequence
  mRNA product Design f-3 comprising derived and/or modified sequence from HRSV(A2)__F-del_DSCav1_mut7 (opt2)
gggagagucccgcagucggcguccagcggcucugcuuguucgugugugugucguugcaggccuuauucaagcuuaccauggagcuccucauccucaaggccaacgccaucaccaccauccucaccgccgucaccuucugcuucgccuccggccagaacaucaccgaggaguucuaccaguccaccugcuccgccgucuccaagggcuaccucuccgcccuccgcaccggcugguacaccuccgucaucaccaucgagcucuccaacaucaaggagaacaagugcaacggcaccgacgccaaggucaagcucaucaagcaggagcucgacaaguacaagaacgccgucaccgagcuccagaugcucaugugcuccacccccgccaccggcuccggcuccgccaucgccuccggcgucgccgucugcaagguccuccaccucgagggcgaggucaacaagaucaaguccgcccuccucuccaccaacaaggccgucgucucccucuccaacggcgucuccguccucaccuucaagguccucgaccucaagaacuacaucgacaagcagcuccuccccauccucaacaagcaguccugcuccaucuccaacaucgagaccgucauggaguuccagcagaagaacaaccgccuccucgagaucacccgcgaguucuccgucaacgccggcgucaccacccccgucuccaccuacaugcucaccaacuccgagcuccucucccucaucaacgacaugcccaucaccaacgaccagaagaagcucauguccaacaacguccagaucguccgccagcaguccuacuccaucaugugcaucaucaaggaggagguccucgccuacgucguccagcucccccucuacggcgucaucgacacccccugcuggaagcuccacaccuccccccucugcaccaccaacaccaaggagggcuccaacaucugccucacccgcaccgaccgcggcugguacugcgacaacgccggcuccgucuccuucuucccccaggccgagaccugcaaggucugcuccaaccgcgucuucugcgacaccaugaacucccucacccuccccuccgaggucaaccucugcaacgucgacaucuucaaccccaaguacgacugcaagaucaugaccuccaagaccgacgucuccuccuccgucaucaccucccucggcgccaucgucuccugcuacggcaagaccaagugcaccgccuccaacaagaacaagggcaucaucaagaccuucuccaacggcugcgacuacgucuccaacaagggcgucgacaccgucuccgucggcaacacccucuacuacgucaacaagcaggagggcaagucccucuacgucaagggcgagcccaucaucaacuucuacgacccccucgucuuccccuccgacgaguucgacgccuccaucucccaggucaacgagaagaucaaccagucccucgccuucauccgcaaguccgacgagcuccuccacaacgucaacgccggcaaguccaccaccaacaucaugaucaccaccaucaucaucgucaucaucgucauccuccucucccucaucgccgucggccuccuccucuacugcaaggcccgcugaggacuaguacuggcugcaucucccuuuccucuguccuccauccuucucccaggauggugaagggggaccugguacccagugauccccaccccaggauccuaaaucaugacuuaccugcuaauaaaaacucauuggaaaagugagaagaucuaaaaaaaaaaaaaaaaaaaaaaaaaaaaaaaaaaaaaaaaaaaaaaaaaaaaaaaaaaaaaaaaugcaucccccccccccccccccccccccccccccccaaaggcucuuuucagagccaccagaauu

SEQ ID NO: 7407 - RNA, 1901 nt, Artificial Sequence
  mRNA product Design f-3 comprising derived and/or modified sequence from HRSV(A2)__F-del_DSCav1_mut7 (opt3)
gggagagucccgcagucggcguccagcggcucugcuuguucgugugugugucguugcaggccuuauucaagcuuaccauggagcugcucauccuuaaggccaacgcuauuaccacaauacugacugcagugacguucugcuuugccagcggccagaauaucaccgaagaguucuaccaauccacauguucugcggucucaaaaggguauuugagugcuuuaagaacuggaugguacaccagcguuauuacaaucgaacuguccaacauuaaggagaauaaaugcaacgguaccgacgccaaggugaaacuaaucaagcaggaacucgauaaguauaaaaaugcaguaacugagcugcagaugcuuauguguucuacacccgccaccggcucggggucagcuauagcaagcggaguggccgucugcaaggugcugcacuuggagggcgaaguuaacaaaaucaagagugcucuccuguccacgaauaaagccguggucucucugagcaacgguguguccguacucacuuuuaagguuuuagaccugaagaauuacauugauaaacagcuuuugccuauccugaacaagcaaucauguaguauuagcaauaucgagaccgugauggaguuccagcagaaaaacaauaggcuacucgaaauaacacgggaguuuucugucaacgcgggggugacuaccccaguguccacauauaugcugaccaauucagaacuucugagcuugauuaacgacaugccgaucacgaacgaucagaagaaacucaugaguaauaacguccaaauuguucgccagcagucuuacuccaucaugugcaucauuaaggaggaagugcuggcauauguagugcaguuaccccuguacggagucauagacacuccuuguuggaaacuccauacaagcccacuuugcaccacuaauacaaaggagggcucgaacaucugucugacccgaacggaucguggcugguacugcgacaaugccgggucuguguccuucuuuccccaagcugaaaccuguaagguuugcucaaacagaguguucugcgauacaaugaauaguuugacucuaccuagcgaggucaaccuguguaauguggacauuuuuaacccaaaauaugauugcaagaucaugaccuccaaaacagacguaucuagcucaguuauaacuagccucggagccauuguguccuguuacgguaagaccaaaugcacagcaagcaauaagaacaagggcaucaucaaaaccuucucuaaugggugugauuaugucucaaacaagggaguggacacugucagugugggcaauacgcuguacuauguuaacaaacaggaggguaagagccuuuacgugaaaggggaacccauuaucaacuuuuaugacccucugguauucccauccgaugaguuugacgcuucuauuucgcaggucaaugaaaagauaaaccaaaguuuggccuucaucaggaaguccgaugagcuccugcacaaugugaacgcgggaaaaucaacaaccaauauuaugaucacuaccaucauuauaguuaucauugugaucuuacugagucuaauugccgucggccuccugcuuuacugcaaggcacggugaggacuaguacuggcugcaucucccuuuccucuguccuccauccuucucccaggauggugaagggggaccugguacccagugauccccaccccaggauccuaaaucaugacuuaccugcuaauaaaaacucauuggaaaagugagaagaucuaaaaaaaaaaaaaaaaaaaaaaaaaaaaaaaaaaaaaaaaaaaaaaaaaaaaaaaaaaaaaaaaugcaucccccccccccccccccccccccccccccccaaaggcucuuuucagagccaccagaauu

SEQ ID NO: 7408 - RNA, 1901 nt, Artificial Sequence
  mRNA product Design f-3 comprising derived and/or modified sequence from HRSV(A2)__F-del_DSCav1_mut7 (opt4)
gggagagucccgcagucggcguccagcggcucugcuuguucgugugugugucguugcaggccuuauucaagcuuaccauggagcugcugauccugaaggccaacgccaucaccaccauccugaccgccgugaccuucugcuucgccagcggccagaacaucaccgaggaguucuaccagagcaccugcagcgccgugagcaagggcuaccugagcgcccugagaaccggcugguacaccagcgugaucaccaucgagcugagcaacaucaaggagaacaagugcaacggcaccgacgccaaggugaagcugaucaagcaggagcuggacaaguacaagaacgccgugaccgagcugcagaugcugaugugcagcacccccgccaccggcagcggcagcgccaucgccagcggcguggccgugugcaaggugcugcaccuggagggcgaggugaacaagaucaagagcgcccugcugagcaccaacaaggccguggugagccugagcaacggcgugagcgugcugaccuucaaggugcuggaccugaagaacuacaucgacaagcagcugcugcccauccugaacaagcagagcugcagcaucagcaacaucgagaccgugauggaguuccagcagaagaacaacagacugcuggagaucaccagagaguucagcgugaacgccggcgugaccacccccgugagcaccuacaugcugaccaacagcgagcugcugagccugaucaacgacaugcccaucaccaacgaccagaagaagcugaugagcaacaacgugcagaucgugagacagcagagcuacagcaucaugugcaucaucaaggaggaggugcuggccuacguggugcagcugccccuguacggcgugaucgacacccccugcuggaagcugcacaccagcccccugugcaccaccaacaccaaggagggcagcaacaucugccugaccagaaccgacagaggcugguacugcgacaacgccggcagcgugagcuucuucccccaggccgagaccugcaaggugugcagcaacagaguguucugcgacaccaugaacagccugacccugcccagcgaggugaaccugugcaacguggacaucuucaaccccaaguacgacugcaagaucaugaccagcaagaccgacgugagcagcagcgugaucaccagccugggcgccaucgugagcugcuacggcaagaccaagugcaccgccagcaacaagaacaagggcaucaucaagaccuucagcaacggcugcgacuacgugagcaacaagggcguggacaccgugagcgugggcaacacccuguacuacgugaacaagcaggagggcaagagccuguacgugaagggcgagcccaucaucaacuucuacgacccccugguguuccccagcgacgaguucgacgccagcaucagccaggugaacgagaagaucaaccagagccuggccuucaucagaaagagcgacgagcugcugcacaacgugaacgccggcaagagcaccaccaacaucaugaucaccaccaucaucaucgugaucaucgugauccugcugagccugaucgccgugggccugcugcuguacugcaaggccagaugaggacuaguacuggcugcaucucccuuuccucuguccuccauccuucucccaggauggugaagggggaccugguacccagugauccccaccccaggauccuaaaucaugacuuaccugcuaauaaaaacucauuggaaaagugagaagaucuaaaaaaaaaaaaaaaaaaaaaaaaaaaaaaaaaaaaaaaaaaaaaaaaaaaaaaaaaaaaaaaaugcaucccccccccccccccccccccccccccccccaaaggcucuuuucagagccaccagaauu

SEQ ID NO: 7409 - RNA, 1901 nt, Artificial Sequence
  mRNA product Design f-3 comprising derived and/or modified sequence from HRSV(A2)__F-del_DSCav1_mut7 (opt5)
gggagagucccgcagucggcguccagcggcucugcuuguucgugugugugucguugcaggccuuauucaagcuuaccauggagcugcucauccugaaggccaacgcuauuaccacaauccuuacggccgugaccuucugcuuugcgagcggccagaauauuacagaagaguucuaccaauccaccuguucugcugucagcaaaggguaucuguccgcccucagaacaggaugguacaccucuguuaucacaauugaacugagcaacaucaaggagaauaaaugcaacggcaccgacgccaaggugaaacuuaucaagcaggaacuggauaaguauaaaaaugcugugacggagcuccagaugcugauguguuccacccccgccacagggucuggaagcgcuauugccuccggcgucgcggugugcaagguucugcaccucgagggggaagugaacaaaaucaagagcgcccugcuuucuaccaauaaagcugucgugucccugagcaacggaguuucugugcucacauuuaagguccuggaccuuaagaauuacauugauaaacagcugcucccuauccugaacaagcaauccuguagcauuucuaauaucgagaccgugauggaguuccagcagaaaaacaaucggcugcucgaaauuacgcgcgaguuuuccgugaacgccggcgucacaaccccgguuagcacauauaugcugaccaauuccgaacuucugucucucaucaacgacaugcccaucaccaacgaucagaagaaacugaugagcaauaacgugcaaauugugagacagcaguccuacagcaucaugugcauuaucaaggaggaaguccuugcuuaugugguucagcugccucucuacggcgugauugacacacccuguuggaaacugcauacgucuccucugugcaccacaaauaccaaggagggguccaacaucugucucacacggaccgaucgcggaugguacugcgacaaugccggcagcgucucuuucuuuccccaagcggaaacguguaaggugugcagcaacagaguuuucugcgauacaaugaacucccugacccuuccuucugaggugaaucuguguaaugucgacaucuuuaacccgaaauaugauugcaagauuaugaccagcaaaacagacguguccagcucugucaucaccucccucggggccauugugagcuguuacggaaagacaaaaugcacggcuucuaauaagaacaagggcaucauuaaaaccuucuccaaugggugugauuauguuagcaacaagggaguggacacagucuccgugggcaauacccuguacuauguuaacaaacaggagggcaagucucuuuacgugaaaggggaacccaucaucaacuuuuaugacccucuggucuuccccagcgaugaguuugacgccuccauuucucaggugaaugaaaagaucaaccaaagccucgcuuucauucggaaguccgaugagcugcugcacaaugugaacgccggaaaaagcacaaccaauaucaugauuacgaccaucauuaucguuaucauugucauccuccugucucuuauugccgugggccugcuccuguacugcaaggcucgcugaggacuaguacuggcugcaucucccuuuccucuguccuccauccuucucccaggauggugaagggggaccugguacccagugauccccaccccaggauccuaaaucaugacuuaccugcuaauaaaaacucauuggaaaagugagaagaucuaaaaaaaaaaaaaaaaaaaaaaaaaaaaaaaaaaaaaaaaaaaaaaaaaaaaaaaaaaaaaaaaugcaucccccccccccccccccccccccccccccccaaaggcucuuuucagagccaccagaauu

SEQ ID NO: 7410 - RNA, 1901 nt, Artificial Sequence
  mRNA product Design f-3 comprising derived and/or modified sequence from HRSV(A2)__F-del_DSCav1_mut7 (opt6)
gggagagucccgcagucggcguccagcggcucugcuuguucgugugugugucguugcaggccuuauucaagcuuaccauggaauuacuaauccucaaagcaaacgcaauuacaaccauacuaaccgcugucaccuuuuguuuugccucaggacaaaacauaacugaagaauuuuaccaaucaacaugcuccgcaguaucuaaaggauaccucagcgcguuaagaacaggaugguacacaucgguaauaaccaucgaauuauccaacauaaaagaaaauaaaugcaauggaacagacgcaaaagucaaauuaauuaaacaagaacuagacaaauauaaaaacgcaguaaccgaauuacaaaugcuaauguguucaacaccagcaacaggaucaggaucagcuauagcuucaggaguugccguaugcaaagugcuacacuuagaaggagaagugaauaaaauaaaaucagcucuauuaucaacgaacaaagccguaguaucucuaucaaauggcguaucaguacucacauucaaaguacucgaccuaaaaaacuauauagauaaacaacuauuacccauccuaaauaaacaaagcugcucuauaucaaacaucgaaacaguaauggaauuucaacaaaaaaacaacagacuacuagaaauaacccgagaguucucaguuaaugcaggaguaacaacaccagucucaacauacaugcucacaaacucagaacuccuaucacuaauaaaugacaugccaauaacaaacgaccaaaaaaaacucaugucuaacaacguccaaauaguaagacaacaauccuacagcauaauguguauaauaaaagaagaaguuuuagcauacgucguacaacuacccuuauauggcguaauagauacaccaugcuggaaacuccauaccucaccucuauguacaacaaauaccaaagaagguucuaauauaugccuaacacgaacugaccgaggaugguacugugacaacgcaggaucagucucuuucuuuccacaagcagaaaccugcaaaguaugcaguaaccgcguauuuugcgacacaaugaacucccuaaccuuaccaucagaaguaaacuuauguaacguagacauauucaauccaaaauaugacugcaaaauaaugacaucaaaaacagacguaagcucaucaguaauaacuucacuaggcgcaauuguaucaugcuauggaaaaaccaaauguaccgcauccaacaaaaauaaaggaauaauaaaaaccuucucuaacggaugcgacuacguaucaaacaaagguguagauacaguuucuguaggaaacacacucuacuauguaaauaaacaagaaggaaaaucacuauacguaaaaggagaaccaauaauaaacuucuaugacccacuuguauuuccaucugaugaauuugaugcaagcauaucacaaguaaacgaaaaaauaaaccaaucucuagccuuuauacgaaaaagcgacgaauuacuacauaacgucaacgcuggaaaaucaacaacaaacauaaugauaacaacaauaauaauaguaauaauagucauccuauuaucacuaaucgccguaggacuacuccuauacugcaaagcuagauaaggacuaguacuggcugcaucucccuuuccucuguccuccauccuucucccaggauggugaagggggaccugguacccagugauccccaccccaggauccuaaaucaugacuuaccugcuaauaaaaacucauuggaaaagugagaagaucuaaaaaaaaaaaaaaaaaaaaaaaaaaaaaaaaaaaaaaaaaaaaaaaaaaaaaaaaaaaaaaaaugcaucccccccccccccccccccccccccccccccaaaggcucuuuucagagccaccagaauu

SEQ ID NO: 7411 - RNA, 1901 nt, Artificial Sequence
  mRNA product Design f-3 comprising derived and/or modified sequence from HRSV(A2)__F-del_DSCav1_mut7 (opt11)
gggagagucccgcagucggcguccagcggcucugcuuguucgugugugugucguugcaggccuuauucaagcuuaccauggaacuccucauccucaaagccaacgccauaaccacuauccucacagcagucacuuucugcuucgccucaggacaaaacauaaccgaagaguucuaccaauccacaugcuccgccgucuccaaaggcuaccucucagcgcuccgcaccggcugguacacauccgucaucaccaucgaacuaagcaacauaaaagaaaacaaaugcaacggcaccgacgccaaaguuaaacucaucaagcaagaacucgacaaauacaaaaacgcagucacagaacuucaaaugcucaugugcuccacacccgccacagguucuggcucagcaaucgcaagcggcgucgccguaugcaaaguccuucaccucgaaggcgaagucaacaaaaucaaauccgcccuccucuccaccaauaaagcugucgucucacucuccaacggcgucagcguccucacauucaaaguccucgaccucaaaaacuacauagacaagcaacuccucccgauacucaacaaacaaagcugcucuaucuccaacaucgaaaccgucauggaguuccaacagaaaaacaaucgucuccucgaaaucacccgcgaguucucaguaaacgccggggucaccacaccagucuccaccuacaugcucaccaacuccgaacuccuuagccucauaaacgacaugcccauaaccaacgaccaaaagaaacucaugagcaacaacguacaaauaguccgacaacaauccuauuccaucauguguaucaucaaagaagaaguccucgcauacguaguccaacucccccuauacggcguaaucgacaccccauguuggaaacuccacaccucaccacucuguaccaccaacaccaaagaaggcucaaacaucugccucacccgcacagaccgcggcugguacugcgacaacgcgggcuccgucagcuucuuuccccaagcggaaaccugcaaagucugcagcaacagagucuucugcgacacuaugaacucccucacccuccccucagaagucaaccucugcaacgucgacaucuucaacccgaaauacgacugcaaaaucaugaccagcaaaacugacgucuccucguccgucaucaccucacucggcgcaaucgugagcugcuacggcaaaaccaaaugcaccgccuccaacaaaaacaaaggcaucauaaaaacauucagcaacggcugcgacuacgucucgaacaaaggagucgacaccguaucagugggcaacacccuauacuacguaaacaagcaagaaggcaaaucacucuacguaaaaggcgaacccaucaucaacuucuacgacccccucgucuuccccuccgacgaguucgacgccuccaucucucaagucaacgagaaaaucaaccaaucccuugccuucauacguaaaagcgacgaacuccuucacaacguaaacgccgggaaauccaccacuaacauaaugaucaccaccaucaucaucguuaucauagucauccuccucucucucauagcagucggccuacuccuguacugcaaagcgcgcuaaggacuaguacuggcugcaucucccuuuccucuguccuccauccuucucccaggauggugaagggggaccugguacccagugauccccaccccaggauccuaaaucaugacuuaccugcuaauaaaaacucauuggaaaagugagaagaucuaaaaaaaaaaaaaaaaaaaaaaaaaaaaaaaaaaaaaaaaaaaaaaaaaaaaaaaaaaaaaaaaugcaucccccccccccccccccccccccccccccccaaaggcucuuuucagagccaccagaauu

SEQ ID NO: 7412 - RNA, 2117 nt, Artificial Sequence
  mRNA product Design f-4 comprising derived and/or modified sequence from HRSV(A2)__F-del_DSCav1_mut7 (opt1)
gggagagucccgcagucggcguccagcggcucugcuuguucgugugugugucguugcaggccuuauucaagcuuaccauggagcugcucauccugaaggccaacgccaucaccaccauccugacggcggugaccuucugcuucgccagcggccagaacaucaccgaggaguucuaccaguccacgugcagcgccgucuccaagggguaccucagcgcccugcggaccggcugguacaccuccgugaucaccaucgagcugagcaacaucaaggagaacaagugcaacgggaccgacgccaaggugaagcucaucaagcaggagcuggacaaguacaagaacgcggucacggagcugcagaugcugaugugcuccaccccggcaaccggcuccggcuccgccaucgcgagcggcgucgccgugugcaaggugcugcaccucgagggggaggucaacaagaucaagagcgcccugcuguccaccaacaaggccguggugagccucuccaacggcgucagcgugcugaccuucaaggugcuggaccucaagaacuacaucgacaagcagcugcugcccauccugaacaagcagagcugcuccaucagcaacaucgagacggugauggaguuccagcagaagaacaaccggcuccuggagaucacccgcgaguucagcgugaacgccggggucaccacccccguguccacguacaugcugaccaacagcgagcuccugucccugaucaacgacaugccgaucaccaacgaccagaagaagcucaugagcaacaacgugcagaucguccggcagcaguccuacagcaucaugugcaucaucaaggaggaggugcuggcguacgugguccagcugccccucuacggcgugaucgacacccccugcuggaagcugcacacgagcccccugugcaccaccaacaccaaggagggguccaacaucugccucacgcgcaccgaccggggcugguacugcgacaacgccggcagcgucuccuucuucccgcaggccgagaccugcaaggugugcagcaaccgcguguucugcgacaccaugaacucccugacgcugcccagcgagguaaaccucugcaacgucgacaucuucaaccccaaguacgacugcaagaucaugaccuccaagaccgacgugagcuccagcgugaucaccucccugggggccaucgucagcugcuacggcaagacgaagugcaccgccagcaacaagaacaaggggaucaucaagaccuucuccaacggcugcgacuacgugagcaacaagggcguggacaccguguccgucgggaacacccuguacuacgugaacaagcaggagggcaagagccucuacgugaagggggagcccaucaucaacuucuacgacccgcuggucuuccccuccgacgaguucgacgcgagcaucucccaggugaacgagaagaucaaccagagccuggccuucauccgcaaguccgacgagcugcuccacaacgugaacgccggcaagagcacgaccaacaucaugaucaccaccaucaucaucgucaucaucgugauccugcugucccucaucgccguggggcugcugcucuacugcaaggcccggugaggacuagugaagggaacacccaaauuuaauucagccuuaagcacaauuaauuaagagugaaacguaauuguacaagcaguuggucacccaccauagggcaugaucaacaccgcaaccuuuccuuuuucccccagugauucugaaaaaccccucuucccuucagcuugcuuagauguuccaaauuuaguaagcuuaaggcggccuacagaagaaaaagaaaaaaaaggccacaaaaguucccucucacuuucaguaaauaaaauaaaagcagcaacagaaauaaagaaauaaaugaaauucaaaaugaaauaaauauuguguugugcagcauuaaaaaaucaauaaaaauuaaaaaugagcaagaucuaaaaaaaaaaaaaaaaaaaaaaaaaaaaaaaaaaaaaaaaaaaaaaaaaaaaaaaaaaaaaaaaugcaucccccccccccccccccccccccccccccccaaaggcucuuuucagagccaccagaauu

SEQ ID NO: 7413 - RNA, 2117 nt, Artificial Sequence
  mRNA product Design f-4 comprising derived and/or modified sequence from HRSV(A2)__F-del_DSCav1_mut7 (opt1)
gggagagucccgcagucggcguccagcggcucugcuuguucgugugugugucguugcaggccuuauucaagcuuaccauggagcugcucauccugaaggccaacgccaucaccaccauccugacggcggugaccuucugcuucgccagcggccagaacaucaccgaggaguucuaccaguccacgugcagcgccgucuccaagggguaccucagcgcccugcgcaccggcugguacaccuccgugaucaccaucgagcugagcaacaucaaggagaacaagugcaacgggaccgacgccaaggugaagcucaucaagcaggagcuggacaaguacaagaacgcggucacggagcugcagaugcucaugugcuccacccccgccaccggcagcggguccgccaucgccagcggcguggcggugugcaagguccugcaccuggagggcgaggugaacaagaucaaguccgcccuccugagcaccaacaaggccguggucucccugagcaacgggguguccgugcucacguucaagguccuggaccugaagaacuacaucgacaagcagcuccugccgauccugaacaagcagagcugcuccaucagcaacaucgagaccgugauggaguuccagcagaagaacaaccggcuccuggagaucacccgcgaguucuccgugaacgccggcgucaccacgcccgugagcaccuacaugcugaccaacagcgagcuccugucccugaucaacgacaugcccaucaccaacgaccagaagaagcucaugagcaacaacgugcagaucguccggcagcaguccuacagcaucaugugcaucaucaaggaggaggugcuggccuacgugguccagcugccccucuacggggugaucgacacgccgugcuggaagcugcacaccagcccccugugcaccaccaacacgaaggagggcagcaacaucugccucacccgcaccgaccgggggugguacugcgacaacgcgggcuccgugagcuucuucccccaggccgagaccugcaaggucugcuccaaccgcguguucugcgacacgaugaacagccugacccugcccuccgaggucaaccucugcaacguggacaucuucaacccgaaguacgacugcaagaucaugaccagcaagaccgacguguccagcuccgucaucacgagccugggcgccaucguguccugcuacgggaagaccaagugcaccgccagcaacaagaacaagggcaucaucaagaccuucuccaacgggugcgacuacgugagcaacaagggcgucgacacggugagcgugggcaacacccuguacuacgucaacaagcaggaggggaagucccucuacgugaagggcgagcccaucaucaacuucuacgacccccugguguuccccagcgacgaguucgacgccuccaucagccaggucaacgagaagaucaaccagucccuggcguucauccggaaguccgacgagcuccugcacaacgugaacgccgggaaguccaccaccaacaucaugaucaccacgaucaucaucgugaucaucgucauccugcucagccugaucgccgugggccugcuccuguacugcaaggcccgcugaggacuagugaagggaacacccaaauuuaauucagccuuaagcacaauuaauuaagagugaaacguaauuguacaagcaguuggucacccaccauagggcaugaucaacaccgcaaccuuuccuuuuucccccagugauucugaaaaaccccucuucccuucagcuugcuuagauguuccaaauuuaguaagcuuaaggcggccuacagaagaaaaagaaaaaaaaggccacaaaaguucccucucacuuucaguaaauaaaauaaaagcagcaacagaaauaaagaaauaaaugaaauucaaaaugaaauaaauauuguguugugcagcauuaaaaaaucaauaaaaauuaaaaaugagcaagaucuaaaaaaaaaaaaaaaaaaaaaaaaaaaaaaaaaaaaaaaaaaaaaaaaaaaaaaaaaaaaaaaaugcaucccccccccccccccccccccccccccccccaaaggcucuuuucagagccaccagaauu

SEQ ID NO: 7414 - RNA, 2117 nt, Artificial Sequence
  mRNA product Design f-4 comprising derived and/or modified sequence from HRSV(A2)__F-del_DSCav1_mut7 (opt2)
gggagagucccgcagucggcguccagcggcucugcuuguucgugugugugucguugcaggccuuauucaagcuuaccauggagcuccucauccucaaggccaacgccaucaccaccauccucaccgccgucaccuucugcuucgccuccggccagaacaucaccgaggaguucuaccaguccaccugcuccgccgucuccaagggcuaccucuccgcccuccgcaccggcugguacaccuccgucaucaccaucgagcucuccaacaucaaggagaacaagugcaacggcaccgacgccaaggucaagcucaucaagcaggagcucgacaaguacaagaacgccgucaccgagcuccagaugcucaugugcuccacccccgccaccggcuccggcuccgccaucgccuccggcgucgccgucugcaagguccuccaccucgagggcgaggucaacaagaucaaguccgcccuccucuccaccaacaaggccgucgucucccucuccaacggcgucuccguccucaccuucaagguccucgaccucaagaacuacaucgacaagcagcuccuccccauccucaacaagcaguccugcuccaucuccaacaucgagaccgucauggaguuccagcagaagaacaaccgccuccucgagaucacccgcgaguucuccgucaacgccggcgucaccacccccgucuccaccuacaugcucaccaacuccgagcuccucucccucaucaacgacaugcccaucaccaacgaccagaagaagcucauguccaacaacguccagaucguccgccagcaguccuacuccaucaugugcaucaucaaggaggagguccucgccuacgucguccagcucccccucuacggcgucaucgacacccccugcuggaagcuccacaccuccccccucugcaccaccaacaccaaggagggcuccaacaucugccucacccgcaccgaccgcggcugguacugcgacaacgccggcuccgucuccuucuucccccaggccgagaccugcaaggucugcuccaaccgcgucuucugcgacaccaugaacucccucacccuccccuccgaggucaaccucugcaacgucgacaucuucaaccccaaguacgacugcaagaucaugaccuccaagaccgacgucuccuccuccgucaucaccucccucggcgccaucgucuccugcuacggcaagaccaagugcaccgccuccaacaagaacaagggcaucaucaagaccuucuccaacggcugcgacuacgucuccaacaagggcgucgacaccgucuccgucggcaacacccucuacuacgucaacaagcaggagggcaagucccucuacgucaagggcgagcccaucaucaacuucuacgacccccucgucuuccccuccgacgaguucgacgccuccaucucccaggucaacgagaagaucaaccagucccucgccuucauccgcaaguccgacgagcuccuccacaacgucaacgccggcaaguccaccaccaacaucaugaucaccaccaucaucaucgucaucaucgucauccuccucucccucaucgccgucggccuccuccucuacugcaaggcccgcugaggacuagugaagggaacacccaaauuuaauucagccuuaagcacaauuaauuaagagugaaacguaauuguacaagcaguuggucacccaccauagggcaugaucaacaccgcaaccuuuccuuuuucccccagugauucugaaaaaccccucuucccuucagcuugcuuagauguuccaaauuuaguaagcuuaaggcggccuacagaagaaaaagaaaaaaaaggccacaaaaguucccucucacuuucaguaaauaaaauaaaagcagcaacagaaauaaagaaauaaaugaaauucaaaaugaaauaaauauuguguugugcagcauuaaaaaaucaauaaaaauuaaaaaugagcaagaucuaaaaaaaaaaaaaaaaaaaaaaaaaaaaaaaaaaaaaaaaaaaaaaaaaaaaaaaaaaaaaaaaugcaucccccccccccccccccccccccccccccccaaaggcucuuuucagagccaccagaauu

SEQ ID NO: 7415 - RNA, 2117 nt, Artificial Sequence
  mRNA product Design f-4 comprising derived and/or modified sequence from HRSV(A2)__F-del_DSCav1_mut7 (opt3)
gggagagucccgcagucggcguccagcggcucugcuuguucgugugugugucguugcaggccuuauucaagcuuaccauggagcugcucauccuuaaggccaacgcuauuaccacaauacugacugcagugacguucugcuuugccagcggccagaauaucaccgaagaguucuaccaauccacauguucugcggucucaaaaggguauuugagugcuuuaagaacuggaugguacaccagcguuauuacaaucgaacuguccaacauuaaggagaauaaaugcaacgguaccgacgccaaggugaaacuaaucaagcaggaacucgauaaguauaaaaaugcaguaacugagcugcagaugcuuauguguucuacacccgccaccggcucggggucagcuauagcaagcggaguggccgucugcaaggugcugcacuuggagggcgaaguuaacaaaaucaagagugcucuccuguccacgaauaaagccguggucucucugagcaacgguguguccguacucacuuuuaagguuuuagaccugaagaauuacauugauaaacagcuuuugccuauccugaacaagcaaucauguaguauuagcaauaucgagaccgugauggaguuccagcagaaaaacaauaggcuacucgaaauaacacgggaguuuucugucaacgcgggggugacuaccccaguguccacauauaugcugaccaauucagaacuucugagcuugauuaacgacaugccgaucacgaacgaucagaagaaacucaugaguaauaacguccaaauuguucgccagcagucuuacuccaucaugugcaucauuaaggaggaagugcuggcauauguagugcaguuaccccuguacggagucauagacacuccuuguuggaaacuccauacaagcccacuuugcaccacuaauacaaaggagggcucgaacaucugucugacccgaacggaucguggcugguacugcgacaaugccgggucuguguccuucuuuccccaagcugaaaccuguaagguuugcucaaacagaguguucugcgauacaaugaauaguuugacucuaccuagcgaggucaaccuguguaauguggacauuuuuaacccaaaauaugauugcaagaucaugaccuccaaaacagacguaucuagcucaguuauaacuagccucggagccauuguguccuguuacgguaagaccaaaugcacagcaagcaauaagaacaagggcaucaucaaaaccuucucuaaugggugugauuaugucucaaacaagggaguggacacugucagugugggcaauacgcuguacuauguuaacaaacaggaggguaagagccuuuacgugaaaggggaacccauuaucaacuuuuaugacccucugguauucccauccgaugaguuugacgcuucuauuucgcaggucaaugaaaagauaaaccaaaguuuggccuucaucaggaaguccgaugagcuccugcacaaugugaacgcgggaaaaucaacaaccaauauuaugaucacuaccaucauuauaguuaucauugugaucuuacugagucuaauugccgucggccuccugcuuuacugcaaggcacggugaggacuagugaagggaacacccaaauuuaauucagccuuaagcacaauuaauuaagagugaaacguaauuguacaagcaguuggucacccaccauagggcaugaucaacaccgcaaccuuuccuuuuucccccagugauucugaaaaaccccucuucccuucagcuugcuuagauguuccaaauuuaguaagcuuaaggcggccuacagaagaaaaagaaaaaaaaggccacaaaaguucccucucacuuucaguaaauaaaauaaaagcagcaacagaaauaaagaaauaaaugaaauucaaaaugaaauaaauauuguguugugcagcauuaaaaaaucaauaaaaauuaaaaaugagcaagaucuaaaaaaaaaaaaaaaaaaaaaaaaaaaaaaaaaaaaaaaaaaaaaaaaaaaaaaaaaaaaaaaaugcaucccccccccccccccccccccccccccccccaaaggcucuuuucagagccaccagaauu

SEQ ID NO: 7416 - RNA, 2117 nt, Artificial Sequence
  mRNA product Design f-4 comprising derived and/or modified sequence from HRSV(A2)__F-del_DSCav1_mut7 (opt4)
gggagagucccgcagucggcguccagcggcucugcuuguucgugugugugucguugcaggccuuauucaagcuuaccauggagcugcugauccugaaggccaacgccaucaccaccauccugaccgccgugaccuucugcuucgccagcggccagaacaucaccgaggaguucuaccagagcaccugcagcgccgugagcaagggcuaccugagcgcccugagaaccggcugguacaccagcgugaucaccaucgagcugagcaacaucaaggagaacaagugcaacggcaccgacgccaaggugaagcugaucaagcaggagcuggacaaguacaagaacgccgugaccgagcugcagaugcugaugugcagcacccccgccaccggcagcggcagcgccaucgccagcggcguggccgugugcaaggugcugcaccuggagggcgaggugaacaagaucaagagcgcccugcugagcaccaacaaggccguggugagccugagcaacggcgugagcgugcugaccuucaaggugcuggaccugaagaacuacaucgacaagcagcugcugcccauccugaacaagcagagcugcagcaucagcaacaucgagaccgugauggaguuccagcagaagaacaacagacugcuggagaucaccagagaguucagcgugaacgccggcgugaccacccccgugagcaccuacaugcugaccaacagcgagcugcugagccugaucaacgacaugcccaucaccaacgaccagaagaagcugaugagcaacaacgugcagaucgugagacagcagagcuacagcaucaugugcaucaucaaggaggaggugcuggccuacguggugcagcugccccuguacggcgugaucgacacccccugcuggaagcugcacaccagcccccugugcaccaccaacaccaaggagggcagcaacaucugccugaccagaaccgacagaggcugguacugcgacaacgccggcagcgugagcuucuucccccaggccgagaccugcaaggugugcagcaacagaguguucugcgacaccaugaacagccugacccugcccagcgaggugaaccugugcaacguggacaucuucaaccccaaguacgacugcaagaucaugaccagcaagaccgacgugagcagcagcgugaucaccagccugggcgccaucgugagcugcuacggcaagaccaagugcaccgccagcaacaagaacaagggcaucaucaagaccuucagcaacggcugcgacuacgugagcaacaagggcguggacaccgugagcgugggcaacacccuguacuacgugaacaagcaggagggcaagagccuguacgugaagggcgagcccaucaucaacuucuacgacccccugguguuccccagcgacgaguucgacgccagcaucagccaggugaacgagaagaucaaccagagccuggccuucaucagaaagagcgacgagcugcugcacaacgugaacgccggcaagagcaccaccaacaucaugaucaccaccaucaucaucgugaucaucgugauccugcugagccugaucgccgugggccugcugcuguacugcaaggccagaugaggacuagugaagggaacacccaaauuuaauucagccuuaagcacaauuaauuaagagugaaacguaauuguacaagcaguuggucacccaccauagggcaugaucaacaccgcaaccuuuccuuuuucccccagugauucugaaaaaccccucuucccuucagcuugcuuagauguuccaaauuuaguaagcuuaaggcggccuacagaagaaaaagaaaaaaaaggccacaaaaguucccucucacuuucaguaaauaaaauaaaagcagcaacagaaauaaagaaauaaaugaaauucaaaaugaaauaaauauuguguugugcagcauuaaaaaaucaauaaaaauuaaaaaugagcaagaucuaaaaaaaaaaaaaaaaaaaaaaaaaaaaaaaaaaaaaaaaaaaaaaaaaaaaaaaaaaaaaaaaugcaucccccccccccccccccccccccccccccccaaaggcucuuuucagagccaccagaauu

SEQ ID NO: 7417 - RNA, 2117 nt, Artificial Sequence
  mRNA product Design f-4 comprising derived and/or modified sequence from HRSV(A2)__F-del_DSCav1_mut7 (opt5)
gggagagucccgcagucggcguccagcggcucugcuuguucgugugugugucguugcaggccuuauucaagcuuaccauggagcugcucauccugaaggccaacgcuauuaccacaauccuuacggccgugaccuucugcuuugcgagcggccagaauauuacagaagaguucuaccaauccaccuguucugcugucagcaaaggguaucuguccgcccucagaacaggaugguacaccucuguuaucacaauugaacugagcaacaucaaggagaauaaaugcaacggcaccgacgccaaggugaaacuuaucaagcaggaacuggauaaguauaaaaaugcugugacggagcuccagaugcugauguguuccacccccgccacagggucuggaagcgcuauugccuccggcgucgcggugugcaagguucugcaccucgagggggaagugaacaaaaucaagagcgcccugcuuucuaccaauaaagcugucgugucccugagcaacggaguuucugugcucacauuuaagguccuggaccuuaagaauuacauugauaaacagcugcucccuauccugaacaagcaauccuguagcauuucuaauaucgagaccgugauggaguuccagcagaaaaacaaucggcugcucgaaauuacgcgcgaguuuuccgugaacgccggcgucacaaccccgguuagcacauauaugcugaccaauuccgaacuucugucucucaucaacgacaugcccaucaccaacgaucagaagaaacugaugagcaauaacgugcaaauugugagacagcaguccuacagcaucaugugcauuaucaaggaggaaguccuugcuuaugugguucagcugccucucuacggcgugauugacacacccuguuggaaacugcauacgucuccucugugcaccacaaauaccaaggagggguccaacaucugucucacacggaccgaucgcggaugguacugcgacaaugccggcagcgucucuuucuuuccccaagcggaaacguguaaggugugcagcaacagaguuuucugcgauacaaugaacucccugacccuuccuucugaggugaaucuguguaaugucgacaucuuuaacccgaaauaugauugcaagauuaugaccagcaaaacagacguguccagcucugucaucaccucccucggggccauugugagcuguuacggaaagacaaaaugcacggcuucuaauaagaacaagggcaucauuaaaaccuucuccaaugggugugauuauguuagcaacaagggaguggacacagucuccgugggcaauacccuguacuauguuaacaaacaggagggcaagucucuuuacgugaaaggggaacccaucaucaacuuuuaugacccucuggucuuccccagcgaugaguuugacgccuccauuucucaggugaaugaaaagaucaaccaaagccucgcuuucauucggaaguccgaugagcugcugcacaaugugaacgccggaaaaagcacaaccaauaucaugauuacgaccaucauuaucguuaucauugucauccuccugucucuuauugccgugggccugcuccuguacugcaaggcucgcugaggacuagugaagggaacacccaaauuuaauucagccuuaagcacaauuaauuaagagugaaacguaauuguacaagcaguuggucacccaccauagggcaugaucaacaccgcaaccuuuccuuuuucccccagugauucugaaaaaccccucuucccuucagcuugcuuagauguuccaaauuuaguaagcuuaaggcggccuacagaagaaaaagaaaaaaaaggccacaaaaguucccucucacuuucaguaaauaaaauaaaagcagcaacagaaauaaagaaauaaaugaaauucaaaaugaaauaaauauuguguugugcagcauuaaaaaaucaauaaaaauuaaaaaugagcaagaucuaaaaaaaaaaaaaaaaaaaaaaaaaaaaaaaaaaaaaaaaaaaaaaaaaaaaaaaaaaaaaaaaugcaucccccccccccccccccccccccccccccccaaaggcucuuuucagagccaccagaauu

SEQ ID NO: 7418 - RNA, 2117 nt, Artificial Sequence
  mRNA product Design f-4 comprising derived and/or modified sequence from HRSV(A2)__F-del_DSCav1_mut7 (opt6)
gggagagucccgcagucggcguccagcggcucugcuuguucgugugugugucguugcaggccuuauucaagcuuaccauggaauuacuaauccucaaagcaaacgcaauuacaaccauacuaaccgcugucaccuuuuguuuugccucaggacaaaacauaacugaagaauuuuaccaaucaacaugcuccgcaguaucuaaaggauaccucagcgcguuaagaacaggaugguacacaucgguaauaaccaucgaauuauccaacauaaaagaaaauaaaugcaauggaacagacgcaaaagucaaauuaauuaaacaagaacuagacaaauauaaaaacgcaguaaccgaauuacaaaugcuaauguguucaacaccagcaacaggaucaggaucagcuauagcuucaggaguugccguaugcaaagugcuacacuuagaaggagaagugaauaaaauaaaaucagcucuauuaucaacgaacaaagccguaguaucucuaucaaauggcguaucaguacucacauucaaaguacucgaccuaaaaaacuauauagauaaacaacuauuacccauccuaaauaaacaaagcugcucuauaucaaacaucgaaacaguaauggaauuucaacaaaaaaacaacagacuacuagaaauaacccgagaguucucaguuaaugcaggaguaacaacaccagucucaacauacaugcucacaaacucagaacuccuaucacuaauaaaugacaugccaauaacaaacgaccaaaaaaaacucaugucuaacaacguccaaauaguaagacaacaauccuacagcauaauguguauaauaaaagaagaaguuuuagcauacgucguacaacuacccuuauauggcguaauagauacaccaugcuggaaacuccauaccucaccucuauguacaacaaauaccaaagaagguucuaauauaugccuaacacgaacugaccgaggaugguacugugacaacgcaggaucagucucuuucuuuccacaagcagaaaccugcaaaguaugcaguaaccgcguauuuugcgacacaaugaacucccuaaccuuaccaucagaaguaaacuuauguaacguagacauauucaauccaaaauaugacugcaaaauaaugacaucaaaaacagacguaagcucaucaguaauaacuucacuaggcgcaauuguaucaugcuauggaaaaaccaaauguaccgcauccaacaaaaauaaaggaauaauaaaaaccuucucuaacggaugcgacuacguaucaaacaaagguguagauacaguuucuguaggaaacacacucuacuauguaaauaaacaagaaggaaaaucacuauacguaaaaggagaaccaauaauaaacuucuaugacccacuuguauuuccaucugaugaauuugaugcaagcauaucacaaguaaacgaaaaaauaaaccaaucucuagccuuuauacgaaaaagcgacgaauuacuacauaacgucaacgcuggaaaaucaacaacaaacauaaugauaacaacaauaauaauaguaauaauagucauccuauuaucacuaaucgccguaggacuacuccuauacugcaaagcuagauaaggacuagugaagggaacacccaaauuuaauucagccuuaagcacaauuaauuaagagugaaacguaauuguacaagcaguuggucacccaccauagggcaugaucaacaccgcaaccuuuccuuuuucccccagugauucugaaaaaccccucuucccuucagcuugcuuagauguuccaaauuuaguaagcuuaaggcggccuacagaagaaaaagaaaaaaaaggccacaaaaguucccucucacuuucaguaaauaaaauaaaagcagcaacagaaauaaagaaauaaaugaaauucaaaaugaaauaaauauuguguugugcagcauuaaaaaaucaauaaaaauuaaaaaugagcaagaucuaaaaaaaaaaaaaaaaaaaaaaaaaaaaaaaaaaaaaaaaaaaaaaaaaaaaaaaaaaaaaaaaugcaucccccccccccccccccccccccccccccccaaaggcucuuuucagagccaccagaauu

SEQ ID NO: 7419 - RNA, 2117 nt, Artificial Sequence
  mRNA product Design f-4 comprising derived and/or modified sequence from HRSV(A2)__F-del_DSCav1_mut7 (opt11)
gggagagucccgcagucggcguccagcggcucugcuuguucgugugugugucguugcaggccuuauucaagcuuaccauggaacuccucauccucaaagccaacgccauaaccacuauccucacagcagucacuuucugcuucgccucaggacaaaacauaaccgaagaguucuaccaauccacaugcuccgccgucuccaaaggcuaccucucagcgcuccgcaccggcugguacacauccgucaucaccaucgaacuaagcaacauaaaagaaaacaaaugcaacggcaccgacgccaaaguuaaacucaucaagcaagaacucgacaaauacaaaaacgcagucacagaacuucaaaugcucaugugcuccacacccgccacagguucuggcucagcaaucgcaagcggcgucgccguaugcaaaguccuucaccucgaaggcgaagucaacaaaaucaaauccgcccuccucuccaccaauaaagcugucgucucacucuccaacggcgucagcguccucacauucaaaguccucgaccucaaaaacuacauagacaagcaacuccucccgauacucaacaaacaaagcugcucuaucuccaacaucgaaaccgucauggaguuccaacagaaaaacaaucgucuccucgaaaucacccgcgaguucucaguaaacgccggggucaccacaccagucuccaccuacaugcucaccaacuccgaacuccuuagccucauaaacgacaugcccauaaccaacgaccaaaagaaacucaugagcaacaacguacaaauaguccgacaacaauccuauuccaucauguguaucaucaaagaagaaguccucgcauacguaguccaacucccccuauacggcguaaucgacaccccauguuggaaacuccacaccucaccacucuguaccaccaacaccaaagaaggcucaaacaucugccucacccgcacagaccgcggcugguacugcgacaacgcgggcuccgucagcuucuuuccccaagcggaaaccugcaaagucugcagcaacagagucuucugcgacacuaugaacucccucacccuccccucagaagucaaccucugcaacgucgacaucuucaacccgaaauacgacugcaaaaucaugaccagcaaaacugacgucuccucguccgucaucaccucacucggcgcaaucgugagcugcuacggcaaaaccaaaugcaccgccuccaacaaaaacaaaggcaucauaaaaacauucagcaacggcugcgacuacgucucgaacaaaggagucgacaccguaucagugggcaacacccuauacuacguaaacaagcaagaaggcaaaucacucuacguaaaaggcgaacccaucaucaacuucuacgacccccucgucuuccccuccgacgaguucgacgccuccaucucucaagucaacgagaaaaucaaccaaucccuugccuucauacguaaaagcgacgaacuccuucacaacguaaacgccgggaaauccaccacuaacauaaugaucaccaccaucaucaucguuaucauagucauccuccucucucucauagcagucggccuacuccuguacugcaaagcgcgcuaaggacuagugaagggaacacccaaauuuaauucagccuuaagcacaauuaauuaagagugaaacguaauuguacaagcaguuggucacccaccauagggcaugaucaacaccgcaaccuuuccuuuuucccccagugauucugaaaaaccccucuucccuucagcuugcuuagauguuccaaauuuaguaagcuuaaggcggccuacagaagaaaaagaaaaaaaaggccacaaaaguucccucucacuuucaguaaauaaaauaaaagcagcaacagaaauaaagaaauaaaugaaauucaaaaugaaauaaauauuguguugugcagcauuaaaaaaucaauaaaaauuaaaaaugagcaagaucuaaaaaaaaaaaaaaaaaaaaaaaaaaaaaaaaaaaaaaaaaaaaaaaaaaaaaaaaaaaaaaaaugcaucccccccccccccccccccccccccccccccaaaggcucuuuucagagccaccagaauu

SEQ ID NO: 7420 - RNA, 1893 nt, Artificial Sequence
  mRNA product Design f-5 comprising derived and/or modified sequence from HRSV(A2)__F-del_DSCav1_mut7 (opt1)
gggagacuuucccauucuguagcagaauuugguguugccuguggucuuggucccgcggagaagcuuaccauggagcugcucauccugaaggccaacgccaucaccaccauccugacggcggugaccuucugcuucgccagcggccagaacaucaccgaggaguucuaccaguccacgugcagcgccgucuccaagggguaccucagcgcccugcggaccggcugguacaccuccgugaucaccaucgagcugagcaacaucaaggagaacaagugcaacgggaccgacgccaaggugaagcucaucaagcaggagcuggacaaguacaagaacgcggucacggagcugcagaugcugaugugcuccaccccggcaaccggcuccggcuccgccaucgcgagcggcgucgccgugugcaaggugcugcaccucgagggggaggucaacaagaucaagagcgcccugcuguccaccaacaaggccguggugagccucuccaacggcgucagcgugcugaccuucaaggugcuggaccucaagaacuacaucgacaagcagcugcugcccauccugaacaagcagagcugcuccaucagcaacaucgagacggugauggaguuccagcagaagaacaaccggcuccuggagaucacccgcgaguucagcgugaacgccggggucaccacccccguguccacguacaugcugaccaacagcgagcuccugucccugaucaacgacaugccgaucaccaacgaccagaagaagcucaugagcaacaacgugcagaucguccggcagcaguccuacagcaucaugugcaucaucaaggaggaggugcuggcguacgugguccagcugccccucuacggcgugaucgacacccccugcuggaagcugcacacgagcccccugugcaccaccaacaccaaggagggguccaacaucugccucacgcgcaccgaccggggcugguacugcgacaacgccggcagcgucuccuucuucccgcaggccgagaccugcaaggugugcagcaaccgcguguucugcgacaccaugaacucccugacgcugcccagcgagguaaaccucugcaacgucgacaucuucaaccccaaguacgacugcaagaucaugaccuccaagaccgacgugagcuccagcgugaucaccucccugggggccaucgucagcugcuacggcaagacgaagugcaccgccagcaacaagaacaaggggaucaucaagaccuucuccaacggcugcgacuacgugagcaacaagggcguggacaccguguccgucgggaacacccuguacuacgugaacaagcaggagggcaagagccucuacgugaagggggagcccaucaucaacuucuacgacccgcuggucuuccccuccgacgaguucgacgcgagcaucucccaggugaacgagaagaucaaccagagccuggccuucauccgcaaguccgacgagcugcuccacaacgugaacgccggcaagagcacgaccaacaucaugaucaccaccaucaucaucgucaucaucgugauccugcugucccucaucgccguggggcugcugcucuacugcaaggcccggugaggacuaguacuggcugcaucucccuuuccucuguccuccauccuucucccaggauggugaagggggaccugguacccagugauccccaccccaggauccuaaaucaugacuuaccugcuaauaaaaacucauuggaaaagugagaagaucuaaaaaaaaaaaaaaaaaaaaaaaaaaaaaaaaaaaaaaaaaaaaaaaaaaaaaaaaaaaaaaaaugcaucccccccccccccccccccccccccccccccaaaggcucuuuucagagccaccagaauu

SEQ ID NO: 7421 - RNA, 1893 nt, Artificial Sequence
  mRNA product Design f-5 comprising derived and/or modified sequence from HRSV(A2)__F-del_DSCav1_mut7 (opt1)
gggagacuuucccauucuguagcagaauuugguguugccuguggucuuggucccgcggagaagcuuaccauggagcugcucauccugaaggccaacgccaucaccaccauccugacggcggugaccuucugcuucgccagcggccagaacaucaccgaggaguucuaccaguccacgugcagcgccgucuccaagggguaccucagcgcccugcgcaccggcugguacaccuccgugaucaccaucgagcugagcaacaucaaggagaacaagugcaacgggaccgacgccaaggugaagcucaucaagcaggagcuggacaaguacaagaacgcggucacggagcugcagaugcucaugugcuccacccccgccaccggcagcggguccgccaucgccagcggcguggcggugugcaagguccugcaccuggagggcgaggugaacaagaucaaguccgcccuccugagcaccaacaaggccguggucucccugagcaacgggguguccgugcucacguucaagguccuggaccugaagaacuacaucgacaagcagcuccugccgauccugaacaagcagagcugcuccaucagcaacaucgagaccgugauggaguuccagcagaagaacaaccggcuccuggagaucacccgcgaguucuccgugaacgccggcgucaccacgcccgugagcaccuacaugcugaccaacagcgagcuccugucccugaucaacgacaugcccaucaccaacgaccagaagaagcucaugagcaacaacgugcagaucguccggcagcaguccuacagcaucaugugcaucaucaaggaggaggugcuggccuacgugguccagcugccccucuacggggugaucgacacgccgugcuggaagcugcacaccagcccccugugcaccaccaacacgaaggagggcagcaacaucugccucacccgcaccgaccgggggugguacugcgacaacgcgggcuccgugagcuucuucccccaggccgagaccugcaaggucugcuccaaccgcguguucugcgacacgaugaacagccugacccugcccuccgaggucaaccucugcaacguggacaucuucaacccgaaguacgacugcaagaucaugaccagcaagaccgacguguccagcuccgucaucacgagccugggcgccaucguguccugcuacgggaagaccaagugcaccgccagcaacaagaacaagggcaucaucaagaccuucuccaacgggugcgacuacgugagcaacaagggcgucgacacggugagcgugggcaacacccuguacuacgucaacaagcaggaggggaagucccucuacgugaagggcgagcccaucaucaacuucuacgacccccugguguuccccagcgacgaguucgacgccuccaucagccaggucaacgagaagaucaaccagucccuggcguucauccggaaguccgacgagcuccugcacaacgugaacgccgggaaguccaccaccaacaucaugaucaccacgaucaucaucgugaucaucgucauccugcucagccugaucgccgugggccugcuccuguacugcaaggcccgcugaggacuaguacuggcugcaucucccuuuccucuguccuccauccuucucccaggauggugaagggggaccugguacccagugauccccaccccaggauccuaaaucaugacuuaccugcuaauaaaaacucauuggaaaagugagaagaucuaaaaaaaaaaaaaaaaaaaaaaaaaaaaaaaaaaaaaaaaaaaaaaaaaaaaaaaaaaaaaaaaugcaucccccccccccccccccccccccccccccccaaaggcucuuuucagagccaccagaauu

SEQ ID NO: 7422 - RNA, 1893 nt, Artificial Sequence
  mRNA product Design f-5 comprising derived and/or modified sequence from HRSV(A2)__F-del_DSCav1_mut7 (opt2)
gggagacuuucccauucuguagcagaauuugguguugccuguggucuuggucccgcggagaagcuuaccauggagcuccucauccucaaggccaacgccaucaccaccauccucaccgccgucaccuucugcuucgccuccggccagaacaucaccgaggaguucuaccaguccaccugcuccgccgucuccaagggcuaccucuccgcccuccgcaccggcugguacaccuccgucaucaccaucgagcucuccaacaucaaggagaacaagugcaacggcaccgacgccaaggucaagcucaucaagcaggagcucgacaaguacaagaacgccgucaccgagcuccagaugcucaugugcuccacccccgccaccggcuccggcuccgccaucgccuccggcgucgccgucugcaagguccuccaccucgagggcgaggucaacaagaucaaguccgcccuccucuccaccaacaaggccgucgucucccucuccaacggcgucuccguccucaccuucaagguccucgaccucaagaacuacaucgacaagcagcuccuccccauccucaacaagcaguccugcuccaucuccaacaucgagaccgucauggaguuccagcagaagaacaaccgccuccucgagaucacccgcgaguucuccgucaacgccggcgucaccacccccgucuccaccuacaugcucaccaacuccgagcuccucucccucaucaacgacaugcccaucaccaacgaccagaagaagcucauguccaacaacguccagaucguccgccagcaguccuacuccaucaugugcaucaucaaggaggagguccucgccuacgucguccagcucccccucuacggcgucaucgacacccccugcuggaagcuccacaccuccccccucugcaccaccaacaccaaggagggcuccaacaucugccucacccgcaccgaccgcggcugguacugcgacaacgccggcuccgucuccuucuucccccaggccgagaccugcaaggucugcuccaaccgcgucuucugcgacaccaugaacucccucacccuccccuccgaggucaaccucugcaacgucgacaucuucaaccccaaguacgacugcaagaucaugaccuccaagaccgacgucuccuccuccgucaucaccucccucggcgccaucgucuccugcuacggcaagaccaagugcaccgccuccaacaagaacaagggcaucaucaagaccuucuccaacggcugcgacuacgucuccaacaagggcgucgacaccgucuccgucggcaacacccucuacuacgucaacaagcaggagggcaagucccucuacgucaagggcgagcccaucaucaacuucuacgacccccucgucuuccccuccgacgaguucgacgccuccaucucccaggucaacgagaagaucaaccagucccucgccuucauccgcaaguccgacgagcuccuccacaacgucaacgccggcaaguccaccaccaacaucaugaucaccaccaucaucaucgucaucaucgucauccuccucucccucaucgccgucggccuccuccucuacugcaaggcccgcugaggacuaguacuggcugcaucucccuuuccucuguccuccauccuucucccaggauggugaagggggaccugguacccagugauccccaccccaggauccuaaaucaugacuuaccugcuaauaaaaacucauuggaaaagugagaagaucuaaaaaaaaaaaaaaaaaaaaaaaaaaaaaaaaaaaaaaaaaaaaaaaaaaaaaaaaaaaaaaaaugcaucccccccccccccccccccccccccccccccaaaggcucuuuucagagccaccagaauu

SEQ ID NO: 7423 - RNA, 1893 nt, Artificial Sequence
  mRNA product Design f-5 comprising derived and/or modified sequence from HRSV(A2)__F-del_DSCav1_mut7 (opt3)
gggagacuuucccauucuguagcagaauuugguguugccuguggucuuggucccgcggagaagcuuaccauggagcugcucauccuuaaggccaacgcuauuaccacaauacugacugcagugacguucugcuuugccagcggccagaauaucaccgaagaguucuaccaauccacauguucugcggucucaaaaggguauuugagugcuuuaagaacuggaugguacaccagcguuauuacaaucgaacuguccaacauuaaggagaauaaaugcaacgguaccgacgccaaggugaaacuaaucaagcaggaacucgauaaguauaaaaaugcaguaacugagcugcagaugcuuauguguucuacacccgccaccggcucggggucagcuauagcaagcggaguggccgucugcaaggugcugcacuuggagggcgaaguuaacaaaaucaagagugcucuccuguccacgaauaaagccguggucucucugagcaacgguguguccguacucacuuuuaagguuuuagaccugaagaauuacauugauaaacagcuuuugccuauccugaacaagcaaucauguaguauuagcaauaucgagaccgugauggaguuccagcagaaaaacaauaggcuacucgaaauaacacgggaguuuucugucaacgcgggggugacuaccccaguguccacauauaugcugaccaauucagaacuucugagcuugauuaacgacaugccgaucacgaacgaucagaagaaacucaugaguaauaacguccaaauuguucgccagcagucuuacuccaucaugugcaucauuaaggaggaagugcuggcauauguagugcaguuaccccuguacggagucauagacacuccuuguuggaaacuccauacaagcccacuuugcaccacuaauacaaaggagggcucgaacaucugucugacccgaacggaucguggcugguacugcgacaaugccgggucuguguccuucuuuccccaagcugaaaccuguaagguuugcucaaacagaguguucugcgauacaaugaauaguuugacucuaccuagcgaggucaaccuguguaauguggacauuuuuaacccaaaauaugauugcaagaucaugaccuccaaaacagacguaucuagcucaguuauaacuagccucggagccauuguguccuguuacgguaagaccaaaugcacagcaagcaauaagaacaagggcaucaucaaaaccuucucuaaugggugugauuaugucucaaacaagggaguggacacugucagugugggcaauacgcuguacuauguuaacaaacaggaggguaagagccuuuacgugaaaggggaacccauuaucaacuuuuaugacccucugguauucccauccgaugaguuugacgcuucuauuucgcaggucaaugaaaagauaaaccaaaguuuggccuucaucaggaaguccgaugagcuccugcacaaugugaacgcgggaaaaucaacaaccaauauuaugaucacuaccaucauuauaguuaucauugugaucuuacugagucuaauugccgucggccuccugcuuuacugcaaggcacggugaggacuaguacuggcugcaucucccuuuccucuguccuccauccuucucccaggauggugaagggggaccugguacccagugauccccaccccaggauccuaaaucaugacuuaccugcuaauaaaaacucauuggaaaagugagaagaucuaaaaaaaaaaaaaaaaaaaaaaaaaaaaaaaaaaaaaaaaaaaaaaaaaaaaaaaaaaaaaaaaugcaucccccccccccccccccccccccccccccccaaaggcucuuuucagagccaccagaauu

SEQ ID NO: 7424 - RNA, 1893 nt, Artificial Sequence
  mRNA product Design f-5 comprising derived and/or modified sequence from HRSV(A2)__F-del_DSCav1_mut7 (opt4)
gggagacuuucccauucuguagcagaauuugguguugccuguggucuuggucccgcggagaagcuuaccauggagcugcugauccugaaggccaacgccaucaccaccauccugaccgccgugaccuucugcuucgccagcggccagaacaucaccgaggaguucuaccagagcaccugcagcgccgugagcaagggcuaccugagcgcccugagaaccggcugguacaccagcgugaucaccaucgagcugagcaacaucaaggagaacaagugcaacggcaccgacgccaaggugaagcugaucaagcaggagcuggacaaguacaagaacgccgugaccgagcugcagaugcugaugugcagcacccccgccaccggcagcggcagcgccaucgccagcggcguggccgugugcaaggugcugcaccuggagggcgaggugaacaagaucaagagcgcccugcugagcaccaacaaggccguggugagccugagcaacggcgugagcgugcugaccuucaaggugcuggaccugaagaacuacaucgacaagcagcugcugcccauccugaacaagcagagcugcagcaucagcaacaucgagaccgugauggaguuccagcagaagaacaacagacugcuggagaucaccagagaguucagcgugaacgccggcgugaccacccccgugagcaccuacaugcugaccaacagcgagcugcugagccugaucaacgacaugcccaucaccaacgaccagaagaagcugaugagcaacaacgugcagaucgugagacagcagagcuacagcaucaugugcaucaucaaggaggaggugcuggccuacguggugcagcugccccuguacggcgugaucgacacccccugcuggaagcugcacaccagcccccugugcaccaccaacaccaaggagggcagcaacaucugccugaccagaaccgacagaggcugguacugcgacaacgccggcagcgugagcuucuucccccaggccgagaccugcaaggugugcagcaacagaguguucugcgacaccaugaacagccugacccugcccagcgaggugaaccugugcaacguggacaucuucaaccccaaguacgacugcaagaucaugaccagcaagaccgacgugagcagcagcgugaucaccagccugggcgccaucgugagcugcuacggcaagaccaagugcaccgccagcaacaagaacaagggcaucaucaagaccuucagcaacggcugcgacuacgugagcaacaagggcguggacaccgugagcgugggcaacacccuguacuacgugaacaagcaggagggcaagagccuguacgugaagggcgagcccaucaucaacuucuacgacccccugguguuccccagcgacgaguucgacgccagcaucagccaggugaacgagaagaucaaccagagccuggccuucaucagaaagagcgacgagcugcugcacaacgugaacgccggcaagagcaccaccaacaucaugaucaccaccaucaucaucgugaucaucgugauccugcugagccugaucgccgugggccugcugcuguacugcaaggccagaugaggacuaguacuggcugcaucucccuuuccucuguccuccauccuucucccaggauggugaagggggaccugguacccagugauccccaccccaggauccuaaaucaugacuuaccugcuaauaaaaacucauuggaaaagugagaagaucuaaaaaaaaaaaaaaaaaaaaaaaaaaaaaaaaaaaaaaaaaaaaaaaaaaaaaaaaaaaaaaaaugcaucccccccccccccccccccccccccccccccaaaggcucuuuucagagccaccagaauu

SEQ ID NO: 7425 - RNA, 1893 nt, Artificial Sequence
  mRNA product Design f-5 comprising derived and/or modified sequence from HRSV(A2)__F-del_DSCav1_mut7 (opt5)
gggagacuuucccauucuguagcagaauuugguguugccuguggucuuggucccgcggagaagcuuaccauggagcugcucauccugaaggccaacgcuauuaccacaauccuuacggccgugaccuucugcuuugcgagcggccagaauauuacagaagaguucuaccaauccaccuguucugcugucagcaaaggguaucuguccgcccucagaacaggaugguacaccucuguuaucacaauugaacugagcaacaucaaggagaauaaaugcaacggcaccgacgccaaggugaaacuuaucaagcaggaacuggauaaguauaaaaaugcugugacggagcuccagaugcugauguguuccacccccgccacagggucuggaagcgcuauugccuccggcgucgcggugugcaagguucugcaccucgagggggaagugaacaaaaucaagagcgcccugcuuucuaccaauaaagcugucgugucccugagcaacggaguuucugugcucacauuuaagguccuggaccuuaagaauuacauugauaaacagcugcucccuauccugaacaagcaauccuguagcauuucuaauaucgagaccgugauggaguuccagcagaaaaacaaucggcugcucgaaauuacgcgcgaguuuuccgugaacgccggcgucacaaccccgguuagcacauauaugcugaccaauuccgaacuucugucucucaucaacgacaugcccaucaccaacgaucagaagaaacugaugagcaauaacgugcaaauugugagacagcaguccuacagcaucaugugcauuaucaaggaggaaguccuugcuuaugugguucagcugccucucuacggcgugauugacacacccuguuggaaacugcauacgucuccucugugcaccacaaauaccaaggagggguccaacaucugucucacacggaccgaucgcggaugguacugcgacaaugccggcagcgucucuuucuuuccccaagcggaaacguguaaggugugcagcaacagaguuuucugcgauacaaugaacucccugacccuuccuucugaggugaaucuguguaaugucgacaucuuuaacccgaaauaugauugcaagauuaugaccagcaaaacagacguguccagcucugucaucaccucccucggggccauugugagcuguuacggaaagacaaaaugcacggcuucuaauaagaacaagggcaucauuaaaaccuucuccaaugggugugauuauguuagcaacaagggaguggacacagucuccgugggcaauacccuguacuauguuaacaaacaggagggcaagucucuuuacgugaaaggggaacccaucaucaacuuuuaugacccucuggucuuccccagcgaugaguuugacgccuccauuucucaggugaaugaaaagaucaaccaaagccucgcuuucauucggaaguccgaugagcugcugcacaaugugaacgccggaaaaagcacaaccaauaucaugauuacgaccaucauuaucguuaucauugucauccuccugucucuuauugccgugggccugcuccuguacugcaaggcucgcugaggacuaguacuggcugcaucucccuuuccucuguccuccauccuucucccaggauggugaagggggaccugguacccagugauccccaccccaggauccuaaaucaugacuuaccugcuaauaaaaacucauuggaaaagugagaagaucuaaaaaaaaaaaaaaaaaaaaaaaaaaaaaaaaaaaaaaaaaaaaaaaaaaaaaaaaaaaaaaaaugcaucccccccccccccccccccccccccccccccaaaggcucuuuucagagccaccagaauu

SEQ ID NO: 7426 - RNA, 1893 nt, Artificial Sequence
  mRNA product Design f-5 comprising derived and/or modified sequence from HRSV(A2)__F-del_DSCav1_mut7 (opt6)
gggagacuuucccauucuguagcagaauuugguguugccuguggucuuggucccgcggagaagcuuaccauggaauuacuaauccucaaagcaaacgcaauuacaaccauacuaaccgcugucaccuuuuguuuugccucaggacaaaacauaacugaagaauuuuaccaaucaacaugcuccgcaguaucuaaaggauaccucagcgcguuaagaacaggaugguacacaucgguaauaaccaucgaauuauccaacauaaaagaaaauaaaugcaauggaacagacgcaaaagucaaauuaauuaaacaagaacuagacaaauauaaaaacgcaguaaccgaauuacaaaugcuaauguguucaacaccagcaacaggaucaggaucagcuauagcuucaggaguugccguaugcaaagugcuacacuuagaaggagaagugaauaaaauaaaaucagcucuauuaucaacgaacaaagccguaguaucucuaucaaauggcguaucaguacucacauucaaaguacucgaccuaaaaaacuauauagauaaacaacuauuacccauccuaaauaaacaaagcugcucuauaucaaacaucgaaacaguaauggaauuucaacaaaaaaacaacagacuacuagaaauaacccgagaguucucaguuaaugcaggaguaacaacaccagucucaacauacaugcucacaaacucagaacuccuaucacuaauaaaugacaugccaauaacaaacgaccaaaaaaaacucaugucuaacaacguccaaauaguaagacaacaauccuacagcauaauguguauaauaaaagaagaaguuuuagcauacgucguacaacuacccuuauauggcguaauagauacaccaugcuggaaacuccauaccucaccucuauguacaacaaauaccaaagaagguucuaauauaugccuaacacgaacugaccgaggaugguacugugacaacgcaggaucagucucuuucuuuccacaagcagaaaccugcaaaguaugcaguaaccgcguauuuugcgacacaaugaacucccuaaccuuaccaucagaaguaaacuuauguaacguagacauauucaauccaaaauaugacugcaaaauaaugacaucaaaaacagacguaagcucaucaguaauaacuucacuaggcgcaauuguaucaugcuauggaaaaaccaaauguaccgcauccaacaaaaauaaaggaauaauaaaaaccuucucuaacggaugcgacuacguaucaaacaaagguguagauacaguuucuguaggaaacacacucuacuauguaaauaaacaagaaggaaaaucacuauacguaaaaggagaaccaauaauaaacuucuaugacccacuuguauuuccaucugaugaauuugaugcaagcauaucacaaguaaacgaaaaaauaaaccaaucucuagccuuuauacgaaaaagcgacgaauuacuacauaacgucaacgcuggaaaaucaacaacaaacauaaugauaacaacaauaauaauaguaauaauagucauccuauuaucacuaaucgccguaggacuacuccuauacugcaaagcuagauaaggacuaguacuggcugcaucucccuuuccucuguccuccauccuucucccaggauggugaagggggaccugguacccagugauccccaccccaggauccuaaaucaugacuuaccugcuaauaaaaacucauuggaaaagugagaagaucuaaaaaaaaaaaaaaaaaaaaaaaaaaaaaaaaaaaaaaaaaaaaaaaaaaaaaaaaaaaaaaaaugcaucccccccccccccccccccccccccccccccaaaggcucuuuucagagccaccagaauu

SEQ ID NO: 7427 - RNA, 1893 nt, Artificial Sequence
  mRNA product Design f-5 comprising derived and/or modified sequence from HRSV(A2)__F-del_DSCav1_mut7 (opt11)
gggagacuuucccauucuguagcagaauuugguguugccuguggucuuggucccgcggagaagcuuaccauggaacuccucauccucaaagccaacgccauaaccacuauccucacagcagucacuuucugcuucgccucaggacaaaacauaaccgaagaguucuaccaauccacaugcuccgccgucuccaaaggcuaccucucagcgcuccgcaccggcugguacacauccgucaucaccaucgaacuaagcaacauaaaagaaaacaaaugcaacggcaccgacgccaaaguuaaacucaucaagcaagaacucgacaaauacaaaaacgcagucacagaacuucaaaugcucaugugcuccacacccgccacagguucuggcucagcaaucgcaagcggcgucgccguaugcaaaguccuucaccucgaaggcgaagucaacaaaaucaaauccgcccuccucuccaccaauaaagcugucgucucacucuccaacggcgucagcguccucacauucaaaguccucgaccucaaaaacuacauagacaagcaacuccucccgauacucaacaaacaaagcugcucuaucuccaacaucgaaaccgucauggaguuccaacagaaaaacaaucgucuccucgaaaucacccgcgaguucucaguaaacgccggggucaccacaccagucuccaccuacaugcucaccaacuccgaacuccuuagccucauaaacgacaugcccauaaccaacgaccaaaagaaacucaugagcaacaacguacaaauaguccgacaacaauccuauuccaucauguguaucaucaaagaagaaguccucgcauacguaguccaacucccccuauacggcguaaucgacaccccauguuggaaacuccacaccucaccacucuguaccaccaacaccaaagaaggcucaaacaucugccucacccgcacagaccgcggcugguacugcgacaacgcgggcuccgucagcuucuuuccccaagcggaaaccugcaaagucugcagcaacagagucuucugcgacacuaugaacucccucacccuccccucagaagucaaccucugcaacgucgacaucuucaacccgaaauacgacugcaaaaucaugaccagcaaaacugacgucuccucguccgucaucaccucacucggcgcaaucgugagcugcuacggcaaaaccaaaugcaccgccuccaacaaaaacaaaggcaucauaaaaacauucagcaacggcugcgacuacgucucgaacaaaggagucgacaccguaucagugggcaacacccuauacuacguaaacaagcaagaaggcaaaucacucuacguaaaaggcgaacccaucaucaacuucuacgacccccucgucuuccccuccgacgaguucgacgccuccaucucucaagucaacgagaaaaucaaccaaucccuugccuucauacguaaaagcgacgaacuccuucacaacguaaacgccgggaaauccaccacuaacauaaugaucaccaccaucaucaucguuaucauagucauccuccucucucucauagcagucggccuacuccuguacugcaaagcgcgcuaaggacuaguacuggcugcaucucccuuuccucuguccuccauccuucucccaggauggugaagggggaccugguacccagugauccccaccccaggauccuaaaucaugacuuaccugcuaauaaaaacucauuggaaaagugagaagaucuaaaaaaaaaaaaaaaaaaaaaaaaaaaaaaaaaaaaaaaaaaaaaaaaaaaaaaaaaaaaaaaaugcaucccccccccccccccccccccccccccccccaaaggcucuuuucagagccaccagaauu

SEQ ID NO: 7428 - RNA, 1889 nt, Artificial Sequence
  mRNA product Design g-1 comprising derived and/or modified sequence from HRSV(A2)__F-del_DSCav1_mut7 (opt1)
gggagacuuucccauucuguagcagaauuugguguugccuguggucuuggucccgcggagaagcuuaccauggagcugcucauccugaaggccaacgccaucaccaccauccugacggcggugaccuucugcuucgccagcggccagaacaucaccgaggaguucuaccaguccacgugcagcgccgucuccaagggguaccucagcgcccugcggaccggcugguacaccuccgugaucaccaucgagcugagcaacaucaaggagaacaagugcaacgggaccgacgccaaggugaagcucaucaagcaggagcuggacaaguacaagaacgcggucacggagcugcagaugcugaugugcuccaccccggcaaccggcuccggcuccgccaucgcgagcggcgucgccgugugcaaggugcugcaccucgagggggaggucaacaagaucaagagcgcccugcuguccaccaacaaggccguggugagccucuccaacggcgucagcgugcugaccuucaaggugcuggaccucaagaacuacaucgacaagcagcugcugcccauccugaacaagcagagcugcuccaucagcaacaucgagacggugauggaguuccagcagaagaacaaccggcuccuggagaucacccgcgaguucagcgugaacgccggggucaccacccccguguccacguacaugcugaccaacagcgagcuccugucccugaucaacgacaugccgaucaccaacgaccagaagaagcucaugagcaacaacgugcagaucguccggcagcaguccuacagcaucaugugcaucaucaaggaggaggugcuggcguacgugguccagcugccccucuacggcgugaucgacacccccugcuggaagcugcacacgagcccccugugcaccaccaacaccaaggagggguccaacaucugccucacgcgcaccgaccggggcugguacugcgacaacgccggcagcgucuccuucuucccgcaggccgagaccugcaaggugugcagcaaccgcguguucugcgacaccaugaacucccugacgcugcccagcgagguaaaccucugcaacgucgacaucuucaaccccaaguacgacugcaagaucaugaccuccaagaccgacgugagcuccagcgugaucaccucccugggggccaucgucagcugcuacggcaagacgaagugcaccgccagcaacaagaacaaggggaucaucaagaccuucuccaacggcugcgacuacgugagcaacaagggcguggacaccguguccgucgggaacacccuguacuacgugaacaagcaggagggcaagagccucuacgugaagggggagcccaucaucaacuucuacgacccgcuggucuuccccuccgacgaguucgacgcgagcaucucccaggugaacgagaagaucaaccagagccuggccuucauccgcaaguccgacgagcugcuccacaacgugaacgccggcaagagcacgaccaacaucaugaucaccaccaucaucaucgucaucaucgugauccugcugucccucaucgccguggggcugcugcucuacugcaaggcccggugaggacuaguggaagcauuuuccuggcugauuaaaagaaauuacucagcuauggucaucuguuccuguuagaaggcuaugcagcauauuauauacuaugcgcauguuaugaaaugcauaauaaaaaauuuuaaaaaaucuaaaagaucuaaaaaaaaaaaaaaaaaaaaaaaaaaaaaaaaaaaaaaaaaaaaaaaaaaaaaaaaaaaaaaaaugcaucccccccccccccccccccccccccccccccaaaggcucuuuucagagccaccagaauu

SEQ ID NO: 7429 - RNA, 1889 nt, Artificial Sequence
  mRNA product Design g-1 comprising derived and/or modified sequence from HRSV(A2)__F-del_DSCav1_mut7 (opt1)
gggagacuuucccauucuguagcagaauuugguguugccuguggucuuggucccgcggagaagcuuaccauggagcugcucauccugaaggccaacgccaucaccaccauccugacggcggugaccuucugcuucgccagcggccagaacaucaccgaggaguucuaccaguccacgugcagcgccgucuccaagggguaccucagcgcccugcgcaccggcugguacaccuccgugaucaccaucgagcugagcaacaucaaggagaacaagugcaacgggaccgacgccaaggugaagcucaucaagcaggagcuggacaaguacaagaacgcggucacggagcugcagaugcucaugugcuccacccccgccaccggcagcggguccgccaucgccagcggcguggcggugugcaagguccugcaccuggagggcgaggugaacaagaucaaguccgcccuccugagcaccaacaaggccguggucucccugagcaacgggguguccgugcucacguucaagguccuggaccugaagaacuacaucgacaagcagcuccugccgauccugaacaagcagagcugcuccaucagcaacaucgagaccgugauggaguuccagcagaagaacaaccggcuccuggagaucacccgcgaguucuccgugaacgccggcgucaccacgcccgugagcaccuacaugcugaccaacagcgagcuccugucccugaucaacgacaugcccaucaccaacgaccagaagaagcucaugagcaacaacgugcagaucguccggcagcaguccuacagcaucaugugcaucaucaaggaggaggugcuggccuacgugguccagcugccccucuacggggugaucgacacgccgugcuggaagcugcacaccagcccccugugcaccaccaacacgaaggagggcagcaacaucugccucacccgcaccgaccgggggugguacugcgacaacgcgggcuccgugagcuucuucccccaggccgagaccugcaaggucugcuccaaccgcguguucugcgacacgaugaacagccugacccugcccuccgaggucaaccucugcaacguggacaucuucaacccgaaguacgacugcaagaucaugaccagcaagaccgacguguccagcuccgucaucacgagccugggcgccaucguguccugcuacgggaagaccaagugcaccgccagcaacaagaacaagggcaucaucaagaccuucuccaacgggugcgacuacgugagcaacaagggcgucgacacggugagcgugggcaacacccuguacuacgucaacaagcaggaggggaagucccucuacgugaagggcgagcccaucaucaacuucuacgacccccugguguuccccagcgacgaguucgacgccuccaucagccaggucaacgagaagaucaaccagucccuggcguucauccggaaguccgacgagcuccugcacaacgugaacgccgggaaguccaccaccaacaucaugaucaccacgaucaucaucgugaucaucgucauccugcucagccugaucgccgugggccugcuccuguacugcaaggcccgcugaggacuaguggaagcauuuuccuggcugauuaaaagaaauuacucagcuauggucaucuguuccuguuagaaggcuaugcagcauauuauauacuaugcgcauguuaugaaaugcauaauaaaaaauuuuaaaaaaucuaaaagaucuaaaaaaaaaaaaaaaaaaaaaaaaaaaaaaaaaaaaaaaaaaaaaaaaaaaaaaaaaaaaaaaaugcaucccccccccccccccccccccccccccccccaaaggcucuuuucagagccaccagaauu

SEQ ID NO: 7430 - RNA, 1889 nt, Artificial Sequence
  mRNA product Design g-1 comprising derived and/or modified sequence from HRSV(A2)__F-del_DSCav1_mut7 (opt2)
gggagacuuucccauucuguagcagaauuugguguugccuguggucuuggucccgcggagaagcuuaccauggagcuccucauccucaaggccaacgccaucaccaccauccucaccgccgucaccuucugcuucgccuccggccagaacaucaccgaggaguucuaccaguccaccugcuccgccgucuccaagggcuaccucuccgcccuccgcaccggcugguacaccuccgucaucaccaucgagcucuccaacaucaaggagaacaagugcaacggcaccgacgccaaggucaagcucaucaagcaggagcucgacaaguacaagaacgccgucaccgagcuccagaugcucaugugcuccacccccgccaccggcuccggcuccgccaucgccuccggcgucgccgucugcaagguccuccaccucgagggcgaggucaacaagaucaaguccgcccuccucuccaccaacaaggccgucgucucccucuccaacggcgucuccguccucaccuucaagguccucgaccucaagaacuacaucgacaagcagcuccuccccauccucaacaagcaguccugcuccaucuccaacaucgagaccgucauggaguuccagcagaagaacaaccgccuccucgagaucacccgcgaguucuccgucaacgccggcgucaccacccccgucuccaccuacaugcucaccaacuccgagcuccucucccucaucaacgacaugcccaucaccaacgaccagaagaagcucauguccaacaacguccagaucguccgccagcaguccuacuccaucaugugcaucaucaaggaggagguccucgccuacgucguccagcucccccucuacggcgucaucgacacccccugcuggaagcuccacaccuccccccucugcaccaccaacaccaaggagggcuccaacaucugccucacccgcaccgaccgcggcugguacugcgacaacgccggcuccgucuccuucuucccccaggccgagaccugcaaggucugcuccaaccgcgucuucugcgacaccaugaacucccucacccuccccuccgaggucaaccucugcaacgucgacaucuucaaccccaaguacgacugcaagaucaugaccuccaagaccgacgucuccuccuccgucaucaccucccucggcgccaucgucuccugcuacggcaagaccaagugcaccgccuccaacaagaacaagggcaucaucaagaccuucuccaacggcugcgacuacgucuccaacaagggcgucgacaccgucuccgucggcaacacccucuacuacgucaacaagcaggagggcaagucccucuacgucaagggcgagcccaucaucaacuucuacgacccccucgucuuccccuccgacgaguucgacgccuccaucucccaggucaacgagaagaucaaccagucccucgccuucauccgcaaguccgacgagcuccuccacaacgucaacgccggcaaguccaccaccaacaucaugaucaccaccaucaucaucgucaucaucgucauccuccucucccucaucgccgucggccuccuccucuacugcaaggcccgcugaggacuaguggaagcauuuuccuggcugauuaaaagaaauuacucagcuauggucaucuguuccuguuagaaggcuaugcagcauauuauauacuaugcgcauguuaugaaaugcauaauaaaaaauuuuaaaaaaucuaaaagaucuaaaaaaaaaaaaaaaaaaaaaaaaaaaaaaaaaaaaaaaaaaaaaaaaaaaaaaaaaaaaaaaaugcaucccccccccccccccccccccccccccccccaaaggcucuuuucagagccaccagaauu

SEQ ID NO: 7431 - RNA, 1889 nt, Artificial Sequence
  mRNA product Design g-1 comprising derived and/or modified sequence from HRSV(A2)__F-del_DSCav1_mut7 (opt3)
gggagacuuucccauucuguagcagaauuugguguugccuguggucuuggucccgcggagaagcuuaccauggagcugcucauccuuaaggccaacgcuauuaccacaauacugacugcagugacguucugcuuugccagcggccagaauaucaccgaagaguucuaccaauccacauguucugcggucucaaaaggguauuugagugcuuuaagaacuggaugguacaccagcguuauuacaaucgaacuguccaacauuaaggagaauaaaugcaacgguaccgacgccaaggugaaacuaaucaagcaggaacucgauaaguauaaaaaugcaguaacugagcugcagaugcuuauguguucuacacccgccaccggcucggggucagcuauagcaagcggaguggccgucugcaaggugcugcacuuggagggcgaaguuaacaaaaucaagagugcucuccuguccacgaauaaagccguggucucucugagcaacgguguguccguacucacuuuuaagguuuuagaccugaagaauuacauugauaaacagcuuuugccuauccugaacaagcaaucauguaguauuagcaauaucgagaccgugauggaguuccagcagaaaaacaauaggcuacucgaaauaacacgggaguuuucugucaacgcgggggugacuaccccaguguccacauauaugcugaccaauucagaacuucugagcuugauuaacgacaugccgaucacgaacgaucagaagaaacucaugaguaauaacguccaaauuguucgccagcagucuuacuccaucaugugcaucauuaaggaggaagugcuggcauauguagugcaguuaccccuguacggagucauagacacuccuuguuggaaacuccauacaagcccacuuugcaccacuaauacaaaggagggcucgaacaucugucugacccgaacggaucguggcugguacugcgacaaugccgggucuguguccuucuuuccccaagcugaaaccuguaagguuugcucaaacagaguguucugcgauacaaugaauaguuugacucuaccuagcgaggucaaccuguguaauguggacauuuuuaacccaaaauaugauugcaagaucaugaccuccaaaacagacguaucuagcucaguuauaacuagccucggagccauuguguccuguuacgguaagaccaaaugcacagcaagcaauaagaacaagggcaucaucaaaaccuucucuaaugggugugauuaugucucaaacaagggaguggacacugucagugugggcaauacgcuguacuauguuaacaaacaggaggguaagagccuuuacgugaaaggggaacccauuaucaacuuuuaugacccucugguauucccauccgaugaguuugacgcuucuauuucgcaggucaaugaaaagauaaaccaaaguuuggccuucaucaggaaguccgaugagcuccugcacaaugugaacgcgggaaaaucaacaaccaauauuaugaucacuaccaucauuauaguuaucauugugaucuuacugagucuaauugccgucggccuccugcuuuacugcaaggcacggugaggacuaguggaagcauuuuccuggcugauuaaaagaaauuacucagcuauggucaucuguuccuguuagaaggcuaugcagcauauuauauacuaugcgcauguuaugaaaugcauaauaaaaaauuuuaaaaaaucuaaaagaucuaaaaaaaaaaaaaaaaaaaaaaaaaaaaaaaaaaaaaaaaaaaaaaaaaaaaaaaaaaaaaaaaugcaucccccccccccccccccccccccccccccccaaaggcucuuuucagagccaccagaauu

SEQ ID NO: 7432 - RNA, 1889 nt, Artificial Sequence
  mRNA product Design g-1 comprising derived and/or modified sequence from HRSV(A2)__F-del_DSCav1_mut7 (opt4)
gggagacuuucccauucuguagcagaauuugguguugccuguggucuuggucccgcggagaagcuuaccauggagcugcugauccugaaggccaacgccaucaccaccauccugaccgccgugaccuucugcuucgccagcggccagaacaucaccgaggaguucuaccagagcaccugcagcgccgugagcaagggcuaccugagcgcccugagaaccggcugguacaccagcgugaucaccaucgagcugagcaacaucaaggagaacaagugcaacggcaccgacgccaaggugaagcugaucaagcaggagcuggacaaguacaagaacgccgugaccgagcugcagaugcugaugugcagcacccccgccaccggcagcggcagcgccaucgccagcggcguggccgugugcaaggugcugcaccuggagggcgaggugaacaagaucaagagcgcccugcugagcaccaacaaggccguggugagccugagcaacggcgugagcgugcugaccuucaaggugcuggaccugaagaacuacaucgacaagcagcugcugcccauccugaacaagcagagcugcagcaucagcaacaucgagaccgugauggaguuccagcagaagaacaacagacugcuggagaucaccagagaguucagcgugaacgccggcgugaccacccccgugagcaccuacaugcugaccaacagcgagcugcugagccugaucaacgacaugcccaucaccaacgaccagaagaagcugaugagcaacaacgugcagaucgugagacagcagagcuacagcaucaugugcaucaucaaggaggaggugcuggccuacguggugcagcugccccuguacggcgugaucgacacccccugcuggaagcugcacaccagcccccugugcaccaccaacaccaaggagggcagcaacaucugccugaccagaaccgacagaggcugguacugcgacaacgccggcagcgugagcuucuucccccaggccgagaccugcaaggugugcagcaacagaguguucugcgacaccaugaacagccugacccugcccagcgaggugaaccugugcaacguggacaucuucaaccccaaguacgacugcaagaucaugaccagcaagaccgacgugagcagcagcgugaucaccagccugggcgccaucgugagcugcuacggcaagaccaagugcaccgccagcaacaagaacaagggcaucaucaagaccuucagcaacggcugcgacuacgugagcaacaagggcguggacaccgugagcgugggcaacacccuguacuacgugaacaagcaggagggcaagagccuguacgugaagggcgagcccaucaucaacuucuacgacccccugguguuccccagcgacgaguucgacgccagcaucagccaggugaacgagaagaucaaccagagccuggccuucaucagaaagagcgacgagcugcugcacaacgugaacgccggcaagagcaccaccaacaucaugaucaccaccaucaucaucgugaucaucgugauccugcugagccugaucgccgugggccugcugcuguacugcaaggccagaugaggacuaguggaagcauuuuccuggcugauuaaaagaaauuacucagcuauggucaucuguuccuguuagaaggcuaugcagcauauuauauacuaugcgcauguuaugaaaugcauaauaaaaaauuuuaaaaaaucuaaaagaucuaaaaaaaaaaaaaaaaaaaaaaaaaaaaaaaaaaaaaaaaaaaaaaaaaaaaaaaaaaaaaaaaugcaucccccccccccccccccccccccccccccccaaaggcucuuuucagagccaccagaauu

SEQ ID NO: 7433 - RNA, 1889 nt, Artificial Sequence
  mRNA product Design g-1 comprising derived and/or modified sequence from HRSV(A2)__F-del_DSCav1_mut7 (opt5)
gggagacuuucccauucuguagcagaauuugguguugccuguggucuuggucccgcggagaagcuuaccauggagcugcucauccugaaggccaacgcuauuaccacaauccuuacggccgugaccuucugcuuugcgagcggccagaauauuacagaagaguucuaccaauccaccuguucugcugucagcaaaggguaucuguccgcccucagaacaggaugguacaccucuguuaucacaauugaacugagcaacaucaaggagaauaaaugcaacggcaccgacgccaaggugaaacuuaucaagcaggaacuggauaaguauaaaaaugcugugacggagcuccagaugcugauguguuccacccccgccacagggucuggaagcgcuauugccuccggcgucgcggugugcaagguucugcaccucgagggggaagugaacaaaaucaagagcgcccugcuuucuaccaauaaagcugucgugucccugagcaacggaguuucugugcucacauuuaagguccuggaccuuaagaauuacauugauaaacagcugcucccuauccugaacaagcaauccuguagcauuucuaauaucgagaccgugauggaguuccagcagaaaaacaaucggcugcucgaaauuacgcgcgaguuuuccgugaacgccggcgucacaaccccgguuagcacauauaugcugaccaauuccgaacuucugucucucaucaacgacaugcccaucaccaacgaucagaagaaacugaugagcaauaacgugcaaauugugagacagcaguccuacagcaucaugugcauuaucaaggaggaaguccuugcuuaugugguucagcugccucucuacggcgugauugacacacccuguuggaaacugcauacgucuccucugugcaccacaaauaccaaggagggguccaacaucugucucacacggaccgaucgcggaugguacugcgacaaugccggcagcgucucuuucuuuccccaagcggaaacguguaaggugugcagcaacagaguuuucugcgauacaaugaacucccugacccuuccuucugaggugaaucuguguaaugucgacaucuuuaacccgaaauaugauugcaagauuaugaccagcaaaacagacguguccagcucugucaucaccucccucggggccauugugagcuguuacggaaagacaaaaugcacggcuucuaauaagaacaagggcaucauuaaaaccuucuccaaugggugugauuauguuagcaacaagggaguggacacagucuccgugggcaauacccuguacuauguuaacaaacaggagggcaagucucuuuacgugaaaggggaacccaucaucaacuuuuaugacccucuggucuuccccagcgaugaguuugacgccuccauuucucaggugaaugaaaagaucaaccaaagccucgcuuucauucggaaguccgaugagcugcugcacaaugugaacgccggaaaaagcacaaccaauaucaugauuacgaccaucauuaucguuaucauugucauccuccugucucuuauugccgugggccugcuccuguacugcaaggcucgcugaggacuaguggaagcauuuuccuggcugauuaaaagaaauuacucagcuauggucaucuguuccuguuagaaggcuaugcagcauauuauauacuaugcgcauguuaugaaaugcauaauaaaaaauuuuaaaaaaucuaaaagaucuaaaaaaaaaaaaaaaaaaaaaaaaaaaaaaaaaaaaaaaaaaaaaaaaaaaaaaaaaaaaaaaaugcaucccccccccccccccccccccccccccccccaaaggcucuuuucagagccaccagaauu

SEQ ID NO: 7434 - RNA, 1889 nt, Artificial Sequence
  mRNA product Design g-1 comprising derived and/or modified sequence from HRSV(A2)__F-del_DSCav1_mut7 (opt6)
gggagacuuucccauucuguagcagaauuugguguugccuguggucuuggucccgcggagaagcuuaccauggaauuacuaauccucaaagcaaacgcaauuacaaccauacuaaccgcugucaccuuuuguuuugccucaggacaaaacauaacugaagaauuuuaccaaucaacaugcuccgcaguaucuaaaggauaccucagcgcguuaagaacaggaugguacacaucgguaauaaccaucgaauuauccaacauaaaagaaaauaaaugcaauggaacagacgcaaaagucaaauuaauuaaacaagaacuagacaaauauaaaaacgcaguaaccgaauuacaaaugcuaauguguucaacaccagcaacaggaucaggaucagcuauagcuucaggaguugccguaugcaaagugcuacacuuagaaggagaagugaauaaaauaaaaucagcucuauuaucaacgaacaaagccguaguaucucuaucaaauggcguaucaguacucacauucaaaguacucgaccuaaaaaacuauauagauaaacaacuauuacccauccuaaauaaacaaagcugcucuauaucaaacaucgaaacaguaauggaauuucaacaaaaaaacaacagacuacuagaaauaacccgagaguucucaguuaaugcaggaguaacaacaccagucucaacauacaugcucacaaacucagaacuccuaucacuaauaaaugacaugccaauaacaaacgaccaaaaaaaacucaugucuaacaacguccaaauaguaagacaacaauccuacagcauaauguguauaauaaaagaagaaguuuuagcauacgucguacaacuacccuuauauggcguaauagauacaccaugcuggaaacuccauaccucaccucuauguacaacaaauaccaaagaagguucuaauauaugccuaacacgaacugaccgaggaugguacugugacaacgcaggaucagucucuuucuuuccacaagcagaaaccugcaaaguaugcaguaaccgcguauuuugcgacacaaugaacucccuaaccuuaccaucagaaguaaacuuauguaacguagacauauucaauccaaaauaugacugcaaaauaaugacaucaaaaacagacguaagcucaucaguaauaacuucacuaggcgcaauuguaucaugcuauggaaaaaccaaauguaccgcauccaacaaaaauaaaggaauaauaaaaaccuucucuaacggaugcgacuacguaucaaacaaagguguagauacaguuucuguaggaaacacacucuacuauguaaauaaacaagaaggaaaaucacuauacguaaaaggagaaccaauaauaaacuucuaugacccacuuguauuuccaucugaugaauuugaugcaagcauaucacaaguaaacgaaaaaauaaaccaaucucuagccuuuauacgaaaaagcgacgaauuacuacauaacgucaacgcuggaaaaucaacaacaaacauaaugauaacaacaauaauaauaguaauaauagucauccuauuaucacuaaucgccguaggacuacuccuauacugcaaagcuagauaaggacuaguggaagcauuuuccuggcugauuaaaagaaauuacucagcuauggucaucuguuccuguuagaaggcuaugcagcauauuauauacuaugcgcauguuaugaaaugcauaauaaaaaauuuuaaaaaaucuaaaagaucuaaaaaaaaaaaaaaaaaaaaaaaaaaaaaaaaaaaaaaaaaaaaaaaaaaaaaaaaaaaaaaaaugcaucccccccccccccccccccccccccccccccaaaggcucuuuucagagccaccagaauu

SEQ ID NO: 7435 - RNA, 1889 nt, Artificial Sequence
  mRNA product Design g-1 comprising derived and/or modified sequence from HRSV(A2)__F-del_DSCav1_mut7 (opt11)
gggagacuuucccauucuguagcagaauuugguguugccuguggucuuggucccgcggagaagcuuaccauggaacuccucauccucaaagccaacgccauaaccacuauccucacagcagucacuuucugcuucgccucaggacaaaacauaaccgaagaguucuaccaauccacaugcuccgccgucuccaaaggcuaccucucagcgcuccgcaccggcugguacacauccgucaucaccaucgaacuaagcaacauaaaagaaaacaaaugcaacggcaccgacgccaaaguuaaacucaucaagcaagaacucgacaaauacaaaaacgcagucacagaacuucaaaugcucaugugcuccacacccgccacagguucuggcucagcaaucgcaagcggcgucgccguaugcaaaguccuucaccucgaaggcgaagucaacaaaaucaaauccgcccuccucuccaccaauaaagcugucgucucacucuccaacggcgucagcguccucacauucaaaguccucgaccucaaaaacuacauagacaagcaacuccucccgauacucaacaaacaaagcugcucuaucuccaacaucgaaaccgucauggaguuccaacagaaaaacaaucgucuccucgaaaucacccgcgaguucucaguaaacgccggggucaccacaccagucuccaccuacaugcucaccaacuccgaacuccuuagccucauaaacgacaugcccauaaccaacgaccaaaagaaacucaugagcaacaacguacaaauaguccgacaacaauccuauuccaucauguguaucaucaaagaagaaguccucgcauacguaguccaacucccccuauacggcguaaucgacaccccauguuggaaacuccacaccucaccacucuguaccaccaacaccaaagaaggcucaaacaucugccucacccgcacagaccgcggcugguacugcgacaacgcgggcuccgucagcuucuuuccccaagcggaaaccugcaaagucugcagcaacagagucuucugcgacacuaugaacucccucacccuccccucagaagucaaccucugcaacgucgacaucuucaacccgaaauacgacugcaaaaucaugaccagcaaaacugacgucuccucguccgucaucaccucacucggcgcaaucgugagcugcuacggcaaaaccaaaugcaccgccuccaacaaaaacaaaggcaucauaaaaacauucagcaacggcugcgacuacgucucgaacaaaggagucgacaccguaucagugggcaacacccuauacuacguaaacaagcaagaaggcaaaucacucuacguaaaaggcgaacccaucaucaacuucuacgacccccucgucuuccccuccgacgaguucgacgccuccaucucucaagucaacgagaaaaucaaccaaucccuugccuucauacguaaaagcgacgaacuccuucacaacguaaacgccgggaaauccaccacuaacauaaugaucaccaccaucaucaucguuaucauagucauccuccucucucucauagcagucggccuacuccuguacugcaaagcgcgcuaaggacuaguggaagcauuuuccuggcugauuaaaagaaauuacucagcuauggucaucuguuccuguuagaaggcuaugcagcauauuauauacuaugcgcauguuaugaaaugcauaauaaaaaauuuuaaaaaaucuaaaagaucuaaaaaaaaaaaaaaaaaaaaaaaaaaaaaaaaaaaaaaaaaaaaaaaaaaaaaaaaaaaaaaaaugcaucccccccccccccccccccccccccccccccaaaggcucuuuucagagccaccagaauu

SEQ ID NO: 7436 - RNA, 1904 nt, Artificial Sequence
  mRNA product Design g-2 comprising derived and/or modified sequence from HRSV(A2)__F-del_DSCav1_mut7 (opt1)
gggagaguccgcucagccagguugcagaagcggcuuagcguguguccuaaucuucucucugcguguagguaggccugugccgcaaacaagcuuaccauggagcugcucauccugaaggccaacgccaucaccaccauccugacggcggugaccuucugcuucgccagcggccagaacaucaccgaggaguucuaccaguccacgugcagcgccgucuccaagggguaccucagcgcccugcggaccggcugguacaccuccgugaucaccaucgagcugagcaacaucaaggagaacaagugcaacgggaccgacgccaaggugaagcucaucaagcaggagcuggacaaguacaagaacgcggucacggagcugcagaugcugaugugcuccaccccggcaaccggcuccggcuccgccaucgcgagcggcgucgccgugugcaaggugcugcaccucgagggggaggucaacaagaucaagagcgcccugcuguccaccaacaaggccguggugagccucuccaacggcgucagcgugcugaccuucaaggugcuggaccucaagaacuacaucgacaagcagcugcugcccauccugaacaagcagagcugcuccaucagcaacaucgagacggugauggaguuccagcagaagaacaaccggcuccuggagaucacccgcgaguucagcgugaacgccggggucaccacccccguguccacguacaugcugaccaacagcgagcuccugucccugaucaacgacaugccgaucaccaacgaccagaagaagcucaugagcaacaacgugcagaucguccggcagcaguccuacagcaucaugugcaucaucaaggaggaggugcuggcguacgugguccagcugccccucuacggcgugaucgacacccccugcuggaagcugcacacgagcccccugugcaccaccaacaccaaggagggguccaacaucugccucacgcgcaccgaccggggcugguacugcgacaacgccggcagcgucuccuucuucccgcaggccgagaccugcaaggugugcagcaaccgcguguucugcgacaccaugaacucccugacgcugcccagcgagguaaaccucugcaacgucgacaucuucaaccccaaguacgacugcaagaucaugaccuccaagaccgacgugagcuccagcgugaucaccucccugggggccaucgucagcugcuacggcaagacgaagugcaccgccagcaacaagaacaaggggaucaucaagaccuucuccaacggcugcgacuacgugagcaacaagggcguggacaccguguccgucgggaacacccuguacuacgugaacaagcaggagggcaagagccucuacgugaagggggagcccaucaucaacuucuacgacccgcuggucuuccccuccgacgaguucgacgcgagcaucucccaggugaacgagaagaucaaccagagccuggccuucauccgcaaguccgacgagcugcuccacaacgugaacgccggcaagagcacgaccaacaucaugaucaccaccaucaucaucgucaucaucgugauccugcugucccucaucgccguggggcugcugcucuacugcaaggcccggugaggacuaguaauaaggaaacuguaugaaugucugugggcaggaagugaagagauccuucuguaaagguuuuuggaauuaugucugcugaauaauaaacuuuuuugaaauaauaaaucugguagaaaaaugagaucuaaaaaaaaaaaaaaaaaaaaaaaaaaaaaaaaaaaaaaaaaaaaaaaaaaaaaaaaaaaaaaaaugcaucccccccccccccccccccccccccccccccaaaggcucuuuucagagccaccagaauu

SEQ ID NO: 7437 - RNA, 1904 nt, Artificial Sequence
  mRNA product Design g-2 comprising derived and/or modified sequence from HRSV(A2)__F-del_DSCav1_mut7 (opt1)
gggagaguccgcucagccagguugcagaagcggcuuagcguguguccuaaucuucucucugcguguagguaggccugugccgcaaacaagcuuaccauggagcugcucauccugaaggccaacgccaucaccaccauccugacggcggugaccuucugcuucgccagcggccagaacaucaccgaggaguucuaccaguccacgugcagcgccgucuccaagggguaccucagcgcccugcgcaccggcugguacaccuccgugaucaccaucgagcugagcaacaucaaggagaacaagugcaacgggaccgacgccaaggugaagcucaucaagcaggagcuggacaaguacaagaacgcggucacggagcugcagaugcucaugugcuccacccccgccaccggcagcggguccgccaucgccagcggcguggcggugugcaagguccugcaccuggagggcgaggugaacaagaucaaguccgcccuccugagcaccaacaaggccguggucucccugagcaacgggguguccgugcucacguucaagguccuggaccugaagaacuacaucgacaagcagcuccugccgauccugaacaagcagagcugcuccaucagcaacaucgagaccgugauggaguuccagcagaagaacaaccggcuccuggagaucacccgcgaguucuccgugaacgccggcgucaccacgcccgugagcaccuacaugcugaccaacagcgagcuccugucccugaucaacgacaugcccaucaccaacgaccagaagaagcucaugagcaacaacgugcagaucguccggcagcaguccuacagcaucaugugcaucaucaaggaggaggugcuggccuacgugguccagcugccccucuacggggugaucgacacgccgugcuggaagcugcacaccagcccccugugcaccaccaacacgaaggagggcagcaacaucugccucacccgcaccgaccgggggugguacugcgacaacgcgggcuccgugagcuucuucccccaggccgagaccugcaaggucugcuccaaccgcguguucugcgacacgaugaacagccugacccugcccuccgaggucaaccucugcaacguggacaucuucaacccgaaguacgacugcaagaucaugaccagcaagaccgacguguccagcuccgucaucacgagccugggcgccaucguguccugcuacgggaagaccaagugcaccgccagcaacaagaacaagggcaucaucaagaccuucuccaacgggugcgacuacgugagcaacaagggcgucgacacggugagcgugggcaacacccuguacuacgucaacaagcaggaggggaagucccucuacgugaagggcgagcccaucaucaacuucuacgacccccugguguuccccagcgacgaguucgacgccuccaucagccaggucaacgagaagaucaaccagucccuggcguucauccggaaguccgacgagcuccugcacaacgugaacgccgggaaguccaccaccaacaucaugaucaccacgaucaucaucgugaucaucgucauccugcucagccugaucgccgugggccugcuccuguacugcaaggcccgcugaggacuaguaauaaggaaacuguaugaaugucugugggcaggaagugaagagauccuucuguaaagguuuuuggaauuaugucugcugaauaauaaacuuuuuugaaauaauaaaucugguagaaaaaugagaucuaaaaaaaaaaaaaaaaaaaaaaaaaaaaaaaaaaaaaaaaaaaaaaaaaaaaaaaaaaaaaaaaugcaucccccccccccccccccccccccccccccccaaaggcucuuuucagagccaccagaauu

SEQ ID NO: 7438 - RNA, 1904 nt, Artificial Sequence
  mRNA product Design g-2 comprising derived and/or modified sequence from HRSV(A2)__F-del_DSCav1_mut7 (opt2)
gggagaguccgcucagccagguugcagaagcggcuuagcguguguccuaaucuucucucugcguguagguaggccugugccgcaaacaagcuuaccauggagcuccucauccucaaggccaacgccaucaccaccauccucaccgccgucaccuucugcuucgccuccggccagaacaucaccgaggaguucuaccaguccaccugcuccgccgucuccaagggcuaccucuccgcccuccgcaccggcugguacaccuccgucaucaccaucgagcucuccaacaucaaggagaacaagugcaacggcaccgacgccaaggucaagcucaucaagcaggagcucgacaaguacaagaacgccgucaccgagcuccagaugcucaugugcuccacccccgccaccggcuccggcuccgccaucgccuccggcgucgccgucugcaagguccuccaccucgagggcgaggucaacaagaucaaguccgcccuccucuccaccaacaaggccgucgucucccucuccaacggcgucuccguccucaccuucaagguccucgaccucaagaacuacaucgacaagcagcuccuccccauccucaacaagcaguccugcuccaucuccaacaucgagaccgucauggaguuccagcagaagaacaaccgccuccucgagaucacccgcgaguucuccgucaacgccggcgucaccacccccgucuccaccuacaugcucaccaacuccgagcuccucucccucaucaacgacaugcccaucaccaacgaccagaagaagcucauguccaacaacguccagaucguccgccagcaguccuacuccaucaugugcaucaucaaggaggagguccucgccuacgucguccagcucccccucuacggcgucaucgacacccccugcuggaagcuccacaccuccccccucugcaccaccaacaccaaggagggcuccaacaucugccucacccgcaccgaccgcggcugguacugcgacaacgccggcuccgucuccuucuucccccaggccgagaccugcaaggucugcuccaaccgcgucuucugcgacaccaugaacucccucacccuccccuccgaggucaaccucugcaacgucgacaucuucaaccccaaguacgacugcaagaucaugaccuccaagaccgacgucuccuccuccgucaucaccucccucggcgccaucgucuccugcuacggcaagaccaagugcaccgccuccaacaagaacaagggcaucaucaagaccuucuccaacggcugcgacuacgucuccaacaagggcgucgacaccgucuccgucggcaacacccucuacuacgucaacaagcaggagggcaagucccucuacgucaagggcgagcccaucaucaacuucuacgacccccucgucuuccccuccgacgaguucgacgccuccaucucccaggucaacgagaagaucaaccagucccucgccuucauccgcaaguccgacgagcuccuccacaacgucaacgccggcaaguccaccaccaacaucaugaucaccaccaucaucaucgucaucaucgucauccuccucucccucaucgccgucggccuccuccucuacugcaaggcccgcugaggacuaguaauaaggaaacuguaugaaugucugugggcaggaagugaagagauccuucuguaaagguuuuuggaauuaugucugcugaauaauaaacuuuuuugaaauaauaaaucugguagaaaaaugagaucuaaaaaaaaaaaaaaaaaaaaaaaaaaaaaaaaaaaaaaaaaaaaaaaaaaaaaaaaaaaaaaaaugcaucccccccccccccccccccccccccccccccaaaggcucuuuucagagccaccagaauu

SEQ ID NO: 7439 - RNA, 1904 nt, Artificial Sequence
  mRNA product Design g-2 comprising derived and/or modified sequence from HRSV(A2)__F-del_DSCav1_mut7 (opt3)
gggagaguccgcucagccagguugcagaagcggcuuagcguguguccuaaucuucucucugcguguagguaggccugugccgcaaacaagcuuaccauggagcugcucauccuuaaggccaacgcuauuaccacaauacugacugcagugacguucugcuuugccagcggccagaauaucaccgaagaguucuaccaauccacauguucugcggucucaaaaggguauuugagugcuuuaagaacuggaugguacaccagcguuauuacaaucgaacuguccaacauuaaggagaauaaaugcaacgguaccgacgccaaggugaaacuaaucaagcaggaacucgauaaguauaaaaaugcaguaacugagcugcagaugcuuauguguucuacacccgccaccggcucggggucagcuauagcaagcggaguggccgucugcaaggugcugcacuuggagggcgaaguuaacaaaaucaagagugcucuccuguccacgaauaaagccguggucucucugagcaacgguguguccguacucacuuuuaagguuuuagaccugaagaauuacauugauaaacagcuuuugccuauccugaacaagcaaucauguaguauuagcaauaucgagaccgugauggaguuccagcagaaaaacaauaggcuacucgaaauaacacgggaguuuucugucaacgcgggggugacuaccccaguguccacauauaugcugaccaauucagaacuucugagcuugauuaacgacaugccgaucacgaacgaucagaagaaacucaugaguaauaacguccaaauuguucgccagcagucuuacuccaucaugugcaucauuaaggaggaagugcuggcauauguagugcaguuaccccuguacggagucauagacacuccuuguuggaaacuccauacaagcccacuuugcaccacuaauacaaaggagggcucgaacaucugucugacccgaacggaucguggcugguacugcgacaaugccgggucuguguccuucuuuccccaagcugaaaccuguaagguuugcucaaacagaguguucugcgauacaaugaauaguuugacucuaccuagcgaggucaaccuguguaauguggacauuuuuaacccaaaauaugauugcaagaucaugaccuccaaaacagacguaucuagcucaguuauaacuagccucggagccauuguguccuguuacgguaagaccaaaugcacagcaagcaauaagaacaagggcaucaucaaaaccuucucuaaugggugugauuaugucucaaacaagggaguggacacugucagugugggcaauacgcuguacuauguuaacaaacaggaggguaagagccuuuacgugaaaggggaacccauuaucaacuuuuaugacccucugguauucccauccgaugaguuugacgcuucuauuucgcaggucaaugaaaagauaaaccaaaguuuggccuucaucaggaaguccgaugagcuccugcacaaugugaacgcgggaaaaucaacaaccaauauuaugaucacuaccaucauuauaguuaucauugugaucuuacugagucuaauugccgucggccuccugcuuuacugcaaggcacggugaggacuaguaauaaggaaacuguaugaaugucugugggcaggaagugaagagauccuucuguaaagguuuuuggaauuaugucugcugaauaauaaacuuuuuugaaauaauaaaucugguagaaaaaugagaucuaaaaaaaaaaaaaaaaaaaaaaaaaaaaaaaaaaaaaaaaaaaaaaaaaaaaaaaaaaaaaaaaugcaucccccccccccccccccccccccccccccccaaaggcucuuuucagagccaccagaauu

SEQ ID NO: 7440 - RNA, 1904 nt, Artificial Sequence
  mRNA product Design g-2 comprising derived and/or modified sequence from HRSV(A2)__F-del_DSCav1_mut7 (opt4)
gggagaguccgcucagccagguugcagaagcggcuuagcguguguccuaaucuucucucugcguguagguaggccugugccgcaaacaagcuuaccauggagcugcugauccugaaggccaacgccaucaccaccauccugaccgccgugaccuucugcuucgccagcggccagaacaucaccgaggaguucuaccagagcaccugcagcgccgugagcaagggcuaccugagcgcccugagaaccggcugguacaccagcgugaucaccaucgagcugagcaacaucaaggagaacaagugcaacggcaccgacgccaaggugaagcugaucaagcaggagcuggacaaguacaagaacgccgugaccgagcugcagaugcugaugugcagcacccccgccaccggcagcggcagcgccaucgccagcggcguggccgugugcaaggugcugcaccuggagggcgaggugaacaagaucaagagcgcccugcugagcaccaacaaggccguggugagccugagcaacggcgugagcgugcugaccuucaaggugcuggaccugaagaacuacaucgacaagcagcugcugcccauccugaacaagcagagcugcagcaucagcaacaucgagaccgugauggaguuccagcagaagaacaacagacugcuggagaucaccagagaguucagcgugaacgccggcgugaccacccccgugagcaccuacaugcugaccaacagcgagcugcugagccugaucaacgacaugcccaucaccaacgaccagaagaagcugaugagcaacaacgugcagaucgugagacagcagagcuacagcaucaugugcaucaucaaggaggaggugcuggccuacguggugcagcugccccuguacggcgugaucgacacccccugcuggaagcugcacaccagcccccugugcaccaccaacaccaaggagggcagcaacaucugccugaccagaaccgacagaggcugguacugcgacaacgccggcagcgugagcuucuucccccaggccgagaccugcaaggugugcagcaacagaguguucugcgacaccaugaacagccugacccugcccagcgaggugaaccugugcaacguggacaucuucaaccccaaguacgacugcaagaucaugaccagcaagaccgacgugagcagcagcgugaucaccagccugggcgccaucgugagcugcuacggcaagaccaagugcaccgccagcaacaagaacaagggcaucaucaagaccuucagcaacggcugcgacuacgugagcaacaagggcguggacaccgugagcgugggcaacacccuguacuacgugaacaagcaggagggcaagagccuguacgugaagggcgagcccaucaucaacuucuacgacccccugguguuccccagcgacgaguucgacgccagcaucagccaggugaacgagaagaucaaccagagccuggccuucaucagaaagagcgacgagcugcugcacaacgugaacgccggcaagagcaccaccaacaucaugaucaccaccaucaucaucgugaucaucgugauccugcugagccugaucgccgugggccugcugcuguacugcaaggccagaugaggacuaguaauaaggaaacuguaugaaugucugugggcaggaagugaagagauccuucuguaaagguuuuuggaauuaugucugcugaauaauaaacuuuuuugaaauaauaaaucugguagaaaaaugagaucuaaaaaaaaaaaaaaaaaaaaaaaaaaaaaaaaaaaaaaaaaaaaaaaaaaaaaaaaaaaaaaaaugcaucccccccccccccccccccccccccccccccaaaggcucuuuucagagccaccagaauu

SEQ ID NO: 7441 - RNA, 1904 nt, Artificial Sequence
  mRNA product Design g-2 comprising derived and/or modified sequence from HRSV(A2)__F-del_DSCav1_mut7 (opt5)
gggagaguccgcucagccagguugcagaagcggcuuagcguguguccuaaucuucucucugcguguagguaggccugugccgcaaacaagcuuaccauggagcugcucauccugaaggccaacgcuauuaccacaauccuuacggccgugaccuucugcuuugcgagcggccagaauauuacagaagaguucuaccaauccaccuguucugcugucagcaaaggguaucuguccgcccucagaacaggaugguacaccucuguuaucacaauugaacugagcaacaucaaggagaauaaaugcaacggcaccgacgccaaggugaaacuuaucaagcaggaacuggauaaguauaaaaaugcugugacggagcuccagaugcugauguguuccacccccgccacagggucuggaagcgcuauugccuccggcgucgcggugugcaagguucugcaccucgagggggaagugaacaaaaucaagagcgcccugcuuucuaccaauaaagcugucgugucccugagcaacggaguuucugugcucacauuuaagguccuggaccuuaagaauuacauugauaaacagcugcucccuauccugaacaagcaauccuguagcauuucuaauaucgagaccgugauggaguuccagcagaaaaacaaucggcugcucgaaauuacgcgcgaguuuuccgugaacgccggcgucacaaccccgguuagcacauauaugcugaccaauuccgaacuucugucucucaucaacgacaugcccaucaccaacgaucagaagaaacugaugagcaauaacgugcaaauugugagacagcaguccuacagcaucaugugcauuaucaaggaggaaguccuugcuuaugugguucagcugccucucuacggcgugauugacacacccuguuggaaacugcauacgucuccucugugcaccacaaauaccaaggagggguccaacaucugucucacacggaccgaucgcggaugguacugcgacaaugccggcagcgucucuuucuuuccccaagcggaaacguguaaggugugcagcaacagaguuuucugcgauacaaugaacucccugacccuuccuucugaggugaaucuguguaaugucgacaucuuuaacccgaaauaugauugcaagauuaugaccagcaaaacagacguguccagcucugucaucaccucccucggggccauugugagcuguuacggaaagacaaaaugcacggcuucuaauaagaacaagggcaucauuaaaaccuucuccaaugggugugauuauguuagcaacaagggaguggacacagucuccgugggcaauacccuguacuauguuaacaaacaggagggcaagucucuuuacgugaaaggggaacccaucaucaacuuuuaugacccucuggucuuccccagcgaugaguuugacgccuccauuucucaggugaaugaaaagaucaaccaaagccucgcuuucauucggaaguccgaugagcugcugcacaaugugaacgccggaaaaagcacaaccaauaucaugauuacgaccaucauuaucguuaucauugucauccuccugucucuuauugccgugggccugcuccuguacugcaaggcucgcugaggacuaguaauaaggaaacuguaugaaugucugugggcaggaagugaagagauccuucuguaaagguuuuuggaauuaugucugcugaauaauaaacuuuuuugaaauaauaaaucugguagaaaaaugagaucuaaaaaaaaaaaaaaaaaaaaaaaaaaaaaaaaaaaaaaaaaaaaaaaaaaaaaaaaaaaaaaaaugcaucccccccccccccccccccccccccccccccaaaggcucuuuucagagccaccagaauu

SEQ ID NO: 7442 - RNA, 1904 nt, Artificial Sequence
  mRNA product Design g-2 comprising derived and/or modified sequence from HRSV(A2)__F-del_DSCav1_mut7 (opt6)
gggagaguccgcucagccagguugcagaagcggcuuagcguguguccuaaucuucucucugcguguagguaggccugugccgcaaacaagcuuaccauggaauuacuaauccucaaagcaaacgcaauuacaaccauacuaaccgcugucaccuuuuguuuugccucaggacaaaacauaacugaagaauuuuaccaaucaacaugcuccgcaguaucuaaaggauaccucagcgcguuaagaacaggaugguacacaucgguaauaaccaucgaauuauccaacauaaaagaaaauaaaugcaauggaacagacgcaaaagucaaauuaauuaaacaagaacuagacaaauauaaaaacgcaguaaccgaauuacaaaugcuaauguguucaacaccagcaacaggaucaggaucagcuauagcuucaggaguugccguaugcaaagugcuacacuuagaaggagaagugaauaaaauaaaaucagcucuauuaucaacgaacaaagccguaguaucucuaucaaauggcguaucaguacucacauucaaaguacucgaccuaaaaaacuauauagauaaacaacuauuacccauccuaaauaaacaaagcugcucuauaucaaacaucgaaacaguaauggaauuucaacaaaaaaacaacagacuacuagaaauaacccgagaguucucaguuaaugcaggaguaacaacaccagucucaacauacaugcucacaaacucagaacuccuaucacuaauaaaugacaugccaauaacaaacgaccaaaaaaaacucaugucuaacaacguccaaauaguaagacaacaauccuacagcauaauguguauaauaaaagaagaaguuuuagcauacgucguacaacuacccuuauauggcguaauagauacaccaugcuggaaacuccauaccucaccucuauguacaacaaauaccaaagaagguucuaauauaugccuaacacgaacugaccgaggaugguacugugacaacgcaggaucagucucuuucuuuccacaagcagaaaccugcaaaguaugcaguaaccgcguauuuugcgacacaaugaacucccuaaccuuaccaucagaaguaaacuuauguaacguagacauauucaauccaaaauaugacugcaaaauaaugacaucaaaaacagacguaagcucaucaguaauaacuucacuaggcgcaauuguaucaugcuauggaaaaaccaaauguaccgcauccaacaaaaauaaaggaauaauaaaaaccuucucuaacggaugcgacuacguaucaaacaaagguguagauacaguuucuguaggaaacacacucuacuauguaaauaaacaagaaggaaaaucacuauacguaaaaggagaaccaauaauaaacuucuaugacccacuuguauuuccaucugaugaauuugaugcaagcauaucacaaguaaacgaaaaaauaaaccaaucucuagccuuuauacgaaaaagcgacgaauuacuacauaacgucaacgcuggaaaaucaacaacaaacauaaugauaacaacaauaauaauaguaauaauagucauccuauuaucacuaaucgccguaggacuacuccuauacugcaaagcuagauaaggacuaguaauaaggaaacuguaugaaugucugugggcaggaagugaagagauccuucuguaaagguuuuuggaauuaugucugcugaauaauaaacuuuuuugaaauaauaaaucugguagaaaaaugagaucuaaaaaaaaaaaaaaaaaaaaaaaaaaaaaaaaaaaaaaaaaaaaaaaaaaaaaaaaaaaaaaaaugcaucccccccccccccccccccccccccccccccaaaggcucuuuucagagccaccagaauu

SEQ ID NO: 7443 - RNA, 1904 nt, Artificial Sequence
  mRNA product Design g-2 comprising derived and/or modified sequence from HRSV(A2)__F-del_DSCav1_mut7 (opt11)
gggagaguccgcucagccagguugcagaagcggcuuagcguguguccuaaucuucucucugcguguagguaggccugugccgcaaacaagcuuaccauggaacuccucauccucaaagccaacgccauaaccacuauccucacagcagucacuuucugcuucgccucaggacaaaacauaaccgaagaguucuaccaauccacaugcuccgccgucuccaaaggcuaccucucagcgcuccgcaccggcugguacacauccgucaucaccaucgaacuaagcaacauaaaagaaaacaaaugcaacggcaccgacgccaaaguuaaacucaucaagcaagaacucgacaaauacaaaaacgcagucacagaacuucaaaugcucaugugcuccacacccgccacagguucuggcucagcaaucgcaagcggcgucgccguaugcaaaguccuucaccucgaaggcgaagucaacaaaaucaaauccgcccuccucuccaccaauaaagcugucgucucacucuccaacggcgucagcguccucacauucaaaguccucgaccucaaaaacuacauagacaagcaacuccucccgauacucaacaaacaaagcugcucuaucuccaacaucgaaaccgucauggaguuccaacagaaaaacaaucgucuccucgaaaucacccgcgaguucucaguaaacgccggggucaccacaccagucuccaccuacaugcucaccaacuccgaacuccuuagccucauaaacgacaugcccauaaccaacgaccaaaagaaacucaugagcaacaacguacaaauaguccgacaacaauccuauuccaucauguguaucaucaaagaagaaguccucgcauacguaguccaacucccccuauacggcguaaucgacaccccauguuggaaacuccacaccucaccacucuguaccaccaacaccaaagaaggcucaaacaucugccucacccgcacagaccgcggcugguacugcgacaacgcgggcuccgucagcuucuuuccccaagcggaaaccugcaaagucugcagcaacagagucuucugcgacacuaugaacucccucacccuccccucagaagucaaccucugcaacgucgacaucuucaacccgaaauacgacugcaaaaucaugaccagcaaaacugacgucuccucguccgucaucaccucacucggcgcaaucgugagcugcuacggcaaaaccaaaugcaccgccuccaacaaaaacaaaggcaucauaaaaacauucagcaacggcugcgacuacgucucgaacaaaggagucgacaccguaucagugggcaacacccuauacuacguaaacaagcaagaaggcaaaucacucuacguaaaaggcgaacccaucaucaacuucuacgacccccucgucuuccccuccgacgaguucgacgccuccaucucucaagucaacgagaaaaucaaccaaucccuugccuucauacguaaaagcgacgaacuccuucacaacguaaacgccgggaaauccaccacuaacauaaugaucaccaccaucaucaucguuaucauagucauccuccucucucucauagcagucggccuacuccuguacugcaaagcgcgcuaaggacuaguaauaaggaaacuguaugaaugucugugggcaggaagugaagagauccuucuguaaagguuuuuggaauuaugucugcugaauaauaaacuuuuuugaaauaauaaaucugguagaaaaaugagaucuaaaaaaaaaaaaaaaaaaaaaaaaaaaaaaaaaaaaaaaaaaaaaaaaaaaaaaaaaaaaaaaaugcaucccccccccccccccccccccccccccccccaaaggcucuuuucagagccaccagaauu

SEQ ID NO: 7444 - RNA, 2136 nt, Artificial Sequence
  mRNA product Design g-3 comprising derived and/or modified sequence from HRSV(A2)__F-del_DSCav1_mut7 (opt1)
gggagaguccgcucagccagguugcagaagcggcuuagcguguguccuaaucuucucucugcguguagguaggccugugccgcaaacaagcuuaccauggagcugcucauccugaaggccaacgccaucaccaccauccugacggcggugaccuucugcuucgccagcggccagaacaucaccgaggaguucuaccaguccacgugcagcgccgucuccaagggguaccucagcgcccugcggaccggcugguacaccuccgugaucaccaucgagcugagcaacaucaaggagaacaagugcaacgggaccgacgccaaggugaagcucaucaagcaggagcuggacaaguacaagaacgcggucacggagcugcagaugcugaugugcuccaccccggcaaccggcuccggcuccgccaucgcgagcggcgucgccgugugcaaggugcugcaccucgagggggaggucaacaagaucaagagcgcccugcuguccaccaacaaggccguggugagccucuccaacggcgucagcgugcugaccuucaaggugcuggaccucaagaacuacaucgacaagcagcugcugcccauccugaacaagcagagcugcuccaucagcaacaucgagacggugauggaguuccagcagaagaacaaccggcuccuggagaucacccgcgaguucagcgugaacgccggggucaccacccccguguccacguacaugcugaccaacagcgagcuccugucccugaucaacgacaugccgaucaccaacgaccagaagaagcucaugagcaacaacgugcagaucguccggcagcaguccuacagcaucaugugcaucaucaaggaggaggugcuggcguacgugguccagcugccccucuacggcgugaucgacacccccugcuggaagcugcacacgagcccccugugcaccaccaacaccaaggagggguccaacaucugccucacgcgcaccgaccggggcugguacugcgacaacgccggcagcgucuccuucuucccgcaggccgagaccugcaaggugugcagcaaccgcguguucugcgacaccaugaacucccugacgcugcccagcgagguaaaccucugcaacgucgacaucuucaaccccaaguacgacugcaagaucaugaccuccaagaccgacgugagcuccagcgugaucaccucccugggggccaucgucagcugcuacggcaagacgaagugcaccgccagcaacaagaacaaggggaucaucaagaccuucuccaacggcugcgacuacgugagcaacaagggcguggacaccguguccgucgggaacacccuguacuacgugaacaagcaggagggcaagagccucuacgugaagggggagcccaucaucaacuucuacgacccgcuggucuuccccuccgacgaguucgacgcgagcaucucccaggugaacgagaagaucaaccagagccuggccuucauccgcaaguccgacgagcugcuccacaacgugaacgccggcaagagcacgaccaacaucaugaucaccaccaucaucaucgucaucaucgugauccugcugucccucaucgccguggggcugcugcucuacugcaaggcccggugaggacuagugaagggaacacccaaauuuaauucagccuuaagcacaauuaauuaagagugaaacguaauuguacaagcaguuggucacccaccauagggcaugaucaacaccgcaaccuuuccuuuuucccccagugauucugaaaaaccccucuucccuucagcuugcuuagauguuccaaauuuaguaagcuuaaggcggccuacagaagaaaaagaaaaaaaaggccacaaaaguucccucucacuuucaguaaauaaaauaaaagcagcaacagaaauaaagaaauaaaugaaauucaaaaugaaauaaauauuguguugugcagcauuaaaaaaucaauaaaaauuaaaaaugagcaagaucuaaaaaaaaaaaaaaaaaaaaaaaaaaaaaaaaaaaaaaaaaaaaaaaaaaaaaaaaaaaaaaaaugcaucccccccccccccccccccccccccccccccaaaggcucuuuucagagccaccagaauu

SEQ ID NO: 7445 - RNA, 2136 nt, Artificial Sequence
  mRNA product Design g-3 comprising derived and/or modified sequence from HRSV(A2)__F-del_DSCav1_mut7 (opt1)
gggagaguccgcucagccagguugcagaagcggcuuagcguguguccuaaucuucucucugcguguagguaggccugugccgcaaacaagcuuaccauggagcugcucauccugaaggccaacgccaucaccaccauccugacggcggugaccuucugcuucgccagcggccagaacaucaccgaggaguucuaccaguccacgugcagcgccgucuccaagggguaccucagcgcccugcgcaccggcugguacaccuccgugaucaccaucgagcugagcaacaucaaggagaacaagugcaacgggaccgacgccaaggugaagcucaucaagcaggagcuggacaaguacaagaacgcggucacggagcugcagaugcucaugugcuccacccccgccaccggcagcggguccgccaucgccagcggcguggcggugugcaagguccugcaccuggagggcgaggugaacaagaucaaguccgcccuccugagcaccaacaaggccguggucucccugagcaacgggguguccgugcucacguucaagguccuggaccugaagaacuacaucgacaagcagcuccugccgauccugaacaagcagagcugcuccaucagcaacaucgagaccgugauggaguuccagcagaagaacaaccggcuccuggagaucacccgcgaguucuccgugaacgccggcgucaccacgcccgugagcaccuacaugcugaccaacagcgagcuccugucccugaucaacgacaugcccaucaccaacgaccagaagaagcucaugagcaacaacgugcagaucguccggcagcaguccuacagcaucaugugcaucaucaaggaggaggugcuggccuacgugguccagcugccccucuacggggugaucgacacgccgugcuggaagcugcacaccagcccccugugcaccaccaacacgaaggagggcagcaacaucugccucacccgcaccgaccgggggugguacugcgacaacgcgggcuccgugagcuucuucccccaggccgagaccugcaaggucugcuccaaccgcguguucugcgacacgaugaacagccugacccugcccuccgaggucaaccucugcaacguggacaucuucaacccgaaguacgacugcaagaucaugaccagcaagaccgacguguccagcuccgucaucacgagccugggcgccaucguguccugcuacgggaagaccaagugcaccgccagcaacaagaacaagggcaucaucaagaccuucuccaacgggugcgacuacgugagcaacaagggcgucgacacggugagcgugggcaacacccuguacuacgucaacaagcaggaggggaagucccucuacgugaagggcgagcccaucaucaacuucuacgacccccugguguuccccagcgacgaguucgacgccuccaucagccaggucaacgagaagaucaaccagucccuggcguucauccggaaguccgacgagcuccugcacaacgugaacgccgggaaguccaccaccaacaucaugaucaccacgaucaucaucgugaucaucgucauccugcucagccugaucgccgugggccugcuccuguacugcaaggcccgcugaggacuagugaagggaacacccaaauuuaauucagccuuaagcacaauuaauuaagagugaaacguaauuguacaagcaguuggucacccaccauagggcaugaucaacaccgcaaccuuuccuuuuucccccagugauucugaaaaaccccucuucccuucagcuugcuuagauguuccaaauuuaguaagcuuaaggcggccuacagaagaaaaagaaaaaaaaggccacaaaaguucccucucacuuucaguaaauaaaauaaaagcagcaacagaaauaaagaaauaaaugaaauucaaaaugaaauaaauauuguguugugcagcauuaaaaaaucaauaaaaauuaaaaaugagcaagaucuaaaaaaaaaaaaaaaaaaaaaaaaaaaaaaaaaaaaaaaaaaaaaaaaaaaaaaaaaaaaaaaaugcaucccccccccccccccccccccccccccccccaaaggcucuuuucagagccaccagaauu

SEQ ID NO: 7446 - RNA, 2136 nt, Artificial Sequence
  mRNA product Design g-3 comprising derived and/or modified sequence from HRSV(A2)__F-del_DSCav1_mut7 (opt2)
gggagaguccgcucagccagguugcagaagcggcuuagcguguguccuaaucuucucucugcguguagguaggccugugccgcaaacaagcuuaccauggagcuccucauccucaaggccaacgccaucaccaccauccucaccgccgucaccuucugcuucgccuccggccagaacaucaccgaggaguucuaccaguccaccugcuccgccgucuccaagggcuaccucuccgcccuccgcaccggcugguacaccuccgucaucaccaucgagcucuccaacaucaaggagaacaagugcaacggcaccgacgccaaggucaagcucaucaagcaggagcucgacaaguacaagaacgccgucaccgagcuccagaugcucaugugcuccacccccgccaccggcuccggcuccgccaucgccuccggcgucgccgucugcaagguccuccaccucgagggcgaggucaacaagaucaaguccgcccuccucuccaccaacaaggccgucgucucccucuccaacggcgucuccguccucaccuucaagguccucgaccucaagaacuacaucgacaagcagcuccuccccauccucaacaagcaguccugcuccaucuccaacaucgagaccgucauggaguuccagcagaagaacaaccgccuccucgagaucacccgcgaguucuccgucaacgccggcgucaccacccccgucuccaccuacaugcucaccaacuccgagcuccucucccucaucaacgacaugcccaucaccaacgaccagaagaagcucauguccaacaacguccagaucguccgccagcaguccuacuccaucaugugcaucaucaaggaggagguccucgccuacgucguccagcucccccucuacggcgucaucgacacccccugcuggaagcuccacaccuccccccucugcaccaccaacaccaaggagggcuccaacaucugccucacccgcaccgaccgcggcugguacugcgacaacgccggcuccgucuccuucuucccccaggccgagaccugcaaggucugcuccaaccgcgucuucugcgacaccaugaacucccucacccuccccuccgaggucaaccucugcaacgucgacaucuucaaccccaaguacgacugcaagaucaugaccuccaagaccgacgucuccuccuccgucaucaccucccucggcgccaucgucuccugcuacggcaagaccaagugcaccgccuccaacaagaacaagggcaucaucaagaccuucuccaacggcugcgacuacgucuccaacaagggcgucgacaccgucuccgucggcaacacccucuacuacgucaacaagcaggagggcaagucccucuacgucaagggcgagcccaucaucaacuucuacgacccccucgucuuccccuccgacgaguucgacgccuccaucucccaggucaacgagaagaucaaccagucccucgccuucauccgcaaguccgacgagcuccuccacaacgucaacgccggcaaguccaccaccaacaucaugaucaccaccaucaucaucgucaucaucgucauccuccucucccucaucgccgucggccuccuccucuacugcaaggcccgcugaggacuagugaagggaacacccaaauuuaauucagccuuaagcacaauuaauuaagagugaaacguaauuguacaagcaguuggucacccaccauagggcaugaucaacaccgcaaccuuuccuuuuucccccagugauucugaaaaaccccucuucccuucagcuugcuuagauguuccaaauuuaguaagcuuaaggcggccuacagaagaaaaagaaaaaaaaggccacaaaaguucccucucacuuucaguaaauaaaauaaaagcagcaacagaaauaaagaaauaaaugaaauucaaaaugaaauaaauauuguguugugcagcauuaaaaaaucaauaaaaauuaaaaaugagcaagaucuaaaaaaaaaaaaaaaaaaaaaaaaaaaaaaaaaaaaaaaaaaaaaaaaaaaaaaaaaaaaaaaaugcaucccccccccccccccccccccccccccccccaaaggcucuuuucagagccaccagaauu

SEQ ID NO: 7447 - RNA, 2136 nt, Artificial Sequence
  mRNA product Design g-3 comprising derived and/or modified sequence from HRSV(A2)__F-del_DSCav1_mut7 (opt3)
gggagaguccgcucagccagguugcagaagcggcuuagcguguguccuaaucuucucucugcguguagguaggccugugccgcaaacaagcuuaccauggagcugcucauccuuaaggccaacgcuauuaccacaauacugacugcagugacguucugcuuugccagcggccagaauaucaccgaagaguucuaccaauccacauguucugcggucucaaaaggguauuugagugcuuuaagaacuggaugguacaccagcguuauuacaaucgaacuguccaacauuaaggagaauaaaugcaacgguaccgacgccaaggugaaacuaaucaagcaggaacucgauaaguauaaaaaugcaguaacugagcugcagaugcuuauguguucuacacccgccaccggcucggggucagcuauagcaagcggaguggccgucugcaaggugcugcacuuggagggcgaaguuaacaaaaucaagagugcucuccuguccacgaauaaagccguggucucucugagcaacgguguguccguacucacuuuuaagguuuuagaccugaagaauuacauugauaaacagcuuuugccuauccugaacaagcaaucauguaguauuagcaauaucgagaccgugauggaguuccagcagaaaaacaauaggcuacucgaaauaacacgggaguuuucugucaacgcgggggugacuaccccaguguccacauauaugcugaccaauucagaacuucugagcuugauuaacgacaugccgaucacgaacgaucagaagaaacucaugaguaauaacguccaaauuguucgccagcagucuuacuccaucaugugcaucauuaaggaggaagugcuggcauauguagugcaguuaccccuguacggagucauagacacuccuuguuggaaacuccauacaagcccacuuugcaccacuaauacaaaggagggcucgaacaucugucugacccgaacggaucguggcugguacugcgacaaugccgggucuguguccuucuuuccccaagcugaaaccuguaagguuugcucaaacagaguguucugcgauacaaugaauaguuugacucuaccuagcgaggucaaccuguguaauguggacauuuuuaacccaaaauaugauugcaagaucaugaccuccaaaacagacguaucuagcucaguuauaacuagccucggagccauuguguccuguuacgguaagaccaaaugcacagcaagcaauaagaacaagggcaucaucaaaaccuucucuaaugggugugauuaugucucaaacaagggaguggacacugucagugugggcaauacgcuguacuauguuaacaaacaggaggguaagagccuuuacgugaaaggggaacccauuaucaacuuuuaugacccucugguauucccauccgaugaguuugacgcuucuauuucgcaggucaaugaaaagauaaaccaaaguuuggccuucaucaggaaguccgaugagcuccugcacaaugugaacgcgggaaaaucaacaaccaauauuaugaucacuaccaucauuauaguuaucauugugaucuuacugagucuaauugccgucggccuccugcuuuacugcaaggcacggugaggacuagugaagggaacacccaaauuuaauucagccuuaagcacaauuaauuaagagugaaacguaauuguacaagcaguuggucacccaccauagggcaugaucaacaccgcaaccuuuccuuuuucccccagugauucugaaaaaccccucuucccuucagcuugcuuagauguuccaaauuuaguaagcuuaaggcggccuacagaagaaaaagaaaaaaaaggccacaaaaguucccucucacuuucaguaaauaaaauaaaagcagcaacagaaauaaagaaauaaaugaaauucaaaaugaaauaaauauuguguugugcagcauuaaaaaaucaauaaaaauuaaaaaugagcaagaucuaaaaaaaaaaaaaaaaaaaaaaaaaaaaaaaaaaaaaaaaaaaaaaaaaaaaaaaaaaaaaaaaugcaucccccccccccccccccccccccccccccccaaaggcucuuuucagagccaccagaauu

SEQ ID NO: 7448 - RNA, 2136 nt, Artificial Sequence
  mRNA product Design g-3 comprising derived and/or modified sequence from HRSV(A2)__F-del_DSCav1_mut7 (opt4)
gggagaguccgcucagccagguugcagaagcggcuuagcguguguccuaaucuucucucugcguguagguaggccugugccgcaaacaagcuuaccauggagcugcugauccugaaggccaacgccaucaccaccauccugaccgccgugaccuucugcuucgccagcggccagaacaucaccgaggaguucuaccagagcaccugcagcgccgugagcaagggcuaccugagcgcccugagaaccggcugguacaccagcgugaucaccaucgagcugagcaacaucaaggagaacaagugcaacggcaccgacgccaaggugaagcugaucaagcaggagcuggacaaguacaagaacgccgugaccgagcugcagaugcugaugugcagcacccccgccaccggcagcggcagcgccaucgccagcggcguggccgugugcaaggugcugcaccuggagggcgaggugaacaagaucaagagcgcccugcugagcaccaacaaggccguggugagccugagcaacggcgugagcgugcugaccuucaaggugcuggaccugaagaacuacaucgacaagcagcugcugcccauccugaacaagcagagcugcagcaucagcaacaucgagaccgugauggaguuccagcagaagaacaacagacugcuggagaucaccagagaguucagcgugaacgccggcgugaccacccccgugagcaccuacaugcugaccaacagcgagcugcugagccugaucaacgacaugcccaucaccaacgaccagaagaagcugaugagcaacaacgugcagaucgugagacagcagagcuacagcaucaugugcaucaucaaggaggaggugcuggccuacguggugcagcugccccuguacggcgugaucgacacccccugcuggaagcugcacaccagcccccugugcaccaccaacaccaaggagggcagcaacaucugccugaccagaaccgacagaggcugguacugcgacaacgccggcagcgugagcuucuucccccaggccgagaccugcaaggugugcagcaacagaguguucugcgacaccaugaacagccugacccugcccagcgaggugaaccugugcaacguggacaucuucaaccccaaguacgacugcaagaucaugaccagcaagaccgacgugagcagcagcgugaucaccagccugggcgccaucgugagcugcuacggcaagaccaagugcaccgccagcaacaagaacaagggcaucaucaagaccuucagcaacggcugcgacuacgugagcaacaagggcguggacaccgugagcgugggcaacacccuguacuacgugaacaagcaggagggcaagagccuguacgugaagggcgagcccaucaucaacuucuacgacccccugguguuccccagcgacgaguucgacgccagcaucagccaggugaacgagaagaucaaccagagccuggccuucaucagaaagagcgacgagcugcugcacaacgugaacgccggcaagagcaccaccaacaucaugaucaccaccaucaucaucgugaucaucgugauccugcugagccugaucgccgugggccugcugcuguacugcaaggccagaugaggacuagugaagggaacacccaaauuuaauucagccuuaagcacaauuaauuaagagugaaacguaauuguacaagcaguuggucacccaccauagggcaugaucaacaccgcaaccuuuccuuuuucccccagugauucugaaaaaccccucuucccuucagcuugcuuagauguuccaaauuuaguaagcuuaaggcggccuacagaagaaaaagaaaaaaaaggccacaaaaguucccucucacuuucaguaaauaaaauaaaagcagcaacagaaauaaagaaauaaaugaaauucaaaaugaaauaaauauuguguugugcagcauuaaaaaaucaauaaaaauuaaaaaugagcaagaucuaaaaaaaaaaaaaaaaaaaaaaaaaaaaaaaaaaaaaaaaaaaaaaaaaaaaaaaaaaaaaaaaugcaucccccccccccccccccccccccccccccccaaaggcucuuuucagagccaccagaauu

SEQ ID NO: 7449 - RNA, 2136 nt, Artificial Sequence
  mRNA product Design g-3 comprising derived and/or modified sequence from HRSV(A2)__F-del_DSCav1_mut7 (opt5)
gggagaguccgcucagccagguugcagaagcggcuuagcguguguccuaaucuucucucugcguguagguaggccugugccgcaaacaagcuuaccauggagcugcucauccugaaggccaacgcuauuaccacaauccuuacggccgugaccuucugcuuugcgagcggccagaauauuacagaagaguucuaccaauccaccuguucugcugucagcaaaggguaucuguccgcccucagaacaggaugguacaccucuguuaucacaauugaacugagcaacaucaaggagaauaaaugcaacggcaccgacgccaaggugaaacuuaucaagcaggaacuggauaaguauaaaaaugcugugacggagcuccagaugcugauguguuccacccccgccacagggucuggaagcgcuauugccuccggcgucgcggugugcaagguucugcaccucgagggggaagugaacaaaaucaagagcgcccugcuuucuaccaauaaagcugucgugucccugagcaacggaguuucugugcucacauuuaagguccuggaccuuaagaauuacauugauaaacagcugcucccuauccugaacaagcaauccuguagcauuucuaauaucgagaccgugauggaguuccagcagaaaaacaaucggcugcucgaaauuacgcgcgaguuuuccgugaacgccggcgucacaaccccgguuagcacauauaugcugaccaauuccgaacuucugucucucaucaacgacaugcccaucaccaacgaucagaagaaacugaugagcaauaacgugcaaauugugagacagcaguccuacagcaucaugugcauuaucaaggaggaaguccuugcuuaugugguucagcugccucucuacggcgugauugacacacccuguuggaaacugcauacgucuccucugugcaccacaaauaccaaggagggguccaacaucugucucacacggaccgaucgcggaugguacugcgacaaugccggcagcgucucuuucuuuccccaagcggaaacguguaaggugugcagcaacagaguuuucugcgauacaaugaacucccugacccuuccuucugaggugaaucuguguaaugucgacaucuuuaacccgaaauaugauugcaagauuaugaccagcaaaacagacguguccagcucugucaucaccucccucggggccauugugagcuguuacggaaagacaaaaugcacggcuucuaauaagaacaagggcaucauuaaaaccuucuccaaugggugugauuauguuagcaacaagggaguggacacagucuccgugggcaauacccuguacuauguuaacaaacaggagggcaagucucuuuacgugaaaggggaacccaucaucaacuuuuaugacccucuggucuuccccagcgaugaguuugacgccuccauuucucaggugaaugaaaagaucaaccaaagccucgcuuucauucggaaguccgaugagcugcugcacaaugugaacgccggaaaaagcacaaccaauaucaugauuacgaccaucauuaucguuaucauugucauccuccugucucuuauugccgugggccugcuccuguacugcaaggcucgcugaggacuagugaagggaacacccaaauuuaauucagccuuaagcacaauuaauuaagagugaaacguaauuguacaagcaguuggucacccaccauagggcaugaucaacaccgcaaccuuuccuuuuucccccagugauucugaaaaaccccucuucccuucagcuugcuuagauguuccaaauuuaguaagcuuaaggcggccuacagaagaaaaagaaaaaaaaggccacaaaaguucccucucacuuucaguaaauaaaauaaaagcagcaacagaaauaaagaaauaaaugaaauucaaaaugaaauaaauauuguguugugcagcauuaaaaaaucaauaaaaauuaaaaaugagcaagaucuaaaaaaaaaaaaaaaaaaaaaaaaaaaaaaaaaaaaaaaaaaaaaaaaaaaaaaaaaaaaaaaaugcaucccccccccccccccccccccccccccccccaaaggcucuuuucagagccaccagaauu

SEQ ID NO: 7450 - RNA, 2136 nt, Artificial Sequence
  mRNA product Design g-3 comprising derived and/or modified sequence from HRSV(A2)__F-del_DSCav1_mut7 (opt6)
gggagaguccgcucagccagguugcagaagcggcuuagcguguguccuaaucuucucucugcguguagguaggccugugccgcaaacaagcuuaccauggaauuacuaauccucaaagcaaacgcaauuacaaccauacuaaccgcugucaccuuuuguuuugccucaggacaaaacauaacugaagaauuuuaccaaucaacaugcuccgcaguaucuaaaggauaccucagcgcguuaagaacaggaugguacacaucgguaauaaccaucgaauuauccaacauaaaagaaaauaaaugcaauggaacagacgcaaaagucaaauuaauuaaacaagaacuagacaaauauaaaaacgcaguaaccgaauuacaaaugcuaauguguucaacaccagcaacaggaucaggaucagcuauagcuucaggaguugccguaugcaaagugcuacacuuagaaggagaagugaauaaaauaaaaucagcucuauuaucaacgaacaaagccguaguaucucuaucaaauggcguaucaguacucacauucaaaguacucgaccuaaaaaacuauauagauaaacaacuauuacccauccuaaauaaacaaagcugcucuauaucaaacaucgaaacaguaauggaauuucaacaaaaaaacaacagacuacuagaaauaacccgagaguucucaguuaaugcaggaguaacaacaccagucucaacauacaugcucacaaacucagaacuccuaucacuaauaaaugacaugccaauaacaaacgaccaaaaaaaacucaugucuaacaacguccaaauaguaagacaacaauccuacagcauaauguguauaauaaaagaagaaguuuuagcauacgucguacaacuacccuuauauggcguaauagauacaccaugcuggaaacuccauaccucaccucuauguacaacaaauaccaaagaagguucuaauauaugccuaacacgaacugaccgaggaugguacugugacaacgcaggaucagucucuuucuuuccacaagcagaaaccugcaaaguaugcaguaaccgcguauuuugcgacacaaugaacucccuaaccuuaccaucagaaguaaacuuauguaacguagacauauucaauccaaaauaugacugcaaaauaaugacaucaaaaacagacguaagcucaucaguaauaacuucacuaggcgcaauuguaucaugcuauggaaaaaccaaauguaccgcauccaacaaaaauaaaggaauaauaaaaaccuucucuaacggaugcgacuacguaucaaacaaagguguagauacaguuucuguaggaaacacacucuacuauguaaauaaacaagaaggaaaaucacuauacguaaaaggagaaccaauaauaaacuucuaugacccacuuguauuuccaucugaugaauuugaugcaagcauaucacaaguaaacgaaaaaauaaaccaaucucuagccuuuauacgaaaaagcgacgaauuacuacauaacgucaacgcuggaaaaucaacaacaaacauaaugauaacaacaauaauaauaguaauaauagucauccuauuaucacuaaucgccguaggacuacuccuauacugcaaagcuagauaaggacuagugaagggaacacccaaauuuaauucagccuuaagcacaauuaauuaagagugaaacguaauuguacaagcaguuggucacccaccauagggcaugaucaacaccgcaaccuuuccuuuuucccccagugauucugaaaaaccccucuucccuucagcuugcuuagauguuccaaauuuaguaagcuuaaggcggccuacagaagaaaaagaaaaaaaaggccacaaaaguucccucucacuuucaguaaauaaaauaaaagcagcaacagaaauaaagaaauaaaugaaauucaaaaugaaauaaauauuguguugugcagcauuaaaaaaucaauaaaaauuaaaaaugagcaagaucuaaaaaaaaaaaaaaaaaaaaaaaaaaaaaaaaaaaaaaaaaaaaaaaaaaaaaaaaaaaaaaaaugcaucccccccccccccccccccccccccccccccaaaggcucuuuucagagccaccagaauu

SEQ ID NO: 7451 - RNA, 2136 nt, Artificial Sequence
  mRNA product Design g-3 comprising derived and/or modified sequence from HRSV(A2)__F-del_DSCav1_mut7 (opt11)
gggagaguccgcucagccagguugcagaagcggcuuagcguguguccuaaucuucucucugcguguagguaggccugugccgcaaacaagcuuaccauggaacuccucauccucaaagccaacgccauaaccacuauccucacagcagucacuuucugcuucgccucaggacaaaacauaaccgaagaguucuaccaauccacaugcuccgccgucuccaaaggcuaccucucagcgcuccgcaccggcugguacacauccgucaucaccaucgaacuaagcaacauaaaagaaaacaaaugcaacggcaccgacgccaaaguuaaacucaucaagcaagaacucgacaaauacaaaaacgcagucacagaacuucaaaugcucaugugcuccacacccgccacagguucuggcucagcaaucgcaagcggcgucgccguaugcaaaguccuucaccucgaaggcgaagucaacaaaaucaaauccgcccuccucuccaccaauaaagcugucgucucacucuccaacggcgucagcguccucacauucaaaguccucgaccucaaaaacuacauagacaagcaacuccucccgauacucaacaaacaaagcugcucuaucuccaacaucgaaaccgucauggaguuccaacagaaaaacaaucgucuccucgaaaucacccgcgaguucucaguaaacgccggggucaccacaccagucuccaccuacaugcucaccaacuccgaacuccuuagccucauaaacgacaugcccauaaccaacgaccaaaagaaacucaugagcaacaacguacaaauaguccgacaacaauccuauuccaucauguguaucaucaaagaagaaguccucgcauacguaguccaacucccccuauacggcguaaucgacaccccauguuggaaacuccacaccucaccacucuguaccaccaacaccaaagaaggcucaaacaucugccucacccgcacagaccgcggcugguacugcgacaacgcgggcuccgucagcuucuuuccccaagcggaaaccugcaaagucugcagcaacagagucuucugcgacacuaugaacucccucacccuccccucagaagucaaccucugcaacgucgacaucuucaacccgaaauacgacugcaaaaucaugaccagcaaaacugacgucuccucguccgucaucaccucacucggcgcaaucgugagcugcuacggcaaaaccaaaugcaccgccuccaacaaaaacaaaggcaucauaaaaacauucagcaacggcugcgacuacgucucgaacaaaggagucgacaccguaucagugggcaacacccuauacuacguaaacaagcaagaaggcaaaucacucuacguaaaaggcgaacccaucaucaacuucuacgacccccucgucuuccccuccgacgaguucgacgccuccaucucucaagucaacgagaaaaucaaccaaucccuugccuucauacguaaaagcgacgaacuccuucacaacguaaacgccgggaaauccaccacuaacauaaugaucaccaccaucaucaucguuaucauagucauccuccucucucucauagcagucggccuacuccuguacugcaaagcgcgcuaaggacuagugaagggaacacccaaauuuaauucagccuuaagcacaauuaauuaagagugaaacguaauuguacaagcaguuggucacccaccauagggcaugaucaacaccgcaaccuuuccuuuuucccccagugauucugaaaaaccccucuucccuucagcuugcuuagauguuccaaauuuaguaagcuuaaggcggccuacagaagaaaaagaaaaaaaaggccacaaaaguucccucucacuuucaguaaauaaaauaaaagcagcaacagaaauaaagaaauaaaugaaauucaaaaugaaauaaauauuguguugugcagcauuaaaaaaucaauaaaaauuaaaaaugagcaagaucuaaaaaaaaaaaaaaaaaaaaaaaaaaaaaaaaaaaaaaaaaaaaaaaaaaaaaaaaaaaaaaaaugcaucccccccccccccccccccccccccccccccaaaggcucuuuucagagccaccagaauu

SEQ ID NO: 7452 - RNA, 1931 nt, Artificial Sequence
  mRNA product Design g-4 comprising derived and/or modified sequence from HRSV(A2)__F-del_DSCav1_mut7 (opt1)
gggagacuccugucgggcggaaguaggaggaguagaguuuaaaaacaguacucuuuuuccgguucgggacguaguugaagcaacgacaagccggauaaccgcucuugagacaggaagcuuaccauggagcugcucauccugaaggccaacgccaucaccaccauccugacggcggugaccuucugcuucgccagcggccagaacaucaccgaggaguucuaccaguccacgugcagcgccgucuccaagggguaccucagcgcccugcggaccggcugguacaccuccgugaucaccaucgagcugagcaacaucaaggagaacaagugcaacgggaccgacgccaaggugaagcucaucaagcaggagcuggacaaguacaagaacgcggucacggagcugcagaugcugaugugcuccaccccggcaaccggcuccggcuccgccaucgcgagcggcgucgccgugugcaaggugcugcaccucgagggggaggucaacaagaucaagagcgcccugcuguccaccaacaaggccguggugagccucuccaacggcgucagcgugcugaccuucaaggugcuggaccucaagaacuacaucgacaagcagcugcugcccauccugaacaagcagagcugcuccaucagcaacaucgagacggugauggaguuccagcagaagaacaaccggcuccuggagaucacccgcgaguucagcgugaacgccggggucaccacccccguguccacguacaugcugaccaacagcgagcuccugucccugaucaacgacaugccgaucaccaacgaccagaagaagcucaugagcaacaacgugcagaucguccggcagcaguccuacagcaucaugugcaucaucaaggaggaggugcuggcguacgugguccagcugccccucuacggcgugaucgacacccccugcuggaagcugcacacgagcccccugugcaccaccaacaccaaggagggguccaacaucugccucacgcgcaccgaccggggcugguacugcgacaacgccggcagcgucuccuucuucccgcaggccgagaccugcaaggugugcagcaaccgcguguucugcgacaccaugaacucccugacgcugcccagcgagguaaaccucugcaacgucgacaucuucaaccccaaguacgacugcaagaucaugaccuccaagaccgacgugagcuccagcgugaucaccucccugggggccaucgucagcugcuacggcaagacgaagugcaccgccagcaacaagaacaaggggaucaucaagaccuucuccaacggcugcgacuacgugagcaacaagggcguggacaccguguccgucgggaacacccuguacuacgugaacaagcaggagggcaagagccucuacgugaagggggagcccaucaucaacuucuacgacccgcuggucuuccccuccgacgaguucgacgcgagcaucucccaggugaacgagaagaucaaccagagccuggccuucauccgcaaguccgacgagcugcuccacaacgugaacgccggcaagagcacgaccaacaucaugaucaccaccaucaucaucgucaucaucgugauccugcugucccucaucgccguggggcugcugcucuacugcaaggcccggugaggacuaguaauaaggaaacuguaugaaugucugugggcaggaagugaagagauccuucuguaaagguuuuuggaauuaugucugcugaauaauaaacuuuuuugaaauaauaaaucugguagaaaaaugagaucuaaaaaaaaaaaaaaaaaaaaaaaaaaaaaaaaaaaaaaaaaaaaaaaaaaaaaaaaaaaaaaaaugcaucccccccccccccccccccccccccccccccaaaggcucuuuucagagccaccagaauu

SEQ ID NO: 7453 - RNA, 1931 nt, Artificial Sequence
  mRNA product Design g-4 comprising derived and/or modified sequence from HRSV(A2)__F-del_DSCav1_mut7 (opt1)
gggagacuccugucgggcggaaguaggaggaguagaguuuaaaaacaguacucuuuuuccgguucgggacguaguugaagcaacgacaagccggauaaccgcucuugagacaggaagcuuaccauggagcugcucauccugaaggccaacgccaucaccaccauccugacggcggugaccuucugcuucgccagcggccagaacaucaccgaggaguucuaccaguccacgugcagcgccgucuccaagggguaccucagcgcccugcgcaccggcugguacaccuccgugaucaccaucgagcugagcaacaucaaggagaacaagugcaacgggaccgacgccaaggugaagcucaucaagcaggagcuggacaaguacaagaacgcggucacggagcugcagaugcucaugugcuccacccccgccaccggcagcggguccgccaucgccagcggcguggcggugugcaagguccugcaccuggagggcgaggugaacaagaucaaguccgcccuccugagcaccaacaaggccguggucucccugagcaacgggguguccgugcucacguucaagguccuggaccugaagaacuacaucgacaagcagcuccugccgauccugaacaagcagagcugcuccaucagcaacaucgagaccgugauggaguuccagcagaagaacaaccggcuccuggagaucacccgcgaguucuccgugaacgccggcgucaccacgcccgugagcaccuacaugcugaccaacagcgagcuccugucccugaucaacgacaugcccaucaccaacgaccagaagaagcucaugagcaacaacgugcagaucguccggcagcaguccuacagcaucaugugcaucaucaaggaggaggugcuggccuacgugguccagcugccccucuacggggugaucgacacgccgugcuggaagcugcacaccagcccccugugcaccaccaacacgaaggagggcagcaacaucugccucacccgcaccgaccgggggugguacugcgacaacgcgggcuccgugagcuucuucccccaggccgagaccugcaaggucugcuccaaccgcguguucugcgacacgaugaacagccugacccugcccuccgaggucaaccucugcaacguggacaucuucaacccgaaguacgacugcaagaucaugaccagcaagaccgacguguccagcuccgucaucacgagccugggcgccaucguguccugcuacgggaagaccaagugcaccgccagcaacaagaacaagggcaucaucaagaccuucuccaacgggugcgacuacgugagcaacaagggcgucgacacggugagcgugggcaacacccuguacuacgucaacaagcaggaggggaagucccucuacgugaagggcgagcccaucaucaacuucuacgacccccugguguuccccagcgacgaguucgacgccuccaucagccaggucaacgagaagaucaaccagucccuggcguucauccggaaguccgacgagcuccugcacaacgugaacgccgggaaguccaccaccaacaucaugaucaccacgaucaucaucgugaucaucgucauccugcucagccugaucgccgugggccugcuccuguacugcaaggcccgcugaggacuaguaauaaggaaacuguaugaaugucugugggcaggaagugaagagauccuucuguaaagguuuuuggaauuaugucugcugaauaauaaacuuuuuugaaauaauaaaucugguagaaaaaugagaucuaaaaaaaaaaaaaaaaaaaaaaaaaaaaaaaaaaaaaaaaaaaaaaaaaaaaaaaaaaaaaaaaugcaucccccccccccccccccccccccccccccccaaaggcucuuuucagagccaccagaauu

SEQ ID NO: 7454 - RNA, 1931 nt, Artificial Sequence
  mRNA product Design g-4 comprising derived and/or modified sequence from HRSV(A2)__F-del_DSCav1_mut7 (opt2)
gggagacuccugucgggcggaaguaggaggaguagaguuuaaaaacaguacucuuuuuccgguucgggacguaguugaagcaacgacaagccggauaaccgcucuugagacaggaagcuuaccauggagcuccucauccucaaggccaacgccaucaccaccauccucaccgccgucaccuucugcuucgccuccggccagaacaucaccgaggaguucuaccaguccaccugcuccgccgucuccaagggcuaccucuccgcccuccgcaccggcugguacaccuccgucaucaccaucgagcucuccaacaucaaggagaacaagugcaacggcaccgacgccaaggucaagcucaucaagcaggagcucgacaaguacaagaacgccgucaccgagcuccagaugcucaugugcuccacccccgccaccggcuccggcuccgccaucgccuccggcgucgccgucugcaagguccuccaccucgagggcgaggucaacaagaucaaguccgcccuccucuccaccaacaaggccgucgucucccucuccaacggcgucuccguccucaccuucaagguccucgaccucaagaacuacaucgacaagcagcuccuccccauccucaacaagcaguccugcuccaucuccaacaucgagaccgucauggaguuccagcagaagaacaaccgccuccucgagaucacccgcgaguucuccgucaacgccggcgucaccacccccgucuccaccuacaugcucaccaacuccgagcuccucucccucaucaacgacaugcccaucaccaacgaccagaagaagcucauguccaacaacguccagaucguccgccagcaguccuacuccaucaugugcaucaucaaggaggagguccucgccuacgucguccagcucccccucuacggcgucaucgacacccccugcuggaagcuccacaccuccccccucugcaccaccaacaccaaggagggcuccaacaucugccucacccgcaccgaccgcggcugguacugcgacaacgccggcuccgucuccuucuucccccaggccgagaccugcaaggucugcuccaaccgcgucuucugcgacaccaugaacucccucacccuccccuccgaggucaaccucugcaacgucgacaucuucaaccccaaguacgacugcaagaucaugaccuccaagaccgacgucuccuccuccgucaucaccucccucggcgccaucgucuccugcuacggcaagaccaagugcaccgccuccaacaagaacaagggcaucaucaagaccuucuccaacggcugcgacuacgucuccaacaagggcgucgacaccgucuccgucggcaacacccucuacuacgucaacaagcaggagggcaagucccucuacgucaagggcgagcccaucaucaacuucuacgacccccucgucuuccccuccgacgaguucgacgccuccaucucccaggucaacgagaagaucaaccagucccucgccuucauccgcaaguccgacgagcuccuccacaacgucaacgccggcaaguccaccaccaacaucaugaucaccaccaucaucaucgucaucaucgucauccuccucucccucaucgccgucggccuccuccucuacugcaaggcccgcugaggacuaguaauaaggaaacuguaugaaugucugugggcaggaagugaagagauccuucuguaaagguuuuuggaauuaugucugcugaauaauaaacuuuuuugaaauaauaaaucugguagaaaaaugagaucuaaaaaaaaaaaaaaaaaaaaaaaaaaaaaaaaaaaaaaaaaaaaaaaaaaaaaaaaaaaaaaaaugcaucccccccccccccccccccccccccccccccaaaggcucuuuucagagccaccagaauu

SEQ ID NO: 7455 - RNA, 1931 nt, Artificial Sequence
  mRNA product Design g-4 comprising derived and/or modified sequence from HRSV(A2)__F-del_DSCav1_mut7 (opt3)
gggagacuccugucgggcggaaguaggaggaguagaguuuaaaaacaguacucuuuuuccgguucgggacguaguugaagcaacgacaagccggauaaccgcucuugagacaggaagcuuaccauggagcugcucauccuuaaggccaacgcuauuaccacaauacugacugcagugacguucugcuuugccagcggccagaauaucaccgaagaguucuaccaauccacauguucugcggucucaaaaggguauuugagugcuuuaagaacuggaugguacaccagcguuauuacaaucgaacuguccaacauuaaggagaauaaaugcaacgguaccgacgccaaggugaaacuaaucaagcaggaacucgauaaguauaaaaaugcaguaacugagcugcagaugcuuauguguucuacacccgccaccggcucggggucagcuauagcaagcggaguggccgucugcaaggugcugcacuuggagggcgaaguuaacaaaaucaagagugcucuccuguccacgaauaaagccguggucucucugagcaacgguguguccguacucacuuuuaagguuuuagaccugaagaauuacauugauaaacagcuuuugccuauccugaacaagcaaucauguaguauuagcaauaucgagaccgugauggaguuccagcagaaaaacaauaggcuacucgaaauaacacgggaguuuucugucaacgcgggggugacuaccccaguguccacauauaugcugaccaauucagaacuucugagcuugauuaacgacaugccgaucacgaacgaucagaagaaacucaugaguaauaacguccaaauuguucgccagcagucuuacuccaucaugugcaucauuaaggaggaagugcuggcauauguagugcaguuaccccuguacggagucauagacacuccuuguuggaaacuccauacaagcccacuuugcaccacuaauacaaaggagggcucgaacaucugucugacccgaacggaucguggcugguacugcgacaaugccgggucuguguccuucuuuccccaagcugaaaccuguaagguuugcucaaacagaguguucugcgauacaaugaauaguuugacucuaccuagcgaggucaaccuguguaauguggacauuuuuaacccaaaauaugauugcaagaucaugaccuccaaaacagacguaucuagcucaguuauaacuagccucggagccauuguguccuguuacgguaagaccaaaugcacagcaagcaauaagaacaagggcaucaucaaaaccuucucuaaugggugugauuaugucucaaacaagggaguggacacugucagugugggcaauacgcuguacuauguuaacaaacaggaggguaagagccuuuacgugaaaggggaacccauuaucaacuuuuaugacccucugguauucccauccgaugaguuugacgcuucuauuucgcaggucaaugaaaagauaaaccaaaguuuggccuucaucaggaaguccgaugagcuccugcacaaugugaacgcgggaaaaucaacaaccaauauuaugaucacuaccaucauuauaguuaucauugugaucuuacugagucuaauugccgucggccuccugcuuuacugcaaggcacggugaggacuaguaauaaggaaacuguaugaaugucugugggcaggaagugaagagauccuucuguaaagguuuuuggaauuaugucugcugaauaauaaacuuuuuugaaauaauaaaucugguagaaaaaugagaucuaaaaaaaaaaaaaaaaaaaaaaaaaaaaaaaaaaaaaaaaaaaaaaaaaaaaaaaaaaaaaaaaugcaucccccccccccccccccccccccccccccccaaaggcucuuuucagagccaccagaauu

SEQ ID NO: 7456 - RNA, 1931 nt, Artificial Sequence
  mRNA product Design g-4 comprising derived and/or modified sequence from HRSV(A2)__F-del_DSCav1_mut7 (opt4)
gggagacuccugucgggcggaaguaggaggaguagaguuuaaaaacaguacucuuuuuccgguucgggacguaguugaagcaacgacaagccggauaaccgcucuugagacaggaagcuuaccauggagcugcugauccugaaggccaacgccaucaccaccauccugaccgccgugaccuucugcuucgccagcggccagaacaucaccgaggaguucuaccagagcaccugcagcgccgugagcaagggcuaccugagcgcccugagaaccggcugguacaccagcgugaucaccaucgagcugagcaacaucaaggagaacaagugcaacggcaccgacgccaaggugaagcugaucaagcaggagcuggacaaguacaagaacgccgugaccgagcugcagaugcugaugugcagcacccccgccaccggcagcggcagcgccaucgccagcggcguggccgugugcaaggugcugcaccuggagggcgaggugaacaagaucaagagcgcccugcugagcaccaacaaggccguggugagccugagcaacggcgugagcgugcugaccuucaaggugcuggaccugaagaacuacaucgacaagcagcugcugcccauccugaacaagcagagcugcagcaucagcaacaucgagaccgugauggaguuccagcagaagaacaacagacugcuggagaucaccagagaguucagcgugaacgccggcgugaccacccccgugagcaccuacaugcugaccaacagcgagcugcugagccugaucaacgacaugcccaucaccaacgaccagaagaagcugaugagcaacaacgugcagaucgugagacagcagagcuacagcaucaugugcaucaucaaggaggaggugcuggccuacguggugcagcugccccuguacggcgugaucgacacccccugcuggaagcugcacaccagcccccugugcaccaccaacaccaaggagggcagcaacaucugccugaccagaaccgacagaggcugguacugcgacaacgccggcagcgugagcuucuucccccaggccgagaccugcaaggugugcagcaacagaguguucugcgacaccaugaacagccugacccugcccagcgaggugaaccugugcaacguggacaucuucaaccccaaguacgacugcaagaucaugaccagcaagaccgacgugagcagcagcgugaucaccagccugggcgccaucgugagcugcuacggcaagaccaagugcaccgccagcaacaagaacaagggcaucaucaagaccuucagcaacggcugcgacuacgugagcaacaagggcguggacaccgugagcgugggcaacacccuguacuacgugaacaagcaggagggcaagagccuguacgugaagggcgagcccaucaucaacuucuacgacccccugguguuccccagcgacgaguucgacgccagcaucagccaggugaacgagaagaucaaccagagccuggccuucaucagaaagagcgacgagcugcugcacaacgugaacgccggcaagagcaccaccaacaucaugaucaccaccaucaucaucgugaucaucgugauccugcugagccugaucgccgugggccugcugcuguacugcaaggccagaugaggacuaguaauaaggaaacuguaugaaugucugugggcaggaagugaagagauccuucuguaaagguuuuuggaauuaugucugcugaauaauaaacuuuuuugaaauaauaaaucugguagaaaaaugagaucuaaaaaaaaaaaaaaaaaaaaaaaaaaaaaaaaaaaaaaaaaaaaaaaaaaaaaaaaaaaaaaaaugcaucccccccccccccccccccccccccccccccaaaggcucuuuucagagccaccagaauu

SEQ ID NO: 7457 - RNA, 1931 nt, Artificial Sequence
  mRNA product Design g-4 comprising derived and/or modified sequence from HRSV(A2)__F-del_DSCav1_mut7 (opt5)
gggagacuccugucgggcggaaguaggaggaguagaguuuaaaaacaguacucuuuuuccgguucgggacguaguugaagcaacgacaagccggauaaccgcucuugagacaggaagcuuaccauggagcugcucauccugaaggccaacgcuauuaccacaauccuuacggccgugaccuucugcuuugcgagcggccagaauauuacagaagaguucuaccaauccaccuguucugcugucagcaaaggguaucuguccgcccucagaacaggaugguacaccucuguuaucacaauugaacugagcaacaucaaggagaauaaaugcaacggcaccgacgccaaggugaaacuuaucaagcaggaacuggauaaguauaaaaaugcugugacggagcuccagaugcugauguguuccacccccgccacagggucuggaagcgcuauugccuccggcgucgcggugugcaagguucugcaccucgagggggaagugaacaaaaucaagagcgcccugcuuucuaccaauaaagcugucgugucccugagcaacggaguuucugugcucacauuuaagguccuggaccuuaagaauuacauugauaaacagcugcucccuauccugaacaagcaauccuguagcauuucuaauaucgagaccgugauggaguuccagcagaaaaacaaucggcugcucgaaauuacgcgcgaguuuuccgugaacgccggcgucacaaccccgguuagcacauauaugcugaccaauuccgaacuucugucucucaucaacgacaugcccaucaccaacgaucagaagaaacugaugagcaauaacgugcaaauugugagacagcaguccuacagcaucaugugcauuaucaaggaggaaguccuugcuuaugugguucagcugccucucuacggcgugauugacacacccuguuggaaacugcauacgucuccucugugcaccacaaauaccaaggagggguccaacaucugucucacacggaccgaucgcggaugguacugcgacaaugccggcagcgucucuuucuuuccccaagcggaaacguguaaggugugcagcaacagaguuuucugcgauacaaugaacucccugacccuuccuucugaggugaaucuguguaaugucgacaucuuuaacccgaaauaugauugcaagauuaugaccagcaaaacagacguguccagcucugucaucaccucccucggggccauugugagcuguuacggaaagacaaaaugcacggcuucuaauaagaacaagggcaucauuaaaaccuucuccaaugggugugauuauguuagcaacaagggaguggacacagucuccgugggcaauacccuguacuauguuaacaaacaggagggcaagucucuuuacgugaaaggggaacccaucaucaacuuuuaugacccucuggucuuccccagcgaugaguuugacgccuccauuucucaggugaaugaaaagaucaaccaaagccucgcuuucauucggaaguccgaugagcugcugcacaaugugaacgccggaaaaagcacaaccaauaucaugauuacgaccaucauuaucguuaucauugucauccuccugucucuuauugccgugggccugcuccuguacugcaaggcucgcugaggacuaguaauaaggaaacuguaugaaugucugugggcaggaagugaagagauccuucuguaaagguuuuuggaauuaugucugcugaauaauaaacuuuuuugaaauaauaaaucugguagaaaaaugagaucuaaaaaaaaaaaaaaaaaaaaaaaaaaaaaaaaaaaaaaaaaaaaaaaaaaaaaaaaaaaaaaaaugcaucccccccccccccccccccccccccccccccaaaggcucuuuucagagccaccagaauu

SEQ ID NO: 7458 - RNA, 1931 nt, Artificial Sequence
  mRNA product Design g-4 comprising derived and/or modified sequence from HRSV(A2)__F-del_DSCav1_mut7 (opt6)
gggagacuccugucgggcggaaguaggaggaguagaguuuaaaaacaguacucuuuuuccgguucgggacguaguugaagcaacgacaagccggauaaccgcucuugagacaggaagcuuaccauggaauuacuaauccucaaagcaaacgcaauuacaaccauacuaaccgcugucaccuuuuguuuugccucaggacaaaacauaacugaagaauuuuaccaaucaacaugcuccgcaguaucuaaaggauaccucagcgcguuaagaacaggaugguacacaucgguaauaaccaucgaauuauccaacauaaaagaaaauaaaugcaauggaacagacgcaaaagucaaauuaauuaaacaagaacuagacaaauauaaaaacgcaguaaccgaauuacaaaugcuaauguguucaacaccagcaacaggaucaggaucagcuauagcuucaggaguugccguaugcaaagugcuacacuuagaaggagaagugaauaaaauaaaaucagcucuauuaucaacgaacaaagccguaguaucucuaucaaauggcguaucaguacucacauucaaaguacucgaccuaaaaaacuauauagauaaacaacuauuacccauccuaaauaaacaaagcugcucuauaucaaacaucgaaacaguaauggaauuucaacaaaaaaacaacagacuacuagaaauaacccgagaguucucaguuaaugcaggaguaacaacaccagucucaacauacaugcucacaaacucagaacuccuaucacuaauaaaugacaugccaauaacaaacgaccaaaaaaaacucaugucuaacaacguccaaauaguaagacaacaauccuacagcauaauguguauaauaaaagaagaaguuuuagcauacgucguacaacuacccuuauauggcguaauagauacaccaugcuggaaacuccauaccucaccucuauguacaacaaauaccaaagaagguucuaauauaugccuaacacgaacugaccgaggaugguacugugacaacgcaggaucagucucuuucuuuccacaagcagaaaccugcaaaguaugcaguaaccgcguauuuugcgacacaaugaacucccuaaccuuaccaucagaaguaaacuuauguaacguagacauauucaauccaaaauaugacugcaaaauaaugacaucaaaaacagacguaagcucaucaguaauaacuucacuaggcgcaauuguaucaugcuauggaaaaaccaaauguaccgcauccaacaaaaauaaaggaauaauaaaaaccuucucuaacggaugcgacuacguaucaaacaaagguguagauacaguuucuguaggaaacacacucuacuauguaaauaaacaagaaggaaaaucacuauacguaaaaggagaaccaauaauaaacuucuaugacccacuuguauuuccaucugaugaauuugaugcaagcauaucacaaguaaacgaaaaaauaaaccaaucucuagccuuuauacgaaaaagcgacgaauuacuacauaacgucaacgcuggaaaaucaacaacaaacauaaugauaacaacaauaauaauaguaauaauagucauccuauuaucacuaaucgccguaggacuacuccuauacugcaaagcuagauaaggacuaguaauaaggaaacuguaugaaugucugugggcaggaagugaagagauccuucuguaaagguuuuuggaauuaugucugcugaauaauaaacuuuuuugaaauaauaaaucugguagaaaaaugagaucuaaaaaaaaaaaaaaaaaaaaaaaaaaaaaaaaaaaaaaaaaaaaaaaaaaaaaaaaaaaaaaaaugcaucccccccccccccccccccccccccccccccaaaggcucuuuucagagccaccagaauu

SEQ ID NO: 7459 - RNA, 1931 nt, Artificial Sequence
  mRNA product Design g-4 comprising derived and/or modified sequence from HRSV(A2)__F-del_DSCav1_mut7 (opt11)
gggagacuccugucgggcggaaguaggaggaguagaguuuaaaaacaguacucuuuuuccgguucgggacguaguugaagcaacgacaagccggauaaccgcucuugagacaggaagcuuaccauggaacuccucauccucaaagccaacgccauaaccacuauccucacagcagucacuuucugcuucgccucaggacaaaacauaaccgaagaguucuaccaauccacaugcuccgccgucuccaaaggcuaccucucagcgcuccgcaccggcugguacacauccgucaucaccaucgaacuaagcaacauaaaagaaaacaaaugcaacggcaccgacgccaaaguuaaacucaucaagcaagaacucgacaaauacaaaaacgcagucacagaacuucaaaugcucaugugcuccacacccgccacagguucuggcucagcaaucgcaagcggcgucgccguaugcaaaguccuucaccucgaaggcgaagucaacaaaaucaaauccgcccuccucuccaccaauaaagcugucgucucacucuccaacggcgucagcguccucacauucaaaguccucgaccucaaaaacuacauagacaagcaacuccucccgauacucaacaaacaaagcugcucuaucuccaacaucgaaaccgucauggaguuccaacagaaaaacaaucgucuccucgaaaucacccgcgaguucucaguaaacgccggggucaccacaccagucuccaccuacaugcucaccaacuccgaacuccuuagccucauaaacgacaugcccauaaccaacgaccaaaagaaacucaugagcaacaacguacaaauaguccgacaacaauccuauuccaucauguguaucaucaaagaagaaguccucgcauacguaguccaacucccccuauacggcguaaucgacaccccauguuggaaacuccacaccucaccacucuguaccaccaacaccaaagaaggcucaaacaucugccucacccgcacagaccgcggcugguacugcgacaacgcgggcuccgucagcuucuuuccccaagcggaaaccugcaaagucugcagcaacagagucuucugcgacacuaugaacucccucacccuccccucagaagucaaccucugcaacgucgacaucuucaacccgaaauacgacugcaaaaucaugaccagcaaaacugacgucuccucguccgucaucaccucacucggcgcaaucgugagcugcuacggcaaaaccaaaugcaccgccuccaacaaaaacaaaggcaucauaaaaacauucagcaacggcugcgacuacgucucgaacaaaggagucgacaccguaucagugggcaacacccuauacuacguaaacaagcaagaaggcaaaucacucuacguaaaaggcgaacccaucaucaacuucuacgacccccucgucuuccccuccgacgaguucgacgccuccaucucucaagucaacgagaaaaucaaccaaucccuugccuucauacguaaaagcgacgaacuccuucacaacguaaacgccgggaaauccaccacuaacauaaugaucaccaccaucaucaucguuaucauagucauccuccucucucucauagcagucggccuacuccuguacugcaaagcgcgcuaaggacuaguaauaaggaaacuguaugaaugucugugggcaggaagugaagagauccuucuguaaagguuuuuggaauuaugucugcugaauaauaaacuuuuuugaaauaauaaaucugguagaaaaaugagaucuaaaaaaaaaaaaaaaaaaaaaaaaaaaaaaaaaaaaaaaaaaaaaaaaaaaaaaaaaaaaaaaaugcaucccccccccccccccccccccccccccccccaaaggcucuuuucagagccaccagaauu

SEQ ID NO: 7460 - RNA, 1907 nt, Artificial Sequence
  mRNA product Design g-5 comprising derived and/or modified sequence from HRSV(A2)__F-del_DSCav1_mut7 (opt1)
gggagacccgugacccggaaguuguacggcuacgcgacuuucccucccacaaacccucgcgcccuuccuuuccuacuugggcccggcagaaagcuuaccauggagcugcucauccugaaggccaacgccaucaccaccauccugacggcggugaccuucugcuucgccagcggccagaacaucaccgaggaguucuaccaguccacgugcagcgccgucuccaagggguaccucagcgcccugcggaccggcugguacaccuccgugaucaccaucgagcugagcaacaucaaggagaacaagugcaacgggaccgacgccaaggugaagcucaucaagcaggagcuggacaaguacaagaacgcggucacggagcugcagaugcugaugugcuccaccccggcaaccggcuccggcuccgccaucgcgagcggcgucgccgugugcaaggugcugcaccucgagggggaggucaacaagaucaagagcgcccugcuguccaccaacaaggccguggugagccucuccaacggcgucagcgugcugaccuucaaggugcuggaccucaagaacuacaucgacaagcagcugcugcccauccugaacaagcagagcugcuccaucagcaacaucgagacggugauggaguuccagcagaagaacaaccggcuccuggagaucacccgcgaguucagcgugaacgccggggucaccacccccguguccacguacaugcugaccaacagcgagcuccugucccugaucaacgacaugccgaucaccaacgaccagaagaagcucaugagcaacaacgugcagaucguccggcagcaguccuacagcaucaugugcaucaucaaggaggaggugcuggcguacgugguccagcugccccucuacggcgugaucgacacccccugcuggaagcugcacacgagcccccugugcaccaccaacaccaaggagggguccaacaucugccucacgcgcaccgaccggggcugguacugcgacaacgccggcagcgucuccuucuucccgcaggccgagaccugcaaggugugcagcaaccgcguguucugcgacaccaugaacucccugacgcugcccagcgagguaaaccucugcaacgucgacaucuucaaccccaaguacgacugcaagaucaugaccuccaagaccgacgugagcuccagcgugaucaccucccugggggccaucgucagcugcuacggcaagacgaagugcaccgccagcaacaagaacaaggggaucaucaagaccuucuccaacggcugcgacuacgugagcaacaagggcguggacaccguguccgucgggaacacccuguacuacgugaacaagcaggagggcaagagccucuacgugaagggggagcccaucaucaacuucuacgacccgcuggucuuccccuccgacgaguucgacgcgagcaucucccaggugaacgagaagaucaaccagagccuggccuucauccgcaaguccgacgagcugcuccacaacgugaacgccggcaagagcacgaccaacaucaugaucaccaccaucaucaucgucaucaucgugauccugcugucccucaucgccguggggcugcugcucuacugcaaggcccggugaggacuaguaauaaggaaacuguaugaaugucugugggcaggaagugaagagauccuucuguaaagguuuuuggaauuaugucugcugaauaauaaacuuuuuugaaauaauaaaucugguagaaaaaugagaucuaaaaaaaaaaaaaaaaaaaaaaaaaaaaaaaaaaaaaaaaaaaaaaaaaaaaaaaaaaaaaaaaugcaucccccccccccccccccccccccccccccccaaaggcucuuuucagagccaccagaauu

SEQ ID NO: 7461 - RNA, 1907 nt, Artificial Sequence
  mRNA product Design g-5 comprising derived and/or modified sequence from HRSV(A2)__F-del_DSCav1_mut7 (opt1)
gggagacccgugacccggaaguuguacggcuacgcgacuuucccucccacaaacccucgcgcccuuccuuuccuacuugggcccggcagaaagcuuaccauggagcugcucauccugaaggccaacgccaucaccaccauccugacggcggugaccuucugcuucgccagcggccagaacaucaccgaggaguucuaccaguccacgugcagcgccgucuccaagggguaccucagcgcccugcgcaccggcugguacaccuccgugaucaccaucgagcugagcaacaucaaggagaacaagugcaacgggaccgacgccaaggugaagcucaucaagcaggagcuggacaaguacaagaacgcggucacggagcugcagaugcucaugugcuccacccccgccaccggcagcggguccgccaucgccagcggcguggcggugugcaagguccugcaccuggagggcgaggugaacaagaucaaguccgcccuccugagcaccaacaaggccguggucucccugagcaacgggguguccgugcucacguucaagguccuggaccugaagaacuacaucgacaagcagcuccugccgauccugaacaagcagagcugcuccaucagcaacaucgagaccgugauggaguuccagcagaagaacaaccggcuccuggagaucacccgcgaguucuccgugaacgccggcgucaccacgcccgugagcaccuacaugcugaccaacagcgagcuccugucccugaucaacgacaugcccaucaccaacgaccagaagaagcucaugagcaacaacgugcagaucguccggcagcaguccuacagcaucaugugcaucaucaaggaggaggugcuggccuacgugguccagcugccccucuacggggugaucgacacgccgugcuggaagcugcacaccagcccccugugcaccaccaacacgaaggagggcagcaacaucugccucacccgcaccgaccgggggugguacugcgacaacgcgggcuccgugagcuucuucccccaggccgagaccugcaaggucugcuccaaccgcguguucugcgacacgaugaacagccugacccugcccuccgaggucaaccucugcaacguggacaucuucaacccgaaguacgacugcaagaucaugaccagcaagaccgacguguccagcuccgucaucacgagccugggcgccaucguguccugcuacgggaagaccaagugcaccgccagcaacaagaacaagggcaucaucaagaccuucuccaacgggugcgacuacgugagcaacaagggcgucgacacggugagcgugggcaacacccuguacuacgucaacaagcaggaggggaagucccucuacgugaagggcgagcccaucaucaacuucuacgacccccugguguuccccagcgacgaguucgacgccuccaucagccaggucaacgagaagaucaaccagucccuggcguucauccggaaguccgacgagcuccugcacaacgugaacgccgggaaguccaccaccaacaucaugaucaccacgaucaucaucgugaucaucgucauccugcucagccugaucgccgugggccugcuccuguacugcaaggcccgcugaggacuaguaauaaggaaacuguaugaaugucugugggcaggaagugaagagauccuucuguaaagguuuuuggaauuaugucugcugaauaauaaacuuuuuugaaauaauaaaucugguagaaaaaugagaucuaaaaaaaaaaaaaaaaaaaaaaaaaaaaaaaaaaaaaaaaaaaaaaaaaaaaaaaaaaaaaaaaugcaucccccccccccccccccccccccccccccccaaaggcucuuuucagagccaccagaauu

SEQ ID NO: 7462 - RNA, 1907 nt, Artificial Sequence
  mRNA product Design g-5 comprising derived and/or modified sequence from HRSV(A2)__F-del_DSCav1_mut7 (opt2)
gggagacccgugacccggaaguuguacggcuacgcgacuuucccucccacaaacccucgcgcccuuccuuuccuacuugggcccggcagaaagcuuaccauggagcuccucauccucaaggccaacgccaucaccaccauccucaccgccgucaccuucugcuucgccuccggccagaacaucaccgaggaguucuaccaguccaccugcuccgccgucuccaagggcuaccucuccgcccuccgcaccggcugguacaccuccgucaucaccaucgagcucuccaacaucaaggagaacaagugcaacggcaccgacgccaaggucaagcucaucaagcaggagcucgacaaguacaagaacgccgucaccgagcuccagaugcucaugugcuccacccccgccaccggcuccggcuccgccaucgccuccggcgucgccgucugcaagguccuccaccucgagggcgaggucaacaagaucaaguccgcccuccucuccaccaacaaggccgucgucucccucuccaacggcgucuccguccucaccuucaagguccucgaccucaagaacuacaucgacaagcagcuccuccccauccucaacaagcaguccugcuccaucuccaacaucgagaccgucauggaguuccagcagaagaacaaccgccuccucgagaucacccgcgaguucuccgucaacgccggcgucaccacccccgucuccaccuacaugcucaccaacuccgagcuccucucccucaucaacgacaugcccaucaccaacgaccagaagaagcucauguccaacaacguccagaucguccgccagcaguccuacuccaucaugugcaucaucaaggaggagguccucgccuacgucguccagcucccccucuacggcgucaucgacacccccugcuggaagcuccacaccuccccccucugcaccaccaacaccaaggagggcuccaacaucugccucacccgcaccgaccgcggcugguacugcgacaacgccggcuccgucuccuucuucccccaggccgagaccugcaaggucugcuccaaccgcgucuucugcgacaccaugaacucccucacccuccccuccgaggucaaccucugcaacgucgacaucuucaaccccaaguacgacugcaagaucaugaccuccaagaccgacgucuccuccuccgucaucaccucccucggcgccaucgucuccugcuacggcaagaccaagugcaccgccuccaacaagaacaagggcaucaucaagaccuucuccaacggcugcgacuacgucuccaacaagggcgucgacaccgucuccgucggcaacacccucuacuacgucaacaagcaggagggcaagucccucuacgucaagggcgagcccaucaucaacuucuacgacccccucgucuuccccuccgacgaguucgacgccuccaucucccaggucaacgagaagaucaaccagucccucgccuucauccgcaaguccgacgagcuccuccacaacgucaacgccggcaaguccaccaccaacaucaugaucaccaccaucaucaucgucaucaucgucauccuccucucccucaucgccgucggccuccuccucuacugcaaggcccgcugaggacuaguaauaaggaaacuguaugaaugucugugggcaggaagugaagagauccuucuguaaagguuuuuggaauuaugucugcugaauaauaaacuuuuuugaaauaauaaaucugguagaaaaaugagaucuaaaaaaaaaaaaaaaaaaaaaaaaaaaaaaaaaaaaaaaaaaaaaaaaaaaaaaaaaaaaaaaaugcaucccccccccccccccccccccccccccccccaaaggcucuuuucagagccaccagaauu

SEQ ID NO: 7463 - RNA, 1907 nt, Artificial Sequence
  mRNA product Design g-5 comprising derived and/or modified sequence from HRSV(A2)__F-del_DSCav1_mut7 (opt3)
gggagacccgugacccggaaguuguacggcuacgcgacuuucccucccacaaacccucgcgcccuuccuuuccuacuugggcccggcagaaagcuuaccauggagcugcucauccuuaaggccaacgcuauuaccacaauacugacugcagugacguucugcuuugccagcggccagaauaucaccgaagaguucuaccaauccacauguucugcggucucaaaaggguauuugagugcuuuaagaacuggaugguacaccagcguuauuacaaucgaacuguccaacauuaaggagaauaaaugcaacgguaccgacgccaaggugaaacuaaucaagcaggaacucgauaaguauaaaaaugcaguaacugagcugcagaugcuuauguguucuacacccgccaccggcucggggucagcuauagcaagcggaguggccgucugcaaggugcugcacuuggagggcgaaguuaacaaaaucaagagugcucuccuguccacgaauaaagccguggucucucugagcaacgguguguccguacucacuuuuaagguuuuagaccugaagaauuacauugauaaacagcuuuugccuauccugaacaagcaaucauguaguauuagcaauaucgagaccgugauggaguuccagcagaaaaacaauaggcuacucgaaauaacacgggaguuuucugucaacgcgggggugacuaccccaguguccacauauaugcugaccaauucagaacuucugagcuugauuaacgacaugccgaucacgaacgaucagaagaaacucaugaguaauaacguccaaauuguucgccagcagucuuacuccaucaugugcaucauuaaggaggaagugcuggcauauguagugcaguuaccccuguacggagucauagacacuccuuguuggaaacuccauacaagcccacuuugcaccacuaauacaaaggagggcucgaacaucugucugacccgaacggaucguggcugguacugcgacaaugccgggucuguguccuucuuuccccaagcugaaaccuguaagguuugcucaaacagaguguucugcgauacaaugaauaguuugacucuaccuagcgaggucaaccuguguaauguggacauuuuuaacccaaaauaugauugcaagaucaugaccuccaaaacagacguaucuagcucaguuauaacuagccucggagccauuguguccuguuacgguaagaccaaaugcacagcaagcaauaagaacaagggcaucaucaaaaccuucucuaaugggugugauuaugucucaaacaagggaguggacacugucagugugggcaauacgcuguacuauguuaacaaacaggaggguaagagccuuuacgugaaaggggaacccauuaucaacuuuuaugacccucugguauucccauccgaugaguuugacgcuucuauuucgcaggucaaugaaaagauaaaccaaaguuuggccuucaucaggaaguccgaugagcuccugcacaaugugaacgcgggaaaaucaacaaccaauauuaugaucacuaccaucauuauaguuaucauugugaucuuacugagucuaauugccgucggccuccugcuuuacugcaaggcacggugaggacuaguaauaaggaaacuguaugaaugucugugggcaggaagugaagagauccuucuguaaagguuuuuggaauuaugucugcugaauaauaaacuuuuuugaaauaauaaaucugguagaaaaaugagaucuaaaaaaaaaaaaaaaaaaaaaaaaaaaaaaaaaaaaaaaaaaaaaaaaaaaaaaaaaaaaaaaaugcaucccccccccccccccccccccccccccccccaaaggcucuuuucagagccaccagaauu

SEQ ID NO: 7464 - RNA, 1907 nt, Artificial Sequence
  mRNA product Design g-5 comprising derived and/or modified sequence from HRSV(A2)__F-del_DSCav1_mut7 (opt4)
gggagacccgugacccggaaguuguacggcuacgcgacuuucccucccacaaacccucgcgcccuuccuuuccuacuugggcccggcagaaagcuuaccauggagcugcugauccugaaggccaacgccaucaccaccauccugaccgccgugaccuucugcuucgccagcggccagaacaucaccgaggaguucuaccagagcaccugcagcgccgugagcaagggcuaccugagcgcccugagaaccggcugguacaccagcgugaucaccaucgagcugagcaacaucaaggagaacaagugcaacggcaccgacgccaaggugaagcugaucaagcaggagcuggacaaguacaagaacgccgugaccgagcugcagaugcugaugugcagcacccccgccaccggcagcggcagcgccaucgccagcggcguggccgugugcaaggugcugcaccuggagggcgaggugaacaagaucaagagcgcccugcugagcaccaacaaggccguggugagccugagcaacggcgugagcgugcugaccuucaaggugcuggaccugaagaacuacaucgacaagcagcugcugcccauccugaacaagcagagcugcagcaucagcaacaucgagaccgugauggaguuccagcagaagaacaacagacugcuggagaucaccagagaguucagcgugaacgccggcgugaccacccccgugagcaccuacaugcugaccaacagcgagcugcugagccugaucaacgacaugcccaucaccaacgaccagaagaagcugaugagcaacaacgugcagaucgugagacagcagagcuacagcaucaugugcaucaucaaggaggaggugcuggccuacguggugcagcugccccuguacggcgugaucgacacccccugcuggaagcugcacaccagcccccugugcaccaccaacaccaaggagggcagcaacaucugccugaccagaaccgacagaggcugguacugcgacaacgccggcagcgugagcuucuucccccaggccgagaccugcaaggugugcagcaacagaguguucugcgacaccaugaacagccugacccugcccagcgaggugaaccugugcaacguggacaucuucaaccccaaguacgacugcaagaucaugaccagcaagaccgacgugagcagcagcgugaucaccagccugggcgccaucgugagcugcuacggcaagaccaagugcaccgccagcaacaagaacaagggcaucaucaagaccuucagcaacggcugcgacuacgugagcaacaagggcguggacaccgugagcgugggcaacacccuguacuacgugaacaagcaggagggcaagagccuguacgugaagggcgagcccaucaucaacuucuacgacccccugguguuccccagcgacgaguucgacgccagcaucagccaggugaacgagaagaucaaccagagccuggccuucaucagaaagagcgacgagcugcugcacaacgugaacgccggcaagagcaccaccaacaucaugaucaccaccaucaucaucgugaucaucgugauccugcugagccugaucgccgugggccugcugcuguacugcaaggccagaugaggacuaguaauaaggaaacuguaugaaugucugugggcaggaagugaagagauccuucuguaaagguuuuuggaauuaugucugcugaauaauaaacuuuuuugaaauaauaaaucugguagaaaaaugagaucuaaaaaaaaaaaaaaaaaaaaaaaaaaaaaaaaaaaaaaaaaaaaaaaaaaaaaaaaaaaaaaaaugcaucccccccccccccccccccccccccccccccaaaggcucuuuucagagccaccagaauu

SEQ ID NO: 7465 - RNA, 1907 nt, Artificial Sequence
  mRNA product Design g-5 comprising derived and/or modified sequence from HRSV(A2)__F-del_DSCav1_mut7 (opt5)
gggagacccgugacccggaaguuguacggcuacgcgacuuucccucccacaaacccucgcgcccuuccuuuccuacuugggcccggcagaaagcuuaccauggagcugcucauccugaaggccaacgcuauuaccacaauccuuacggccgugaccuucugcuuugcgagcggccagaauauuacagaagaguucuaccaauccaccuguucugcugucagcaaaggguaucuguccgcccucagaacaggaugguacaccucuguuaucacaauugaacugagcaacaucaaggagaauaaaugcaacggcaccgacgccaaggugaaacuuaucaagcaggaacuggauaaguauaaaaaugcugugacggagcuccagaugcugauguguuccacccccgccacagggucuggaagcgcuauugccuccggcgucgcggugugcaagguucugcaccucgagggggaagugaacaaaaucaagagcgcccugcuuucuaccaauaaagcugucgugucccugagcaacggaguuucugugcucacauuuaagguccuggaccuuaagaauuacauugauaaacagcugcucccuauccugaacaagcaauccuguagcauuucuaauaucgagaccgugauggaguuccagcagaaaaacaaucggcugcucgaaauuacgcgcgaguuuuccgugaacgccggcgucacaaccccgguuagcacauauaugcugaccaauuccgaacuucugucucucaucaacgacaugcccaucaccaacgaucagaagaaacugaugagcaauaacgugcaaauugugagacagcaguccuacagcaucaugugcauuaucaaggaggaaguccuugcuuaugugguucagcugccucucuacggcgugauugacacacccuguuggaaacugcauacgucuccucugugcaccacaaauaccaaggagggguccaacaucugucucacacggaccgaucgcggaugguacugcgacaaugccggcagcgucucuuucuuuccccaagcggaaacguguaaggugugcagcaacagaguuuucugcgauacaaugaacucccugacccuuccuucugaggugaaucuguguaaugucgacaucuuuaacccgaaauaugauugcaagauuaugaccagcaaaacagacguguccagcucugucaucaccucccucggggccauugugagcuguuacggaaagacaaaaugcacggcuucuaauaagaacaagggcaucauuaaaaccuucuccaaugggugugauuauguuagcaacaagggaguggacacagucuccgugggcaauacccuguacuauguuaacaaacaggagggcaagucucuuuacgugaaaggggaacccaucaucaacuuuuaugacccucuggucuuccccagcgaugaguuugacgccuccauuucucaggugaaugaaaagaucaaccaaagccucgcuuucauucggaaguccgaugagcugcugcacaaugugaacgccggaaaaagcacaaccaauaucaugauuacgaccaucauuaucguuaucauugucauccuccugucucuuauugccgugggccugcuccuguacugcaaggcucgcugaggacuaguaauaaggaaacuguaugaaugucugugggcaggaagugaagagauccuucuguaaagguuuuuggaauuaugucugcugaauaauaaacuuuuuugaaauaauaaaucugguagaaaaaugagaucuaaaaaaaaaaaaaaaaaaaaaaaaaaaaaaaaaaaaaaaaaaaaaaaaaaaaaaaaaaaaaaaaugcaucccccccccccccccccccccccccccccccaaaggcucuuuucagagccaccagaauu

SEQ ID NO: 7466 - RNA, 1907 nt, Artificial Sequence
  mRNA product Design g-5 comprising derived and/or modified sequence from HRSV(A2)__F-del_DSCav1_mut7 (opt6)
gggagacccgugacccggaaguuguacggcuacgcgacuuucccucccacaaacccucgcgcccuuccuuuccuacuugggcccggcagaaagcuuaccauggaauuacuaauccucaaagcaaacgcaauuacaaccauacuaaccgcugucaccuuuuguuuugccucaggacaaaacauaacugaagaauuuuaccaaucaacaugcuccgcaguaucuaaaggauaccucagcgcguuaagaacaggaugguacacaucgguaauaaccaucgaauuauccaacauaaaagaaaauaaaugcaauggaacagacgcaaaagucaaauuaauuaaacaagaacuagacaaauauaaaaacgcaguaaccgaauuacaaaugcuaauguguucaacaccagcaacaggaucaggaucagcuauagcuucaggaguugccguaugcaaagugcuacacuuagaaggagaagugaauaaaauaaaaucagcucuauuaucaacgaacaaagccguaguaucucuaucaaauggcguaucaguacucacauucaaaguacucgaccuaaaaaacuauauagauaaacaacuauuacccauccuaaauaaacaaagcugcucuauaucaaacaucgaaacaguaauggaauuucaacaaaaaaacaacagacuacuagaaauaacccgagaguucucaguuaaugcaggaguaacaacaccagucucaacauacaugcucacaaacucagaacuccuaucacuaauaaaugacaugccaauaacaaacgaccaaaaaaaacucaugucuaacaacguccaaauaguaagacaacaauccuacagcauaauguguauaauaaaagaagaaguuuuagcauacgucguacaacuacccuuauauggcguaauagauacaccaugcuggaaacuccauaccucaccucuauguacaacaaauaccaaagaagguucuaauauaugccuaacacgaacugaccgaggaugguacugugacaacgcaggaucagucucuuucuuuccacaagcagaaaccugcaaaguaugcaguaaccgcguauuuugcgacacaaugaacucccuaaccuuaccaucagaaguaaacuuauguaacguagacauauucaauccaaaauaugacugcaaaauaaugacaucaaaaacagacguaagcucaucaguaauaacuucacuaggcgcaauuguaucaugcuauggaaaaaccaaauguaccgcauccaacaaaaauaaaggaauaauaaaaaccuucucuaacggaugcgacuacguaucaaacaaagguguagauacaguuucuguaggaaacacacucuacuauguaaauaaacaagaaggaaaaucacuauacguaaaaggagaaccaauaauaaacuucuaugacccacuuguauuuccaucugaugaauuugaugcaagcauaucacaaguaaacgaaaaaauaaaccaaucucuagccuuuauacgaaaaagcgacgaauuacuacauaacgucaacgcuggaaaaucaacaacaaacauaaugauaacaacaauaauaauaguaauaauagucauccuauuaucacuaaucgccguaggacuacuccuauacugcaaagcuagauaaggacuaguaauaaggaaacuguaugaaugucugugggcaggaagugaagagauccuucuguaaagguuuuuggaauuaugucugcugaauaauaaacuuuuuugaaauaauaaaucugguagaaaaaugagaucuaaaaaaaaaaaaaaaaaaaaaaaaaaaaaaaaaaaaaaaaaaaaaaaaaaaaaaaaaaaaaaaaugcaucccccccccccccccccccccccccccccccaaaggcucuuuucagagccaccagaauu

SEQ ID NO: 7467 - RNA, 1907 nt, Artificial Sequence
  mRNA product Design g-5 comprising derived and/or modified sequence from HRSV(A2)__F-del_DSCav1_mut7 (opt11)
gggagacccgugacccggaaguuguacggcuacgcgacuuucccucccacaaacccucgcgcccuuccuuuccuacuugggcccggcagaaagcuuaccauggaacuccucauccucaaagccaacgccauaaccacuauccucacagcagucacuuucugcuucgccucaggacaaaacauaaccgaagaguucuaccaauccacaugcuccgccgucuccaaaggcuaccucucagcgcuccgcaccggcugguacacauccgucaucaccaucgaacuaagcaacauaaaagaaaacaaaugcaacggcaccgacgccaaaguuaaacucaucaagcaagaacucgacaaauacaaaaacgcagucacagaacuucaaaugcucaugugcuccacacccgccacagguucuggcucagcaaucgcaagcggcgucgccguaugcaaaguccuucaccucgaaggcgaagucaacaaaaucaaauccgcccuccucuccaccaauaaagcugucgucucacucuccaacggcgucagcguccucacauucaaaguccucgaccucaaaaacuacauagacaagcaacuccucccgauacucaacaaacaaagcugcucuaucuccaacaucgaaaccgucauggaguuccaacagaaaaacaaucgucuccucgaaaucacccgcgaguucucaguaaacgccggggucaccacaccagucuccaccuacaugcucaccaacuccgaacuccuuagccucauaaacgacaugcccauaaccaacgaccaaaagaaacucaugagcaacaacguacaaauaguccgacaacaauccuauuccaucauguguaucaucaaagaagaaguccucgcauacguaguccaacucccccuauacggcguaaucgacaccccauguuggaaacuccacaccucaccacucuguaccaccaacaccaaagaaggcucaaacaucugccucacccgcacagaccgcggcugguacugcgacaacgcgggcuccgucagcuucuuuccccaagcggaaaccugcaaagucugcagcaacagagucuucugcgacacuaugaacucccucacccuccccucagaagucaaccucugcaacgucgacaucuucaacccgaaauacgacugcaaaaucaugaccagcaaaacugacgucuccucguccgucaucaccucacucggcgcaaucgugagcugcuacggcaaaaccaaaugcaccgccuccaacaaaaacaaaggcaucauaaaaacauucagcaacggcugcgacuacgucucgaacaaaggagucgacaccguaucagugggcaacacccuauacuacguaaacaagcaagaaggcaaaucacucuacguaaaaggcgaacccaucaucaacuucuacgacccccucgucuuccccuccgacgaguucgacgccuccaucucucaagucaacgagaaaaucaaccaaucccuugccuucauacguaaaagcgacgaacuccuucacaacguaaacgccgggaaauccaccacuaacauaaugaucaccaccaucaucaucguuaucauagucauccuccucucucucauagcagucggccuacuccuguacugcaaagcgcgcuaaggacuaguaauaaggaaacuguaugaaugucugugggcaggaagugaagagauccuucuguaaagguuuuuggaauuaugucugcugaauaauaaacuuuuuugaaauaauaaaucugguagaaaaaugagaucuaaaaaaaaaaaaaaaaaaaaaaaaaaaaaaaaaaaaaaaaaaaaaaaaaaaaaaaaaaaaaaaaugcaucccccccccccccccccccccccccccccccaaaggcucuuuucagagccaccagaauu

SEQ ID NO: 7468 - RNA, 1923 nt, Artificial Sequence
  mRNA product Design h-1 comprising derived and/or modified sequence from HRSV(A2)__F-del_DSCav1_mut7 (opt1)
gggagacccgugacccggaaguuguacggcuacgcgacuuucccucccacaaacccucgcgcccuuccuuuccuacuugggcccggcagaaagcuuaccauggagcugcucauccugaaggccaacgccaucaccaccauccugacggcggugaccuucugcuucgccagcggccagaacaucaccgaggaguucuaccaguccacgugcagcgccgucuccaagggguaccucagcgcccugcggaccggcugguacaccuccgugaucaccaucgagcugagcaacaucaaggagaacaagugcaacgggaccgacgccaaggugaagcucaucaagcaggagcuggacaaguacaagaacgcggucacggagcugcagaugcugaugugcuccaccccggcaaccggcuccggcuccgccaucgcgagcggcgucgccgugugcaaggugcugcaccucgagggggaggucaacaagaucaagagcgcccugcuguccaccaacaaggccguggugagccucuccaacggcgucagcgugcugaccuucaaggugcuggaccucaagaacuacaucgacaagcagcugcugcccauccugaacaagcagagcugcuccaucagcaacaucgagacggugauggaguuccagcagaagaacaaccggcuccuggagaucacccgcgaguucagcgugaacgccggggucaccacccccguguccacguacaugcugaccaacagcgagcuccugucccugaucaacgacaugccgaucaccaacgaccagaagaagcucaugagcaacaacgugcagaucguccggcagcaguccuacagcaucaugugcaucaucaaggaggaggugcuggcguacgugguccagcugccccucuacggcgugaucgacacccccugcuggaagcugcacacgagcccccugugcaccaccaacaccaaggagggguccaacaucugccucacgcgcaccgaccggggcugguacugcgacaacgccggcagcgucuccuucuucccgcaggccgagaccugcaaggugugcagcaaccgcguguucugcgacaccaugaacucccugacgcugcccagcgagguaaaccucugcaacgucgacaucuucaaccccaaguacgacugcaagaucaugaccuccaagaccgacgugagcuccagcgugaucaccucccugggggccaucgucagcugcuacggcaagacgaagugcaccgccagcaacaagaacaaggggaucaucaagaccuucuccaacggcugcgacuacgugagcaacaagggcguggacaccguguccgucgggaacacccuguacuacgugaacaagcaggagggcaagagccucuacgugaagggggagcccaucaucaacuucuacgacccgcuggucuuccccuccgacgaguucgacgcgagcaucucccaggugaacgagaagaucaaccagagccuggccuucauccgcaaguccgacgagcugcuccacaacgugaacgccggcaagagcacgaccaacaucaugaucaccaccaucaucaucgucaucaucgugauccugcugucccucaucgccguggggcugcugcucuacugcaaggcccggugaggacuaguacuggcugcaucucccuuuccucuguccuccauccuucucccaggauggugaagggggaccugguacccagugauccccaccccaggauccuaaaucaugacuuaccugcuaauaaaaacucauuggaaaagugagaagaucuaaaaaaaaaaaaaaaaaaaaaaaaaaaaaaaaaaaaaaaaaaaaaaaaaaaaaaaaaaaaaaaaugcaucccccccccccccccccccccccccccccccaaaggcucuuuucagagccaccagaauu

SEQ ID NO: 7469 - RNA, 1923 nt, Artificial Sequence
  mRNA product Design h-1 comprising derived and/or modified sequence from HRSV(A2)__F-del_DSCav1_mut7 (opt1)
gggagacccgugacccggaaguuguacggcuacgcgacuuucccucccacaaacccucgcgcccuuccuuuccuacuugggcccggcagaaagcuuaccauggagcugcucauccugaaggccaacgccaucaccaccauccugacggcggugaccuucugcuucgccagcggccagaacaucaccgaggaguucuaccaguccacgugcagcgccgucuccaagggguaccucagcgcccugcgcaccggcugguacaccuccgugaucaccaucgagcugagcaacaucaaggagaacaagugcaacgggaccgacgccaaggugaagcucaucaagcaggagcuggacaaguacaagaacgcggucacggagcugcagaugcucaugugcuccacccccgccaccggcagcggguccgccaucgccagcggcguggcggugugcaagguccugcaccuggagggcgaggugaacaagaucaaguccgcccuccugagcaccaacaaggccguggucucccugagcaacgggguguccgugcucacguucaagguccuggaccugaagaacuacaucgacaagcagcuccugccgauccugaacaagcagagcugcuccaucagcaacaucgagaccgugauggaguuccagcagaagaacaaccggcuccuggagaucacccgcgaguucuccgugaacgccggcgucaccacgcccgugagcaccuacaugcugaccaacagcgagcuccugucccugaucaacgacaugcccaucaccaacgaccagaagaagcucaugagcaacaacgugcagaucguccggcagcaguccuacagcaucaugugcaucaucaaggaggaggugcuggccuacgugguccagcugccccucuacggggugaucgacacgccgugcuggaagcugcacaccagcccccugugcaccaccaacacgaaggagggcagcaacaucugccucacccgcaccgaccgggggugguacugcgacaacgcgggcuccgugagcuucuucccccaggccgagaccugcaaggucugcuccaaccgcguguucugcgacacgaugaacagccugacccugcccuccgaggucaaccucugcaacguggacaucuucaacccgaaguacgacugcaagaucaugaccagcaagaccgacguguccagcuccgucaucacgagccugggcgccaucguguccugcuacgggaagaccaagugcaccgccagcaacaagaacaagggcaucaucaagaccuucuccaacgggugcgacuacgugagcaacaagggcgucgacacggugagcgugggcaacacccuguacuacgucaacaagcaggaggggaagucccucuacgugaagggcgagcccaucaucaacuucuacgacccccugguguuccccagcgacgaguucgacgccuccaucagccaggucaacgagaagaucaaccagucccuggcguucauccggaaguccgacgagcuccugcacaacgugaacgccgggaaguccaccaccaacaucaugaucaccacgaucaucaucgugaucaucgucauccugcucagccugaucgccgugggccugcuccuguacugcaaggcccgcugaggacuaguacuggcugcaucucccuuuccucuguccuccauccuucucccaggauggugaagggggaccugguacccagugauccccaccccaggauccuaaaucaugacuuaccugcuaauaaaaacucauuggaaaagugagaagaucuaaaaaaaaaaaaaaaaaaaaaaaaaaaaaaaaaaaaaaaaaaaaaaaaaaaaaaaaaaaaaaaaugcaucccccccccccccccccccccccccccccccaaaggcucuuuucagagccaccagaauu

SEQ ID NO: 7470 - RNA, 1923 nt, Artificial Sequence
  mRNA product Design h-1 comprising derived and/or modified sequence from HRSV(A2)__F-del_DSCav1_mut7 (opt2)
gggagacccgugacccggaaguuguacggcuacgcgacuuucccucccacaaacccucgcgcccuuccuuuccuacuugggcccggcagaaagcuuaccauggagcuccucauccucaaggccaacgccaucaccaccauccucaccgccgucaccuucugcuucgccuccggccagaacaucaccgaggaguucuaccaguccaccugcuccgccgucuccaagggcuaccucuccgcccuccgcaccggcugguacaccuccgucaucaccaucgagcucuccaacaucaaggagaacaagugcaacggcaccgacgccaaggucaagcucaucaagcaggagcucgacaaguacaagaacgccgucaccgagcuccagaugcucaugugcuccacccccgccaccggcuccggcuccgccaucgccuccggcgucgccgucugcaagguccuccaccucgagggcgaggucaacaagaucaaguccgcccuccucuccaccaacaaggccgucgucucccucuccaacggcgucuccguccucaccuucaagguccucgaccucaagaacuacaucgacaagcagcuccuccccauccucaacaagcaguccugcuccaucuccaacaucgagaccgucauggaguuccagcagaagaacaaccgccuccucgagaucacccgcgaguucuccgucaacgccggcgucaccacccccgucuccaccuacaugcucaccaacuccgagcuccucucccucaucaacgacaugcccaucaccaacgaccagaagaagcucauguccaacaacguccagaucguccgccagcaguccuacuccaucaugugcaucaucaaggaggagguccucgccuacgucguccagcucccccucuacggcgucaucgacacccccugcuggaagcuccacaccuccccccucugcaccaccaacaccaaggagggcuccaacaucugccucacccgcaccgaccgcggcugguacugcgacaacgccggcuccgucuccuucuucccccaggccgagaccugcaaggucugcuccaaccgcgucuucugcgacaccaugaacucccucacccuccccuccgaggucaaccucugcaacgucgacaucuucaaccccaaguacgacugcaagaucaugaccuccaagaccgacgucuccuccuccgucaucaccucccucggcgccaucgucuccugcuacggcaagaccaagugcaccgccuccaacaagaacaagggcaucaucaagaccuucuccaacggcugcgacuacgucuccaacaagggcgucgacaccgucuccgucggcaacacccucuacuacgucaacaagcaggagggcaagucccucuacgucaagggcgagcccaucaucaacuucuacgacccccucgucuuccccuccgacgaguucgacgccuccaucucccaggucaacgagaagaucaaccagucccucgccuucauccgcaaguccgacgagcuccuccacaacgucaacgccggcaaguccaccaccaacaucaugaucaccaccaucaucaucgucaucaucgucauccuccucucccucaucgccgucggccuccuccucuacugcaaggcccgcugaggacuaguacuggcugcaucucccuuuccucuguccuccauccuucucccaggauggugaagggggaccugguacccagugauccccaccccaggauccuaaaucaugacuuaccugcuaauaaaaacucauuggaaaagugagaagaucuaaaaaaaaaaaaaaaaaaaaaaaaaaaaaaaaaaaaaaaaaaaaaaaaaaaaaaaaaaaaaaaaugcaucccccccccccccccccccccccccccccccaaaggcucuuuucagagccaccagaauu

SEQ ID NO: 7471 - RNA, 1923 nt, Artificial Sequence
  mRNA product Design h-1 comprising derived and/or modified sequence from HRSV(A2)__F-del_DSCav1_mut7 (opt3)
gggagacccgugacccggaaguuguacggcuacgcgacuuucccucccacaaacccucgcgcccuuccuuuccuacuugggcccggcagaaagcuuaccauggagcugcucauccuuaaggccaacgcuauuaccacaauacugacugcagugacguucugcuuugccagcggccagaauaucaccgaagaguucuaccaauccacauguucugcggucucaaaaggguauuugagugcuuuaagaacuggaugguacaccagcguuauuacaaucgaacuguccaacauuaaggagaauaaaugcaacgguaccgacgccaaggugaaacuaaucaagcaggaacucgauaaguauaaaaaugcaguaacugagcugcagaugcuuauguguucuacacccgccaccggcucggggucagcuauagcaagcggaguggccgucugcaaggugcugcacuuggagggcgaaguuaacaaaaucaagagugcucuccuguccacgaauaaagccguggucucucugagcaacgguguguccguacucacuuuuaagguuuuagaccugaagaauuacauugauaaacagcuuuugccuauccugaacaagcaaucauguaguauuagcaauaucgagaccgugauggaguuccagcagaaaaacaauaggcuacucgaaauaacacgggaguuuucugucaacgcgggggugacuaccccaguguccacauauaugcugaccaauucagaacuucugagcuugauuaacgacaugccgaucacgaacgaucagaagaaacucaugaguaauaacguccaaauuguucgccagcagucuuacuccaucaugugcaucauuaaggaggaagugcuggcauauguagugcaguuaccccuguacggagucauagacacuccuuguuggaaacuccauacaagcccacuuugcaccacuaauacaaaggagggcucgaacaucugucugacccgaacggaucguggcugguacugcgacaaugccgggucuguguccuucuuuccccaagcugaaaccuguaagguuugcucaaacagaguguucugcgauacaaugaauaguuugacucuaccuagcgaggucaaccuguguaauguggacauuuuuaacccaaaauaugauugcaagaucaugaccuccaaaacagacguaucuagcucaguuauaacuagccucggagccauuguguccuguuacgguaagaccaaaugcacagcaagcaauaagaacaagggcaucaucaaaaccuucucuaaugggugugauuaugucucaaacaagggaguggacacugucagugugggcaauacgcuguacuauguuaacaaacaggaggguaagagccuuuacgugaaaggggaacccauuaucaacuuuuaugacccucugguauucccauccgaugaguuugacgcuucuauuucgcaggucaaugaaaagauaaaccaaaguuuggccuucaucaggaaguccgaugagcuccugcacaaugugaacgcgggaaaaucaacaaccaauauuaugaucacuaccaucauuauaguuaucauugugaucuuacugagucuaauugccgucggccuccugcuuuacugcaaggcacggugaggacuaguacuggcugcaucucccuuuccucuguccuccauccuucucccaggauggugaagggggaccugguacccagugauccccaccccaggauccuaaaucaugacuuaccugcuaauaaaaacucauuggaaaagugagaagaucuaaaaaaaaaaaaaaaaaaaaaaaaaaaaaaaaaaaaaaaaaaaaaaaaaaaaaaaaaaaaaaaaugcaucccccccccccccccccccccccccccccccaaaggcucuuuucagagccaccagaauu

SEQ ID NO: 7472 - RNA, 1923 nt, Artificial Sequence
  mRNA product Design h-1 comprising derived and/or modified sequence from HRSV(A2)__F-del_DSCav1_mut7 (opt4)
gggagacccgugacccggaaguuguacggcuacgcgacuuucccucccacaaacccucgcgcccuuccuuuccuacuugggcccggcagaaagcuuaccauggagcugcugauccugaaggccaacgccaucaccaccauccugaccgccgugaccuucugcuucgccagcggccagaacaucaccgaggaguucuaccagagcaccugcagcgccgugagcaagggcuaccugagcgcccugagaaccggcugguacaccagcgugaucaccaucgagcugagcaacaucaaggagaacaagugcaacggcaccgacgccaaggugaagcugaucaagcaggagcuggacaaguacaagaacgccgugaccgagcugcagaugcugaugugcagcacccccgccaccggcagcggcagcgccaucgccagcggcguggccgugugcaaggugcugcaccuggagggcgaggugaacaagaucaagagcgcccugcugagcaccaacaaggccguggugagccugagcaacggcgugagcgugcugaccuucaaggugcuggaccugaagaacuacaucgacaagcagcugcugcccauccugaacaagcagagcugcagcaucagcaacaucgagaccgugauggaguuccagcagaagaacaacagacugcuggagaucaccagagaguucagcgugaacgccggcgugaccacccccgugagcaccuacaugcugaccaacagcgagcugcugagccugaucaacgacaugcccaucaccaacgaccagaagaagcugaugagcaacaacgugcagaucgugagacagcagagcuacagcaucaugugcaucaucaaggaggaggugcuggccuacguggugcagcugccccuguacggcgugaucgacacccccugcuggaagcugcacaccagcccccugugcaccaccaacaccaaggagggcagcaacaucugccugaccagaaccgacagaggcugguacugcgacaacgccggcagcgugagcuucuucccccaggccgagaccugcaaggugugcagcaacagaguguucugcgacaccaugaacagccugacccugcccagcgaggugaaccugugcaacguggacaucuucaaccccaaguacgacugcaagaucaugaccagcaagaccgacgugagcagcagcgugaucaccagccugggcgccaucgugagcugcuacggcaagaccaagugcaccgccagcaacaagaacaagggcaucaucaagaccuucagcaacggcugcgacuacgugagcaacaagggcguggacaccgugagcgugggcaacacccuguacuacgugaacaagcaggagggcaagagccuguacgugaagggcgagcccaucaucaacuucuacgacccccugguguuccccagcgacgaguucgacgccagcaucagccaggugaacgagaagaucaaccagagccuggccuucaucagaaagagcgacgagcugcugcacaacgugaacgccggcaagagcaccaccaacaucaugaucaccaccaucaucaucgugaucaucgugauccugcugagccugaucgccgugggccugcugcuguacugcaaggccagaugaggacuaguacuggcugcaucucccuuuccucuguccuccauccuucucccaggauggugaagggggaccugguacccagugauccccaccccaggauccuaaaucaugacuuaccugcuaauaaaaacucauuggaaaagugagaagaucuaaaaaaaaaaaaaaaaaaaaaaaaaaaaaaaaaaaaaaaaaaaaaaaaaaaaaaaaaaaaaaaaugcaucccccccccccccccccccccccccccccccaaaggcucuuuucagagccaccagaauu

SEQ ID NO: 7473 - RNA, 1923 nt, Artificial Sequence
  mRNA product Design h-1 comprising derived and/or modified sequence from HRSV(A2)__F-del_DSCav1_mut7 (opt5)
gggagacccgugacccggaaguuguacggcuacgcgacuuucccucccacaaacccucgcgcccuuccuuuccuacuugggcccggcagaaagcuuaccauggagcugcucauccugaaggccaacgcuauuaccacaauccuuacggccgugaccuucugcuuugcgagcggccagaauauuacagaagaguucuaccaauccaccuguucugcugucagcaaaggguaucuguccgcccucagaacaggaugguacaccucuguuaucacaauugaacugagcaacaucaaggagaauaaaugcaacggcaccgacgccaaggugaaacuuaucaagcaggaacuggauaaguauaaaaaugcugugacggagcuccagaugcugauguguuccacccccgccacagggucuggaagcgcuauugccuccggcgucgcggugugcaagguucugcaccucgagggggaagugaacaaaaucaagagcgcccugcuuucuaccaauaaagcugucgugucccugagcaacggaguuucugugcucacauuuaagguccuggaccuuaagaauuacauugauaaacagcugcucccuauccugaacaagcaauccuguagcauuucuaauaucgagaccgugauggaguuccagcagaaaaacaaucggcugcucgaaauuacgcgcgaguuuuccgugaacgccggcgucacaaccccgguuagcacauauaugcugaccaauuccgaacuucugucucucaucaacgacaugcccaucaccaacgaucagaagaaacugaugagcaauaacgugcaaauugugagacagcaguccuacagcaucaugugcauuaucaaggaggaaguccuugcuuaugugguucagcugccucucuacggcgugauugacacacccuguuggaaacugcauacgucuccucugugcaccacaaauaccaaggagggguccaacaucugucucacacggaccgaucgcggaugguacugcgacaaugccggcagcgucucuuucuuuccccaagcggaaacguguaaggugugcagcaacagaguuuucugcgauacaaugaacucccugacccuuccuucugaggugaaucuguguaaugucgacaucuuuaacccgaaauaugauugcaagauuaugaccagcaaaacagacguguccagcucugucaucaccucccucggggccauugugagcuguuacggaaagacaaaaugcacggcuucuaauaagaacaagggcaucauuaaaaccuucuccaaugggugugauuauguuagcaacaagggaguggacacagucuccgugggcaauacccuguacuauguuaacaaacaggagggcaagucucuuuacgugaaaggggaacccaucaucaacuuuuaugacccucuggucuuccccagcgaugaguuugacgccuccauuucucaggugaaugaaaagaucaaccaaagccucgcuuucauucggaaguccgaugagcugcugcacaaugugaacgccggaaaaagcacaaccaauaucaugauuacgaccaucauuaucguuaucauugucauccuccugucucuuauugccgugggccugcuccuguacugcaaggcucgcugaggacuaguacuggcugcaucucccuuuccucuguccuccauccuucucccaggauggugaagggggaccugguacccagugauccccaccccaggauccuaaaucaugacuuaccugcuaauaaaaacucauuggaaaagugagaagaucuaaaaaaaaaaaaaaaaaaaaaaaaaaaaaaaaaaaaaaaaaaaaaaaaaaaaaaaaaaaaaaaaugcaucccccccccccccccccccccccccccccccaaaggcucuuuucagagccaccagaauu

SEQ ID NO: 7474 - RNA, 1923 nt, Artificial Sequence
  mRNA product Design h-1 comprising derived and/or modified sequence from HRSV(A2)__F-del_DSCav1_mut7 (opt6)
gggagacccgugacccggaaguuguacggcuacgcgacuuucccucccacaaacccucgcgcccuuccuuuccuacuugggcccggcagaaagcuuaccauggaauuacuaauccucaaagcaaacgcaauuacaaccauacuaaccgcugucaccuuuuguuuugccucaggacaaaacauaacugaagaauuuuaccaaucaacaugcuccgcaguaucuaaaggauaccucagcgcguuaagaacaggaugguacacaucgguaauaaccaucgaauuauccaacauaaaagaaaauaaaugcaauggaacagacgcaaaagucaaauuaauuaaacaagaacuagacaaauauaaaaacgcaguaaccgaauuacaaaugcuaauguguucaacaccagcaacaggaucaggaucagcuauagcuucaggaguugccguaugcaaagugcuacacuuagaaggagaagugaauaaaauaaaaucagcucuauuaucaacgaacaaagccguaguaucucuaucaaauggcguaucaguacucacauucaaaguacucgaccuaaaaaacuauauagauaaacaacuauuacccauccuaaauaaacaaagcugcucuauaucaaacaucgaaacaguaauggaauuucaacaaaaaaacaacagacuacuagaaauaacccgagaguucucaguuaaugcaggaguaacaacaccagucucaacauacaugcucacaaacucagaacuccuaucacuaauaaaugacaugccaauaacaaacgaccaaaaaaaacucaugucuaacaacguccaaauaguaagacaacaauccuacagcauaauguguauaauaaaagaagaaguuuuagcauacgucguacaacuacccuuauauggcguaauagauacaccaugcuggaaacuccauaccucaccucuauguacaacaaauaccaaagaagguucuaauauaugccuaacacgaacugaccgaggaugguacugugacaacgcaggaucagucucuuucuuuccacaagcagaaaccugcaaaguaugcaguaaccgcguauuuugcgacacaaugaacucccuaaccuuaccaucagaaguaaacuuauguaacguagacauauucaauccaaaauaugacugcaaaauaaugacaucaaaaacagacguaagcucaucaguaauaacuucacuaggcgcaauuguaucaugcuauggaaaaaccaaauguaccgcauccaacaaaaauaaaggaauaauaaaaaccuucucuaacggaugcgacuacguaucaaacaaagguguagauacaguuucuguaggaaacacacucuacuauguaaauaaacaagaaggaaaaucacuauacguaaaaggagaaccaauaauaaacuucuaugacccacuuguauuuccaucugaugaauuugaugcaagcauaucacaaguaaacgaaaaaauaaaccaaucucuagccuuuauacgaaaaagcgacgaauuacuacauaacgucaacgcuggaaaaucaacaacaaacauaaugauaacaacaauaauaauaguaauaauagucauccuauuaucacuaaucgccguaggacuacuccuauacugcaaagcuagauaaggacuaguacuggcugcaucucccuuuccucuguccuccauccuucucccaggauggugaagggggaccugguacccagugauccccaccccaggauccuaaaucaugacuuaccugcuaauaaaaacucauuggaaaagugagaagaucuaaaaaaaaaaaaaaaaaaaaaaaaaaaaaaaaaaaaaaaaaaaaaaaaaaaaaaaaaaaaaaaaugcaucccccccccccccccccccccccccccccccaaaggcucuuuucagagccaccagaauu

SEQ ID NO: 7475 - RNA, 1923 nt, Artificial Sequence
  mRNA product Design h-1 comprising derived and/or modified sequence from HRSV(A2)__F-del_DSCav1_mut7 (opt11)
gggagacccgugacccggaaguuguacggcuacgcgacuuucccucccacaaacccucgcgcccuuccuuuccuacuugggcccggcagaaagcuuaccauggaacuccucauccucaaagccaacgccauaaccacuauccucacagcagucacuuucugcuucgccucaggacaaaacauaaccgaagaguucuaccaauccacaugcuccgccgucuccaaaggcuaccucucagcgcuccgcaccggcugguacacauccgucaucaccaucgaacuaagcaacauaaaagaaaacaaaugcaacggcaccgacgccaaaguuaaacucaucaagcaagaacucgacaaauacaaaaacgcagucacagaacuucaaaugcucaugugcuccacacccgccacagguucuggcucagcaaucgcaagcggcgucgccguaugcaaaguccuucaccucgaaggcgaagucaacaaaaucaaauccgcccuccucuccaccaauaaagcugucgucucacucuccaacggcgucagcguccucacauucaaaguccucgaccucaaaaacuacauagacaagcaacuccucccgauacucaacaaacaaagcugcucuaucuccaacaucgaaaccgucauggaguuccaacagaaaaacaaucgucuccucgaaaucacccgcgaguucucaguaaacgccggggucaccacaccagucuccaccuacaugcucaccaacuccgaacuccuuagccucauaaacgacaugcccauaaccaacgaccaaaagaaacucaugagcaacaacguacaaauaguccgacaacaauccuauuccaucauguguaucaucaaagaagaaguccucgcauacguaguccaacucccccuauacggcguaaucgacaccccauguuggaaacuccacaccucaccacucuguaccaccaacaccaaagaaggcucaaacaucugccucacccgcacagaccgcggcugguacugcgacaacgcgggcuccgucagcuucuuuccccaagcggaaaccugcaaagucugcagcaacagagucuucugcgacacuaugaacucccucacccuccccucagaagucaaccucugcaacgucgacaucuucaacccgaaauacgacugcaaaaucaugaccagcaaaacugacgucuccucguccgucaucaccucacucggcgcaaucgugagcugcuacggcaaaaccaaaugcaccgccuccaacaaaaacaaaggcaucauaaaaacauucagcaacggcugcgacuacgucucgaacaaaggagucgacaccguaucagugggcaacacccuauacuacguaaacaagcaagaaggcaaaucacucuacguaaaaggcgaacccaucaucaacuucuacgacccccucgucuuccccuccgacgaguucgacgccuccaucucucaagucaacgagaaaaucaaccaaucccuugccuucauacguaaaagcgacgaacuccuucacaacguaaacgccgggaaauccaccacuaacauaaugaucaccaccaucaucaucguuaucauagucauccuccucucucucauagcagucggccuacuccuguacugcaaagcgcgcuaaggacuaguacuggcugcaucucccuuuccucuguccuccauccuucucccaggauggugaagggggaccugguacccagugauccccaccccaggauccuaaaucaugacuuaccugcuaauaaaaacucauuggaaaagugagaagaucuaaaaaaaaaaaaaaaaaaaaaaaaaaaaaaaaaaaaaaaaaaaaaaaaaaaaaaaaaaaaaaaaugcaucccccccccccccccccccccccccccccccaaaggcucuuuucagagccaccagaauu

SEQ ID NO: 7476 - RNA, 2139 nt, Artificial Sequence
  mRNA product Design h-2 comprising derived and/or modified sequence from HRSV(A2)__F-del_DSCav1_mut7 (opt1)
gggagacccgugacccggaaguuguacggcuacgcgacuuucccucccacaaacccucgcgcccuuccuuuccuacuugggcccggcagaaagcuuaccauggagcugcucauccugaaggccaacgccaucaccaccauccugacggcggugaccuucugcuucgccagcggccagaacaucaccgaggaguucuaccaguccacgugcagcgccgucuccaagggguaccucagcgcccugcggaccggcugguacaccuccgugaucaccaucgagcugagcaacaucaaggagaacaagugcaacgggaccgacgccaaggugaagcucaucaagcaggagcuggacaaguacaagaacgcggucacggagcugcagaugcugaugugcuccaccccggcaaccggcuccggcuccgccaucgcgagcggcgucgccgugugcaaggugcugcaccucgagggggaggucaacaagaucaagagcgcccugcuguccaccaacaaggccguggugagccucuccaacggcgucagcgugcugaccuucaaggugcuggaccucaagaacuacaucgacaagcagcugcugcccauccugaacaagcagagcugcuccaucagcaacaucgagacggugauggaguuccagcagaagaacaaccggcuccuggagaucacccgcgaguucagcgugaacgccggggucaccacccccguguccacguacaugcugaccaacagcgagcuccugucccugaucaacgacaugccgaucaccaacgaccagaagaagcucaugagcaacaacgugcagaucguccggcagcaguccuacagcaucaugugcaucaucaaggaggaggugcuggcguacgugguccagcugccccucuacggcgugaucgacacccccugcuggaagcugcacacgagcccccugugcaccaccaacaccaaggagggguccaacaucugccucacgcgcaccgaccggggcugguacugcgacaacgccggcagcgucuccuucuucccgcaggccgagaccugcaaggugugcagcaaccgcguguucugcgacaccaugaacucccugacgcugcccagcgagguaaaccucugcaacgucgacaucuucaaccccaaguacgacugcaagaucaugaccuccaagaccgacgugagcuccagcgugaucaccucccugggggccaucgucagcugcuacggcaagacgaagugcaccgccagcaacaagaacaaggggaucaucaagaccuucuccaacggcugcgacuacgugagcaacaagggcguggacaccguguccgucgggaacacccuguacuacgugaacaagcaggagggcaagagccucuacgugaagggggagcccaucaucaacuucuacgacccgcuggucuuccccuccgacgaguucgacgcgagcaucucccaggugaacgagaagaucaaccagagccuggccuucauccgcaaguccgacgagcugcuccacaacgugaacgccggcaagagcacgaccaacaucaugaucaccaccaucaucaucgucaucaucgugauccugcugucccucaucgccguggggcugcugcucuacugcaaggcccggugaggacuagugaagggaacacccaaauuuaauucagccuuaagcacaauuaauuaagagugaaacguaauuguacaagcaguuggucacccaccauagggcaugaucaacaccgcaaccuuuccuuuuucccccagugauucugaaaaaccccucuucccuucagcuugcuuagauguuccaaauuuaguaagcuuaaggcggccuacagaagaaaaagaaaaaaaaggccacaaaaguucccucucacuuucaguaaauaaaauaaaagcagcaacagaaauaaagaaauaaaugaaauucaaaaugaaauaaauauuguguugugcagcauuaaaaaaucaauaaaaauuaaaaaugagcaagaucuaaaaaaaaaaaaaaaaaaaaaaaaaaaaaaaaaaaaaaaaaaaaaaaaaaaaaaaaaaaaaaaaugcaucccccccccccccccccccccccccccccccaaaggcucuuuucagagccaccagaauu

SEQ ID NO: 7477 - RNA, 2139 nt, Artificial Sequence
  mRNA product Design h-2 comprising derived and/or modified sequence from HRSV(A2)__F-del_DSCav1_mut7 (opt1)
gggagacccgugacccggaaguuguacggcuacgcgacuuucccucccacaaacccucgcgcccuuccuuuccuacuugggcccggcagaaagcuuaccauggagcugcucauccugaaggccaacgccaucaccaccauccugacggcggugaccuucugcuucgccagcggccagaacaucaccgaggaguucuaccaguccacgugcagcgccgucuccaagggguaccucagcgcccugcgcaccggcugguacaccuccgugaucaccaucgagcugagcaacaucaaggagaacaagugcaacgggaccgacgccaaggugaagcucaucaagcaggagcuggacaaguacaagaacgcggucacggagcugcagaugcucaugugcuccacccccgccaccggcagcggguccgccaucgccagcggcguggcggugugcaagguccugcaccuggagggcgaggugaacaagaucaaguccgcccuccugagcaccaacaaggccguggucucccugagcaacgggguguccgugcucacguucaagguccuggaccugaagaacuacaucgacaagcagcuccugccgauccugaacaagcagagcugcuccaucagcaacaucgagaccgugauggaguuccagcagaagaacaaccggcuccuggagaucacccgcgaguucuccgugaacgccggcgucaccacgcccgugagcaccuacaugcugaccaacagcgagcuccugucccugaucaacgacaugcccaucaccaacgaccagaagaagcucaugagcaacaacgugcagaucguccggcagcaguccuacagcaucaugugcaucaucaaggaggaggugcuggccuacgugguccagcugccccucuacggggugaucgacacgccgugcuggaagcugcacaccagcccccugugcaccaccaacacgaaggagggcagcaacaucugccucacccgcaccgaccgggggugguacugcgacaacgcgggcuccgugagcuucuucccccaggccgagaccugcaaggucugcuccaaccgcguguucugcgacacgaugaacagccugacccugcccuccgaggucaaccucugcaacguggacaucuucaacccgaaguacgacugcaagaucaugaccagcaagaccgacguguccagcuccgucaucacgagccugggcgccaucguguccugcuacgggaagaccaagugcaccgccagcaacaagaacaagggcaucaucaagaccuucuccaacgggugcgacuacgugagcaacaagggcgucgacacggugagcgugggcaacacccuguacuacgucaacaagcaggaggggaagucccucuacgugaagggcgagcccaucaucaacuucuacgacccccugguguuccccagcgacgaguucgacgccuccaucagccaggucaacgagaagaucaaccagucccuggcguucauccggaaguccgacgagcuccugcacaacgugaacgccgggaaguccaccaccaacaucaugaucaccacgaucaucaucgugaucaucgucauccugcucagccugaucgccgugggccugcuccuguacugcaaggcccgcugaggacuagugaagggaacacccaaauuuaauucagccuuaagcacaauuaauuaagagugaaacguaauuguacaagcaguuggucacccaccauagggcaugaucaacaccgcaaccuuuccuuuuucccccagugauucugaaaaaccccucuucccuucagcuugcuuagauguuccaaauuuaguaagcuuaaggcggccuacagaagaaaaagaaaaaaaaggccacaaaaguucccucucacuuucaguaaauaaaauaaaagcagcaacagaaauaaagaaauaaaugaaauucaaaaugaaauaaauauuguguugugcagcauuaaaaaaucaauaaaaauuaaaaaugagcaagaucuaaaaaaaaaaaaaaaaaaaaaaaaaaaaaaaaaaaaaaaaaaaaaaaaaaaaaaaaaaaaaaaaugcaucccccccccccccccccccccccccccccccaaaggcucuuuucagagccaccagaauu

SEQ ID NO: 7478 - RNA, 2139 nt, Artificial Sequence
  mRNA product Design h-2 comprising derived and/or modified sequence from HRSV(A2)__F-del_DSCav1_mut7 (opt2)
gggagacccgugacccggaaguuguacggcuacgcgacuuucccucccacaaacccucgcgcccuuccuuuccuacuugggcccggcagaaagcuuaccauggagcuccucauccucaaggccaacgccaucaccaccauccucaccgccgucaccuucugcuucgccuccggccagaacaucaccgaggaguucuaccaguccaccugcuccgccgucuccaagggcuaccucuccgcccuccgcaccggcugguacaccuccgucaucaccaucgagcucuccaacaucaaggagaacaagugcaacggcaccgacgccaaggucaagcucaucaagcaggagcucgacaaguacaagaacgccgucaccgagcuccagaugcucaugugcuccacccccgccaccggcuccggcuccgccaucgccuccggcgucgccgucugcaagguccuccaccucgagggcgaggucaacaagaucaaguccgcccuccucuccaccaacaaggccgucgucucccucuccaacggcgucuccguccucaccuucaagguccucgaccucaagaacuacaucgacaagcagcuccuccccauccucaacaagcaguccugcuccaucuccaacaucgagaccgucauggaguuccagcagaagaacaaccgccuccucgagaucacccgcgaguucuccgucaacgccggcgucaccacccccgucuccaccuacaugcucaccaacuccgagcuccucucccucaucaacgacaugcccaucaccaacgaccagaagaagcucauguccaacaacguccagaucguccgccagcaguccuacuccaucaugugcaucaucaaggaggagguccucgccuacgucguccagcucccccucuacggcgucaucgacacccccugcuggaagcuccacaccuccccccucugcaccaccaacaccaaggagggcuccaacaucugccucacccgcaccgaccgcggcugguacugcgacaacgccggcuccgucuccuucuucccccaggccgagaccugcaaggucugcuccaaccgcgucuucugcgacaccaugaacucccucacccuccccuccgaggucaaccucugcaacgucgacaucuucaaccccaaguacgacugcaagaucaugaccuccaagaccgacgucuccuccuccgucaucaccucccucggcgccaucgucuccugcuacggcaagaccaagugcaccgccuccaacaagaacaagggcaucaucaagaccuucuccaacggcugcgacuacgucuccaacaagggcgucgacaccgucuccgucggcaacacccucuacuacgucaacaagcaggagggcaagucccucuacgucaagggcgagcccaucaucaacuucuacgacccccucgucuuccccuccgacgaguucgacgccuccaucucccaggucaacgagaagaucaaccagucccucgccuucauccgcaaguccgacgagcuccuccacaacgucaacgccggcaaguccaccaccaacaucaugaucaccaccaucaucaucgucaucaucgucauccuccucucccucaucgccgucggccuccuccucuacugcaaggcccgcugaggacuagugaagggaacacccaaauuuaauucagccuuaagcacaauuaauuaagagugaaacguaauuguacaagcaguuggucacccaccauagggcaugaucaacaccgcaaccuuuccuuuuucccccagugauucugaaaaaccccucuucccuucagcuugcuuagauguuccaaauuuaguaagcuuaaggcggccuacagaagaaaaagaaaaaaaaggccacaaaaguucccucucacuuucaguaaauaaaauaaaagcagcaacagaaauaaagaaauaaaugaaauucaaaaugaaauaaauauuguguugugcagcauuaaaaaaucaauaaaaauuaaaaaugagcaagaucuaaaaaaaaaaaaaaaaaaaaaaaaaaaaaaaaaaaaaaaaaaaaaaaaaaaaaaaaaaaaaaaaugcaucccccccccccccccccccccccccccccccaaaggcucuuuucagagccaccagaauu

SEQ ID NO: 7479 - RNA, 2139 nt, Artificial Sequence
  mRNA product Design h-2 comprising derived and/or modified sequence from HRSV(A2)__F-del_DSCav1_mut7 (opt3)
gggagacccgugacccggaaguuguacggcuacgcgacuuucccucccacaaacccucgcgcccuuccuuuccuacuugggcccggcagaaagcuuaccauggagcugcucauccuuaaggccaacgcuauuaccacaauacugacugcagugacguucugcuuugccagcggccagaauaucaccgaagaguucuaccaauccacauguucugcggucucaaaaggguauuugagugcuuuaagaacuggaugguacaccagcguuauuacaaucgaacuguccaacauuaaggagaauaaaugcaacgguaccgacgccaaggugaaacuaaucaagcaggaacucgauaaguauaaaaaugcaguaacugagcugcagaugcuuauguguucuacacccgccaccggcucggggucagcuauagcaagcggaguggccgucugcaaggugcugcacuuggagggcgaaguuaacaaaaucaagagugcucuccuguccacgaauaaagccguggucucucugagcaacgguguguccguacucacuuuuaagguuuuagaccugaagaauuacauugauaaacagcuuuugccuauccugaacaagcaaucauguaguauuagcaauaucgagaccgugauggaguuccagcagaaaaacaauaggcuacucgaaauaacacgggaguuuucugucaacgcgggggugacuaccccaguguccacauauaugcugaccaauucagaacuucugagcuugauuaacgacaugccgaucacgaacgaucagaagaaacucaugaguaauaacguccaaauuguucgccagcagucuuacuccaucaugugcaucauuaaggaggaagugcuggcauauguagugcaguuaccccuguacggagucauagacacuccuuguuggaaacuccauacaagcccacuuugcaccacuaauacaaaggagggcucgaacaucugucugacccgaacggaucguggcugguacugcgacaaugccgggucuguguccuucuuuccccaagcugaaaccuguaagguuugcucaaacagaguguucugcgauacaaugaauaguuugacucuaccuagcgaggucaaccuguguaauguggacauuuuuaacccaaaauaugauugcaagaucaugaccuccaaaacagacguaucuagcucaguuauaacuagccucggagccauuguguccuguuacgguaagaccaaaugcacagcaagcaauaagaacaagggcaucaucaaaaccuucucuaaugggugugauuaugucucaaacaagggaguggacacugucagugugggcaauacgcuguacuauguuaacaaacaggaggguaagagccuuuacgugaaaggggaacccauuaucaacuuuuaugacccucugguauucccauccgaugaguuugacgcuucuauuucgcaggucaaugaaaagauaaaccaaaguuuggccuucaucaggaaguccgaugagcuccugcacaaugugaacgcgggaaaaucaacaaccaauauuaugaucacuaccaucauuauaguuaucauugugaucuuacugagucuaauugccgucggccuccugcuuuacugcaaggcacggugaggacuagugaagggaacacccaaauuuaauucagccuuaagcacaauuaauuaagagugaaacguaauuguacaagcaguuggucacccaccauagggcaugaucaacaccgcaaccuuuccuuuuucccccagugauucugaaaaaccccucuucccuucagcuugcuuagauguuccaaauuuaguaagcuuaaggcggccuacagaagaaaaagaaaaaaaaggccacaaaaguucccucucacuuucaguaaauaaaauaaaagcagcaacagaaauaaagaaauaaaugaaauucaaaaugaaauaaauauuguguugugcagcauuaaaaaaucaauaaaaauuaaaaaugagcaagaucuaaaaaaaaaaaaaaaaaaaaaaaaaaaaaaaaaaaaaaaaaaaaaaaaaaaaaaaaaaaaaaaaugcaucccccccccccccccccccccccccccccccaaaggcucuuuucagagccaccagaauu

SEQ ID NO: 7480 - RNA, 2139 nt, Artificial Sequence
  mRNA product Design h-2 comprising derived and/or modified sequence from HRSV(A2)__F-del_DSCav1_mut7 (opt4)
gggagacccgugacccggaaguuguacggcuacgcgacuuucccucccacaaacccucgcgcccuuccuuuccuacuugggcccggcagaaagcuuaccauggagcugcugauccugaaggccaacgccaucaccaccauccugaccgccgugaccuucugcuucgccagcggccagaacaucaccgaggaguucuaccagagcaccugcagcgccgugagcaagggcuaccugagcgcccugagaaccggcugguacaccagcgugaucaccaucgagcugagcaacaucaaggagaacaagugcaacggcaccgacgccaaggugaagcugaucaagcaggagcuggacaaguacaagaacgccgugaccgagcugcagaugcugaugugcagcacccccgccaccggcagcggcagcgccaucgccagcggcguggccgugugcaaggugcugcaccuggagggcgaggugaacaagaucaagagcgcccugcugagcaccaacaaggccguggugagccugagcaacggcgugagcgugcugaccuucaaggugcuggaccugaagaacuacaucgacaagcagcugcugcccauccugaacaagcagagcugcagcaucagcaacaucgagaccgugauggaguuccagcagaagaacaacagacugcuggagaucaccagagaguucagcgugaacgccggcgugaccacccccgugagcaccuacaugcugaccaacagcgagcugcugagccugaucaacgacaugcccaucaccaacgaccagaagaagcugaugagcaacaacgugcagaucgugagacagcagagcuacagcaucaugugcaucaucaaggaggaggugcuggccuacguggugcagcugccccuguacggcgugaucgacacccccugcuggaagcugcacaccagcccccugugcaccaccaacaccaaggagggcagcaacaucugccugaccagaaccgacagaggcugguacugcgacaacgccggcagcgugagcuucuucccccaggccgagaccugcaaggugugcagcaacagaguguucugcgacaccaugaacagccugacccugcccagcgaggugaaccugugcaacguggacaucuucaaccccaaguacgacugcaagaucaugaccagcaagaccgacgugagcagcagcgugaucaccagccugggcgccaucgugagcugcuacggcaagaccaagugcaccgccagcaacaagaacaagggcaucaucaagaccuucagcaacggcugcgacuacgugagcaacaagggcguggacaccgugagcgugggcaacacccuguacuacgugaacaagcaggagggcaagagccuguacgugaagggcgagcccaucaucaacuucuacgacccccugguguuccccagcgacgaguucgacgccagcaucagccaggugaacgagaagaucaaccagagccuggccuucaucagaaagagcgacgagcugcugcacaacgugaacgccggcaagagcaccaccaacaucaugaucaccaccaucaucaucgugaucaucgugauccugcugagccugaucgccgugggccugcugcuguacugcaaggccagaugaggacuagugaagggaacacccaaauuuaauucagccuuaagcacaauuaauuaagagugaaacguaauuguacaagcaguuggucacccaccauagggcaugaucaacaccgcaaccuuuccuuuuucccccagugauucugaaaaaccccucuucccuucagcuugcuuagauguuccaaauuuaguaagcuuaaggcggccuacagaagaaaaagaaaaaaaaggccacaaaaguucccucucacuuucaguaaauaaaauaaaagcagcaacagaaauaaagaaauaaaugaaauucaaaaugaaauaaauauuguguugugcagcauuaaaaaaucaauaaaaauuaaaaaugagcaagaucuaaaaaaaaaaaaaaaaaaaaaaaaaaaaaaaaaaaaaaaaaaaaaaaaaaaaaaaaaaaaaaaaugcaucccccccccccccccccccccccccccccccaaaggcucuuuucagagccaccagaauu

SEQ ID NO: 7481 - RNA, 2139 nt, Artificial Sequence
  mRNA product Design h-2 comprising derived and/or modified sequence from HRSV(A2)__F-del_DSCav1_mut7 (opt5)
gggagacccgugacccggaaguuguacggcuacgcgacuuucccucccacaaacccucgcgcccuuccuuuccuacuugggcccggcagaaagcuuaccauggagcugcucauccugaaggccaacgcuauuaccacaauccuuacggccgugaccuucugcuuugcgagcggccagaauauuacagaagaguucuaccaauccaccuguucugcugucagcaaaggguaucuguccgcccucagaacaggaugguacaccucuguuaucacaauugaacugagcaacaucaaggagaauaaaugcaacggcaccgacgccaaggugaaacuuaucaagcaggaacuggauaaguauaaaaaugcugugacggagcuccagaugcugauguguuccacccccgccacagggucuggaagcgcuauugccuccggcgucgcggugugcaagguucugcaccucgagggggaagugaacaaaaucaagagcgcccugcuuucuaccaauaaagcugucgugucccugagcaacggaguuucugugcucacauuuaagguccuggaccuuaagaauuacauugauaaacagcugcucccuauccugaacaagcaauccuguagcauuucuaauaucgagaccgugauggaguuccagcagaaaaacaaucggcugcucgaaauuacgcgcgaguuuuccgugaacgccggcgucacaaccccgguuagcacauauaugcugaccaauuccgaacuucugucucucaucaacgacaugcccaucaccaacgaucagaagaaacugaugagcaauaacgugcaaauugugagacagcaguccuacagcaucaugugcauuaucaaggaggaaguccuugcuuaugugguucagcugccucucuacggcgugauugacacacccuguuggaaacugcauacgucuccucugugcaccacaaauaccaaggagggguccaacaucugucucacacggaccgaucgcggaugguacugcgacaaugccggcagcgucucuuucuuuccccaagcggaaacguguaaggugugcagcaacagaguuuucugcgauacaaugaacucccugacccuuccuucugaggugaaucuguguaaugucgacaucuuuaacccgaaauaugauugcaagauuaugaccagcaaaacagacguguccagcucugucaucaccucccucggggccauugugagcuguuacggaaagacaaaaugcacggcuucuaauaagaacaagggcaucauuaaaaccuucuccaaugggugugauuauguuagcaacaagggaguggacacagucuccgugggcaauacccuguacuauguuaacaaacaggagggcaagucucuuuacgugaaaggggaacccaucaucaacuuuuaugacccucuggucuuccccagcgaugaguuugacgccuccauuucucaggugaaugaaaagaucaaccaaagccucgcuuucauucggaaguccgaugagcugcugcacaaugugaacgccggaaaaagcacaaccaauaucaugauuacgaccaucauuaucguuaucauugucauccuccugucucuuauugccgugggccugcuccuguacugcaaggcucgcugaggacuagugaagggaacacccaaauuuaauucagccuuaagcacaauuaauuaagagugaaacguaauuguacaagcaguuggucacccaccauagggcaugaucaacaccgcaaccuuuccuuuuucccccagugauucugaaaaaccccucuucccuucagcuugcuuagauguuccaaauuuaguaagcuuaaggcggccuacagaagaaaaagaaaaaaaaggccacaaaaguucccucucacuuucaguaaauaaaauaaaagcagcaacagaaauaaagaaauaaaugaaauucaaaaugaaauaaauauuguguugugcagcauuaaaaaaucaauaaaaauuaaaaaugagcaagaucuaaaaaaaaaaaaaaaaaaaaaaaaaaaaaaaaaaaaaaaaaaaaaaaaaaaaaaaaaaaaaaaaugcaucccccccccccccccccccccccccccccccaaaggcucuuuucagagccaccagaauu

SEQ ID NO: 7482 - RNA, 2139 nt, Artificial Sequence
  mRNA product Design h-2 comprising derived and/or modified sequence from HRSV(A2)__F-del_DSCav1_mut7 (opt6)
gggagacccgugacccggaaguuguacggcuacgcgacuuucccucccacaaacccucgcgcccuuccuuuccuacuugggcccggcagaaagcuuaccauggaauuacuaauccucaaagcaaacgcaauuacaaccauacuaaccgcugucaccuuuuguuuugccucaggacaaaacauaacugaagaauuuuaccaaucaacaugcuccgcaguaucuaaaggauaccucagcgcguuaagaacaggaugguacacaucgguaauaaccaucgaauuauccaacauaaaagaaaauaaaugcaauggaacagacgcaaaagucaaauuaauuaaacaagaacuagacaaauauaaaaacgcaguaaccgaauuacaaaugcuaauguguucaacaccagcaacaggaucaggaucagcuauagcuucaggaguugccguaugcaaagugcuacacuuagaaggagaagugaauaaaauaaaaucagcucuauuaucaacgaacaaagccguaguaucucuaucaaauggcguaucaguacucacauucaaaguacucgaccuaaaaaacuauauagauaaacaacuauuacccauccuaaauaaacaaagcugcucuauaucaaacaucgaaacaguaauggaauuucaacaaaaaaacaacagacuacuagaaauaacccgagaguucucaguuaaugcaggaguaacaacaccagucucaacauacaugcucacaaacucagaacuccuaucacuaauaaaugacaugccaauaacaaacgaccaaaaaaaacucaugucuaacaacguccaaauaguaagacaacaauccuacagcauaauguguauaauaaaagaagaaguuuuagcauacgucguacaacuacccuuauauggcguaauagauacaccaugcuggaaacuccauaccucaccucuauguacaacaaauaccaaagaagguucuaauauaugccuaacacgaacugaccgaggaugguacugugacaacgcaggaucagucucuuucuuuccacaagcagaaaccugcaaaguaugcaguaaccgcguauuuugcgacacaaugaacucccuaaccuuaccaucagaaguaaacuuauguaacguagacauauucaauccaaaauaugacugcaaaauaaugacaucaaaaacagacguaagcucaucaguaauaacuucacuaggcgcaauuguaucaugcuauggaaaaaccaaauguaccgcauccaacaaaaauaaaggaauaauaaaaaccuucucuaacggaugcgacuacguaucaaacaaagguguagauacaguuucuguaggaaacacacucuacuauguaaauaaacaagaaggaaaaucacuauacguaaaaggagaaccaauaauaaacuucuaugacccacuuguauuuccaucugaugaauuugaugcaagcauaucacaaguaaacgaaaaaauaaaccaaucucuagccuuuauacgaaaaagcgacgaauuacuacauaacgucaacgcuggaaaaucaacaacaaacauaaugauaacaacaauaauaauaguaauaauagucauccuauuaucacuaaucgccguaggacuacuccuauacugcaaagcuagauaaggacuagugaagggaacacccaaauuuaauucagccuuaagcacaauuaauuaagagugaaacguaauuguacaagcaguuggucacccaccauagggcaugaucaacaccgcaaccuuuccuuuuucccccagugauucugaaaaaccccucuucccuucagcuugcuuagauguuccaaauuuaguaagcuuaaggcggccuacagaagaaaaagaaaaaaaaggccacaaaaguucccucucacuuucaguaaauaaaauaaaagcagcaacagaaauaaagaaauaaaugaaauucaaaaugaaauaaauauuguguugugcagcauuaaaaaaucaauaaaaauuaaaaaugagcaagaucuaaaaaaaaaaaaaaaaaaaaaaaaaaaaaaaaaaaaaaaaaaaaaaaaaaaaaaaaaaaaaaaaugcaucccccccccccccccccccccccccccccccaaaggcucuuuucagagccaccagaauu

SEQ ID NO: 7483 - RNA, 2139 nt, Artificial Sequence
  mRNA product Design h-2 comprising derived and/or modified sequence from HRSV(A2)__F-del_DSCav1_mut7 (opt11)
gggagacccgugacccggaaguuguacggcuacgcgacuuucccucccacaaacccucgcgcccuuccuuuccuacuugggcccggcagaaagcuuaccauggaacuccucauccucaaagccaacgccauaaccacuauccucacagcagucacuuucugcuucgccucaggacaaaacauaaccgaagaguucuaccaauccacaugcuccgccgucuccaaaggcuaccucucagcgcuccgcaccggcugguacacauccgucaucaccaucgaacuaagcaacauaaaagaaaacaaaugcaacggcaccgacgccaaaguuaaacucaucaagcaagaacucgacaaauacaaaaacgcagucacagaacuucaaaugcucaugugcuccacacccgccacagguucuggcucagcaaucgcaagcggcgucgccguaugcaaaguccuucaccucgaaggcgaagucaacaaaaucaaauccgcccuccucuccaccaauaaagcugucgucucacucuccaacggcgucagcguccucacauucaaaguccucgaccucaaaaacuacauagacaagcaacuccucccgauacucaacaaacaaagcugcucuaucuccaacaucgaaaccgucauggaguuccaacagaaaaacaaucgucuccucgaaaucacccgcgaguucucaguaaacgccggggucaccacaccagucuccaccuacaugcucaccaacuccgaacuccuuagccucauaaacgacaugcccauaaccaacgaccaaaagaaacucaugagcaacaacguacaaauaguccgacaacaauccuauuccaucauguguaucaucaaagaagaaguccucgcauacguaguccaacucccccuauacggcguaaucgacaccccauguuggaaacuccacaccucaccacucuguaccaccaacaccaaagaaggcucaaacaucugccucacccgcacagaccgcggcugguacugcgacaacgcgggcuccgucagcuucuuuccccaagcggaaaccugcaaagucugcagcaacagagucuucugcgacacuaugaacucccucacccuccccucagaagucaaccucugcaacgucgacaucuucaacccgaaauacgacugcaaaaucaugaccagcaaaacugacgucuccucguccgucaucaccucacucggcgcaaucgugagcugcuacggcaaaaccaaaugcaccgccuccaacaaaaacaaaggcaucauaaaaacauucagcaacggcugcgacuacgucucgaacaaaggagucgacaccguaucagugggcaacacccuauacuacguaaacaagcaagaaggcaaaucacucuacguaaaaggcgaacccaucaucaacuucuacgacccccucgucuuccccuccgacgaguucgacgccuccaucucucaagucaacgagaaaaucaaccaaucccuugccuucauacguaaaagcgacgaacuccuucacaacguaaacgccgggaaauccaccacuaacauaaugaucaccaccaucaucaucguuaucauagucauccuccucucucucauagcagucggccuacuccuguacugcaaagcgcgcuaaggacuagugaagggaacacccaaauuuaauucagccuuaagcacaauuaauuaagagugaaacguaauuguacaagcaguuggucacccaccauagggcaugaucaacaccgcaaccuuuccuuuuucccccagugauucugaaaaaccccucuucccuucagcuugcuuagauguuccaaauuuaguaagcuuaaggcggccuacagaagaaaaagaaaaaaaaggccacaaaaguucccucucacuuucaguaaauaaaauaaaagcagcaacagaaauaaagaaauaaaugaaauucaaaaugaaauaaauauuguguugugcagcauuaaaaaaucaauaaaaauuaaaaaugagcaagaucuaaaaaaaaaaaaaaaaaaaaaaaaaaaaaaaaaaaaaaaaaaaaaaaaaaaaaaaaaaaaaaaaugcaucccccccccccccccccccccccccccccccaaaggcucuuuucagagccaccagaauu

SEQ ID NO: 7484 - RNA, 1919 nt, Artificial Sequence
  mRNA product Design h-3 comprising derived and/or modified sequence from HRSV(A2)__F-del_DSCav1_mut7 (opt1)
gggagacccgugacccggaaguuguacggcuacgcgacuuucccucccacaaacccucgcgcccuuccuuuccuacuugggcccggcagaaagcuuaccauggagcugcucauccugaaggccaacgccaucaccaccauccugacggcggugaccuucugcuucgccagcggccagaacaucaccgaggaguucuaccaguccacgugcagcgccgucuccaagggguaccucagcgcccugcggaccggcugguacaccuccgugaucaccaucgagcugagcaacaucaaggagaacaagugcaacgggaccgacgccaaggugaagcucaucaagcaggagcuggacaaguacaagaacgcggucacggagcugcagaugcugaugugcuccaccccggcaaccggcuccggcuccgccaucgcgagcggcgucgccgugugcaaggugcugcaccucgagggggaggucaacaagaucaagagcgcccugcuguccaccaacaaggccguggugagccucuccaacggcgucagcgugcugaccuucaaggugcuggaccucaagaacuacaucgacaagcagcugcugcccauccugaacaagcagagcugcuccaucagcaacaucgagacggugauggaguuccagcagaagaacaaccggcuccuggagaucacccgcgaguucagcgugaacgccggggucaccacccccguguccacguacaugcugaccaacagcgagcuccugucccugaucaacgacaugccgaucaccaacgaccagaagaagcucaugagcaacaacgugcagaucguccggcagcaguccuacagcaucaugugcaucaucaaggaggaggugcuggcguacgugguccagcugccccucuacggcgugaucgacacccccugcuggaagcugcacacgagcccccugugcaccaccaacaccaaggagggguccaacaucugccucacgcgcaccgaccggggcugguacugcgacaacgccggcagcgucuccuucuucccgcaggccgagaccugcaaggugugcagcaaccgcguguucugcgacaccaugaacucccugacgcugcccagcgagguaaaccucugcaacgucgacaucuucaaccccaaguacgacugcaagaucaugaccuccaagaccgacgugagcuccagcgugaucaccucccugggggccaucgucagcugcuacggcaagacgaagugcaccgccagcaacaagaacaaggggaucaucaagaccuucuccaacggcugcgacuacgugagcaacaagggcguggacaccguguccgucgggaacacccuguacuacgugaacaagcaggagggcaagagccucuacgugaagggggagcccaucaucaacuucuacgacccgcuggucuuccccuccgacgaguucgacgcgagcaucucccaggugaacgagaagaucaaccagagccuggccuucauccgcaaguccgacgagcugcuccacaacgugaacgccggcaagagcacgaccaacaucaugaucaccaccaucaucaucgucaucaucgugauccugcugucccucaucgccguggggcugcugcucuacugcaaggcccggugaggacuaguggaagcauuuuccuggcugauuaaaagaaauuacucagcuauggucaucuguuccuguuagaaggcuaugcagcauauuauauacuaugcgcauguuaugaaaugcauaauaaaaaauuuuaaaaaaucuaaaagaucuaaaaaaaaaaaaaaaaaaaaaaaaaaaaaaaaaaaaaaaaaaaaaaaaaaaaaaaaaaaaaaaaugcaucccccccccccccccccccccccccccccccaaaggcucuuuucagagccaccagaauu

SEQ ID NO: 7485 - RNA, 1919 nt, Artificial Sequence
  mRNA product Design h-3 comprising derived and/or modified sequence from HRSV(A2)__F-del_DSCav1_mut7 (opt1)
gggagacccgugacccggaaguuguacggcuacgcgacuuucccucccacaaacccucgcgcccuuccuuuccuacuugggcccggcagaaagcuuaccauggagcugcucauccugaaggccaacgccaucaccaccauccugacggcggugaccuucugcuucgccagcggccagaacaucaccgaggaguucuaccaguccacgugcagcgccgucuccaagggguaccucagcgcccugcgcaccggcugguacaccuccgugaucaccaucgagcugagcaacaucaaggagaacaagugcaacgggaccgacgccaaggugaagcucaucaagcaggagcuggacaaguacaagaacgcggucacggagcugcagaugcucaugugcuccacccccgccaccggcagcggguccgccaucgccagcggcguggcggugugcaagguccugcaccuggagggcgaggugaacaagaucaaguccgcccuccugagcaccaacaaggccguggucucccugagcaacgggguguccgugcucacguucaagguccuggaccugaagaacuacaucgacaagcagcuccugccgauccugaacaagcagagcugcuccaucagcaacaucgagaccgugauggaguuccagcagaagaacaaccggcuccuggagaucacccgcgaguucuccgugaacgccggcgucaccacgcccgugagcaccuacaugcugaccaacagcgagcuccugucccugaucaacgacaugcccaucaccaacgaccagaagaagcucaugagcaacaacgugcagaucguccggcagcaguccuacagcaucaugugcaucaucaaggaggaggugcuggccuacgugguccagcugccccucuacggggugaucgacacgccgugcuggaagcugcacaccagcccccugugcaccaccaacacgaaggagggcagcaacaucugccucacccgcaccgaccgggggugguacugcgacaacgcgggcuccgugagcuucuucccccaggccgagaccugcaaggucugcuccaaccgcguguucugcgacacgaugaacagccugacccugcccuccgaggucaaccucugcaacguggacaucuucaacccgaaguacgacugcaagaucaugaccagcaagaccgacguguccagcuccgucaucacgagccugggcgccaucguguccugcuacgggaagaccaagugcaccgccagcaacaagaacaagggcaucaucaagaccuucuccaacgggugcgacuacgugagcaacaagggcgucgacacggugagcgugggcaacacccuguacuacgucaacaagcaggaggggaagucccucuacgugaagggcgagcccaucaucaacuucuacgacccccugguguuccccagcgacgaguucgacgccuccaucagccaggucaacgagaagaucaaccagucccuggcguucauccggaaguccgacgagcuccugcacaacgugaacgccgggaaguccaccaccaacaucaugaucaccacgaucaucaucgugaucaucgucauccugcucagccugaucgccgugggccugcuccuguacugcaaggcccgcugaggacuaguggaagcauuuuccuggcugauuaaaagaaauuacucagcuauggucaucuguuccuguuagaaggcuaugcagcauauuauauacuaugcgcauguuaugaaaugcauaauaaaaaauuuuaaaaaaucuaaaagaucuaaaaaaaaaaaaaaaaaaaaaaaaaaaaaaaaaaaaaaaaaaaaaaaaaaaaaaaaaaaaaaaaugcaucccccccccccccccccccccccccccccccaaaggcucuuuucagagccaccagaauu

SEQ ID NO: 7486 - RNA, 1919 nt, Artificial Sequence
  mRNA product Design h-3 comprising derived and/or modified sequence from HRSV(A2)__F-del_DSCav1_mut7 (opt2)
gggagacccgugacccggaaguuguacggcuacgcgacuuucccucccacaaacccucgcgcccuuccuuuccuacuugggcccggcagaaagcuuaccauggagcuccucauccucaaggccaacgccaucaccaccauccucaccgccgucaccuucugcuucgccuccggccagaacaucaccgaggaguucuaccaguccaccugcuccgccgucuccaagggcuaccucuccgcccuccgcaccggcugguacaccuccgucaucaccaucgagcucuccaacaucaaggagaacaagugcaacggcaccgacgccaaggucaagcucaucaagcaggagcucgacaaguacaagaacgccgucaccgagcuccagaugcucaugugcuccacccccgccaccggcuccggcuccgccaucgccuccggcgucgccgucugcaagguccuccaccucgagggcgaggucaacaagaucaaguccgcccuccucuccaccaacaaggccgucgucucccucuccaacggcgucuccguccucaccuucaagguccucgaccucaagaacuacaucgacaagcagcuccuccccauccucaacaagcaguccugcuccaucuccaacaucgagaccgucauggaguuccagcagaagaacaaccgccuccucgagaucacccgcgaguucuccgucaacgccggcgucaccacccccgucuccaccuacaugcucaccaacuccgagcuccucucccucaucaacgacaugcccaucaccaacgaccagaagaagcucauguccaacaacguccagaucguccgccagcaguccuacuccaucaugugcaucaucaaggaggagguccucgccuacgucguccagcucccccucuacggcgucaucgacacccccugcuggaagcuccacaccuccccccucugcaccaccaacaccaaggagggcuccaacaucugccucacccgcaccgaccgcggcugguacugcgacaacgccggcuccgucuccuucuucccccaggccgagaccugcaaggucugcuccaaccgcgucuucugcgacaccaugaacucccucacccuccccuccgaggucaaccucugcaacgucgacaucuucaaccccaaguacgacugcaagaucaugaccuccaagaccgacgucuccuccuccgucaucaccucccucggcgccaucgucuccugcuacggcaagaccaagugcaccgccuccaacaagaacaagggcaucaucaagaccuucuccaacggcugcgacuacgucuccaacaagggcgucgacaccgucuccgucggcaacacccucuacuacgucaacaagcaggagggcaagucccucuacgucaagggcgagcccaucaucaacuucuacgacccccucgucuuccccuccgacgaguucgacgccuccaucucccaggucaacgagaagaucaaccagucccucgccuucauccgcaaguccgacgagcuccuccacaacgucaacgccggcaaguccaccaccaacaucaugaucaccaccaucaucaucgucaucaucgucauccuccucucccucaucgccgucggccuccuccucuacugcaaggcccgcugaggacuaguggaagcauuuuccuggcugauuaaaagaaauuacucagcuauggucaucuguuccuguuagaaggcuaugcagcauauuauauacuaugcgcauguuaugaaaugcauaauaaaaaauuuuaaaaaaucuaaaagaucuaaaaaaaaaaaaaaaaaaaaaaaaaaaaaaaaaaaaaaaaaaaaaaaaaaaaaaaaaaaaaaaaugcaucccccccccccccccccccccccccccccccaaaggcucuuuucagagccaccagaauu

SEQ ID NO: 7487 - RNA, 1919 nt, Artificial Sequence
  mRNA product Design h-3 comprising derived and/or modified sequence from HRSV(A2)__F-del_DSCav1_mut7 (opt3)
gggagacccgugacccggaaguuguacggcuacgcgacuuucccucccacaaacccucgcgcccuuccuuuccuacuugggcccggcagaaagcuuaccauggagcugcucauccuuaaggccaacgcuauuaccacaauacugacugcagugacguucugcuuugccagcggccagaauaucaccgaagaguucuaccaauccacauguucugcggucucaaaaggguauuugagugcuuuaagaacuggaugguacaccagcguuauuacaaucgaacuguccaacauuaaggagaauaaaugcaacgguaccgacgccaaggugaaacuaaucaagcaggaacucgauaaguauaaaaaugcaguaacugagcugcagaugcuuauguguucuacacccgccaccggcucggggucagcuauagcaagcggaguggccgucugcaaggugcugcacuuggagggcgaaguuaacaaaaucaagagugcucuccuguccacgaauaaagccguggucucucugagcaacgguguguccguacucacuuuuaagguuuuagaccugaagaauuacauugauaaacagcuuuugccuauccugaacaagcaaucauguaguauuagcaauaucgagaccgugauggaguuccagcagaaaaacaauaggcuacucgaaauaacacgggaguuuucugucaacgcgggggugacuaccccaguguccacauauaugcugaccaauucagaacuucugagcuugauuaacgacaugccgaucacgaacgaucagaagaaacucaugaguaauaacguccaaauuguucgccagcagucuuacuccaucaugugcaucauuaaggaggaagugcuggcauauguagugcaguuaccccuguacggagucauagacacuccuuguuggaaacuccauacaagcccacuuugcaccacuaauacaaaggagggcucgaacaucugucugacccgaacggaucguggcugguacugcgacaaugccgggucuguguccuucuuuccccaagcugaaaccuguaagguuugcucaaacagaguguucugcgauacaaugaauaguuugacucuaccuagcgaggucaaccuguguaauguggacauuuuuaacccaaaauaugauugcaagaucaugaccuccaaaacagacguaucuagcucaguuauaacuagccucggagccauuguguccuguuacgguaagaccaaaugcacagcaagcaauaagaacaagggcaucaucaaaaccuucucuaaugggugugauuaugucucaaacaagggaguggacacugucagugugggcaauacgcuguacuauguuaacaaacaggaggguaagagccuuuacgugaaaggggaacccauuaucaacuuuuaugacccucugguauucccauccgaugaguuugacgcuucuauuucgcaggucaaugaaaagauaaaccaaaguuuggccuucaucaggaaguccgaugagcuccugcacaaugugaacgcgggaaaaucaacaaccaauauuaugaucacuaccaucauuauaguuaucauugugaucuuacugagucuaauugccgucggccuccugcuuuacugcaaggcacggugaggacuaguggaagcauuuuccuggcugauuaaaagaaauuacucagcuauggucaucuguuccuguuagaaggcuaugcagcauauuauauacuaugcgcauguuaugaaaugcauaauaaaaaauuuuaaaaaaucuaaaagaucuaaaaaaaaaaaaaaaaaaaaaaaaaaaaaaaaaaaaaaaaaaaaaaaaaaaaaaaaaaaaaaaaugcaucccccccccccccccccccccccccccccccaaaggcucuuuucagagccaccagaauu

SEQ ID NO: 7488 - RNA, 1919 nt, Artificial Sequence
  mRNA product Design h-3 comprising derived and/or modified sequence from HRSV(A2)__F-del_DSCav1_mut7 (opt4)
gggagacccgugacccggaaguuguacggcuacgcgacuuucccucccacaaacccucgcgcccuuccuuuccuacuugggcccggcagaaagcuuaccauggagcugcugauccugaaggccaacgccaucaccaccauccugaccgccgugaccuucugcuucgccagcggccagaacaucaccgaggaguucuaccagagcaccugcagcgccgugagcaagggcuaccugagcgcccugagaaccggcugguacaccagcgugaucaccaucgagcugagcaacaucaaggagaacaagugcaacggcaccgacgccaaggugaagcugaucaagcaggagcuggacaaguacaagaacgccgugaccgagcugcagaugcugaugugcagcacccccgccaccggcagcggcagcgccaucgccagcggcguggccgugugcaaggugcugcaccuggagggcgaggugaacaagaucaagagcgcccugcugagcaccaacaaggccguggugagccugagcaacggcgugagcgugcugaccuucaaggugcuggaccugaagaacuacaucgacaagcagcugcugcccauccugaacaagcagagcugcagcaucagcaacaucgagaccgugauggaguuccagcagaagaacaacagacugcuggagaucaccagagaguucagcgugaacgccggcgugaccacccccgugagcaccuacaugcugaccaacagcgagcugcugagccugaucaacgacaugcccaucaccaacgaccagaagaagcugaugagcaacaacgugcagaucgugagacagcagagcuacagcaucaugugcaucaucaaggaggaggugcuggccuacguggugcagcugccccuguacggcgugaucgacacccccugcuggaagcugcacaccagcccccugugcaccaccaacaccaaggagggcagcaacaucugccugaccagaaccgacagaggcugguacugcgacaacgccggcagcgugagcuucuucccccaggccgagaccugcaaggugugcagcaacagaguguucugcgacaccaugaacagccugacccugcccagcgaggugaaccugugcaacguggacaucuucaaccccaaguacgacugcaagaucaugaccagcaagaccgacgugagcagcagcgugaucaccagccugggcgccaucgugagcugcuacggcaagaccaagugcaccgccagcaacaagaacaagggcaucaucaagaccuucagcaacggcugcgacuacgugagcaacaagggcguggacaccgugagcgugggcaacacccuguacuacgugaacaagcaggagggcaagagccuguacgugaagggcgagcccaucaucaacuucuacgacccccugguguuccccagcgacgaguucgacgccagcaucagccaggugaacgagaagaucaaccagagccuggccuucaucagaaagagcgacgagcugcugcacaacgugaacgccggcaagagcaccaccaacaucaugaucaccaccaucaucaucgugaucaucgugauccugcugagccugaucgccgugggccugcugcuguacugcaaggccagaugaggacuaguggaagcauuuuccuggcugauuaaaagaaauuacucagcuauggucaucuguuccuguuagaaggcuaugcagcauauuauauacuaugcgcauguuaugaaaugcauaauaaaaaauuuuaaaaaaucuaaaagaucuaaaaaaaaaaaaaaaaaaaaaaaaaaaaaaaaaaaaaaaaaaaaaaaaaaaaaaaaaaaaaaaaugcaucccccccccccccccccccccccccccccccaaaggcucuuuucagagccaccagaauu

SEQ ID NO: 7489 - RNA, 1919 nt, Artificial Sequence
  mRNA product Design h-3 comprising derived and/or modified sequence from HRSV(A2)__F-del_DSCav1_mut7 (opt5)
gggagacccgugacccggaaguuguacggcuacgcgacuuucccucccacaaacccucgcgcccuuccuuuccuacuugggcccggcagaaagcuuaccauggagcugcucauccugaaggccaacgcuauuaccacaauccuuacggccgugaccuucugcuuugcgagcggccagaauauuacagaagaguucuaccaauccaccuguucugcugucagcaaaggguaucuguccgcccucagaacaggaugguacaccucuguuaucacaauugaacugagcaacaucaaggagaauaaaugcaacggcaccgacgccaaggugaaacuuaucaagcaggaacuggauaaguauaaaaaugcugugacggagcuccagaugcugauguguuccacccccgccacagggucuggaagcgcuauugccuccggcgucgcggugugcaagguucugcaccucgagggggaagugaacaaaaucaagagcgcccugcuuucuaccaauaaagcugucgugucccugagcaacggaguuucugugcucacauuuaagguccuggaccuuaagaauuacauugauaaacagcugcucccuauccugaacaagcaauccuguagcauuucuaauaucgagaccgugauggaguuccagcagaaaaacaaucggcugcucgaaauuacgcgcgaguuuuccgugaacgccggcgucacaaccccgguuagcacauauaugcugaccaauuccgaacuucugucucucaucaacgacaugcccaucaccaacgaucagaagaaacugaugagcaauaacgugcaaauugugagacagcaguccuacagcaucaugugcauuaucaaggaggaaguccuugcuuaugugguucagcugccucucuacggcgugauugacacacccuguuggaaacugcauacgucuccucugugcaccacaaauaccaaggagggguccaacaucugucucacacggaccgaucgcggaugguacugcgacaaugccggcagcgucucuuucuuuccccaagcggaaacguguaaggugugcagcaacagaguuuucugcgauacaaugaacucccugacccuuccuucugaggugaaucuguguaaugucgacaucuuuaacccgaaauaugauugcaagauuaugaccagcaaaacagacguguccagcucugucaucaccucccucggggccauugugagcuguuacggaaagacaaaaugcacggcuucuaauaagaacaagggcaucauuaaaaccuucuccaaugggugugauuauguuagcaacaagggaguggacacagucuccgugggcaauacccuguacuauguuaacaaacaggagggcaagucucuuuacgugaaaggggaacccaucaucaacuuuuaugacccucuggucuuccccagcgaugaguuugacgccuccauuucucaggugaaugaaaagaucaaccaaagccucgcuuucauucggaaguccgaugagcugcugcacaaugugaacgccggaaaaagcacaaccaauaucaugauuacgaccaucauuaucguuaucauugucauccuccugucucuuauugccgugggccugcuccuguacugcaaggcucgcugaggacuaguggaagcauuuuccuggcugauuaaaagaaauuacucagcuauggucaucuguuccuguuagaaggcuaugcagcauauuauauacuaugcgcauguuaugaaaugcauaauaaaaaauuuuaaaaaaucuaaaagaucuaaaaaaaaaaaaaaaaaaaaaaaaaaaaaaaaaaaaaaaaaaaaaaaaaaaaaaaaaaaaaaaaugcaucccccccccccccccccccccccccccccccaaaggcucuuuucagagccaccagaauu

SEQ ID NO: 7490 - RNA, 1919 nt, Artificial Sequence
  mRNA product Design h-3 comprising derived and/or modified sequence from HRSV(A2)__F-del_DSCav1_mut7 (opt6)
gggagacccgugacccggaaguuguacggcuacgcgacuuucccucccacaaacccucgcgcccuuccuuuccuacuugggcccggcagaaagcuuaccauggaauuacuaauccucaaagcaaacgcaauuacaaccauacuaaccgcugucaccuuuuguuuugccucaggacaaaacauaacugaagaauuuuaccaaucaacaugcuccgcaguaucuaaaggauaccucagcgcguuaagaacaggaugguacacaucgguaauaaccaucgaauuauccaacauaaaagaaaauaaaugcaauggaacagacgcaaaagucaaauuaauuaaacaagaacuagacaaauauaaaaacgcaguaaccgaauuacaaaugcuaauguguucaacaccagcaacaggaucaggaucagcuauagcuucaggaguugccguaugcaaagugcuacacuuagaaggagaagugaauaaaauaaaaucagcucuauuaucaacgaacaaagccguaguaucucuaucaaauggcguaucaguacucacauucaaaguacucgaccuaaaaaacuauauagauaaacaacuauuacccauccuaaauaaacaaagcugcucuauaucaaacaucgaaacaguaauggaauuucaacaaaaaaacaacagacuacuagaaauaacccgagaguucucaguuaaugcaggaguaacaacaccagucucaacauacaugcucacaaacucagaacuccuaucacuaauaaaugacaugccaauaacaaacgaccaaaaaaaacucaugucuaacaacguccaaauaguaagacaacaauccuacagcauaauguguauaauaaaagaagaaguuuuagcauacgucguacaacuacccuuauauggcguaauagauacaccaugcuggaaacuccauaccucaccucuauguacaacaaauaccaaagaagguucuaauauaugccuaacacgaacugaccgaggaugguacugugacaacgcaggaucagucucuuucuuuccacaagcagaaaccugcaaaguaugcaguaaccgcguauuuugcgacacaaugaacucccuaaccuuaccaucagaaguaaacuuauguaacguagacauauucaauccaaaauaugacugcaaaauaaugacaucaaaaacagacguaagcucaucaguaauaacuucacuaggcgcaauuguaucaugcuauggaaaaaccaaauguaccgcauccaacaaaaauaaaggaauaauaaaaaccuucucuaacggaugcgacuacguaucaaacaaagguguagauacaguuucuguaggaaacacacucuacuauguaaauaaacaagaaggaaaaucacuauacguaaaaggagaaccaauaauaaacuucuaugacccacuuguauuuccaucugaugaauuugaugcaagcauaucacaaguaaacgaaaaaauaaaccaaucucuagccuuuauacgaaaaagcgacgaauuacuacauaacgucaacgcuggaaaaucaacaacaaacauaaugauaacaacaauaauaauaguaauaauagucauccuauuaucacuaaucgccguaggacuacuccuauacugcaaagcuagauaaggacuaguggaagcauuuuccuggcugauuaaaagaaauuacucagcuauggucaucuguuccuguuagaaggcuaugcagcauauuauauacuaugcgcauguuaugaaaugcauaauaaaaaauuuuaaaaaaucuaaaagaucuaaaaaaaaaaaaaaaaaaaaaaaaaaaaaaaaaaaaaaaaaaaaaaaaaaaaaaaaaaaaaaaaugcaucccccccccccccccccccccccccccccccaaaggcucuuuucagagccaccagaauu

SEQ ID NO: 7491 - RNA, 1919 nt, Artificial Sequence
  mRNA product Design h-3 comprising derived and/or modified sequence from HRSV(A2)__F-del_DSCav1_mut7 (opt11)
gggagacccgugacccggaaguuguacggcuacgcgacuuucccucccacaaacccucgcgcccuuccuuuccuacuugggcccggcagaaagcuuaccauggaacuccucauccucaaagccaacgccauaaccacuauccucacagcagucacuuucugcuucgccucaggacaaaacauaaccgaagaguucuaccaauccacaugcuccgccgucuccaaaggcuaccucucagcgcuccgcaccggcugguacacauccgucaucaccaucgaacuaagcaacauaaaagaaaacaaaugcaacggcaccgacgccaaaguuaaacucaucaagcaagaacucgacaaauacaaaaacgcagucacagaacuucaaaugcucaugugcuccacacccgccacagguucuggcucagcaaucgcaagcggcgucgccguaugcaaaguccuucaccucgaaggcgaagucaacaaaaucaaauccgcccuccucuccaccaauaaagcugucgucucacucuccaacggcgucagcguccucacauucaaaguccucgaccucaaaaacuacauagacaagcaacuccucccgauacucaacaaacaaagcugcucuaucuccaacaucgaaaccgucauggaguuccaacagaaaaacaaucgucuccucgaaaucacccgcgaguucucaguaaacgccggggucaccacaccagucuccaccuacaugcucaccaacuccgaacuccuuagccucauaaacgacaugcccauaaccaacgaccaaaagaaacucaugagcaacaacguacaaauaguccgacaacaauccuauuccaucauguguaucaucaaagaagaaguccucgcauacguaguccaacucccccuauacggcguaaucgacaccccauguuggaaacuccacaccucaccacucuguaccaccaacaccaaagaaggcucaaacaucugccucacccgcacagaccgcggcugguacugcgacaacgcgggcuccgucagcuucuuuccccaagcggaaaccugcaaagucugcagcaacagagucuucugcgacacuaugaacucccucacccuccccucagaagucaaccucugcaacgucgacaucuucaacccgaaauacgacugcaaaaucaugaccagcaaaacugacgucuccucguccgucaucaccucacucggcgcaaucgugagcugcuacggcaaaaccaaaugcaccgccuccaacaaaaacaaaggcaucauaaaaacauucagcaacggcugcgacuacgucucgaacaaaggagucgacaccguaucagugggcaacacccuauacuacguaaacaagcaagaaggcaaaucacucuacguaaaaggcgaacccaucaucaacuucuacgacccccucgucuuccccuccgacgaguucgacgccuccaucucucaagucaacgagaaaaucaaccaaucccuugccuucauacguaaaagcgacgaacuccuucacaacguaaacgccgggaaauccaccacuaacauaaugaucaccaccaucaucaucguuaucauagucauccuccucucucucauagcagucggccuacuccuguacugcaaagcgcgcuaaggacuaguggaagcauuuuccuggcugauuaaaagaaauuacucagcuauggucaucuguuccuguuagaaggcuaugcagcauauuauauacuaugcgcauguuaugaaaugcauaauaaaaaauuuuaaaaaaucuaaaagaucuaaaaaaaaaaaaaaaaaaaaaaaaaaaaaaaaaaaaaaaaaaaaaaaaaaaaaaaaaaaaaaaaugcaucccccccccccccccccccccccccccccccaaaggcucuuuucagagccaccagaauu

SEQ ID NO: 7492 - RNA, 1982 nt, Artificial Sequence
  mRNA product Design h-4 comprising derived and/or modified sequence from HRSV(A2)__F-del_DSCav1_mut7 (opt1)
gggagagggcgcuuggcuugcaaggacccugagcugcggcauugaagcacacccaacccaacucgacugaagucagccucacugaaccggaucugagaaucuucucucucugggcuugccagggcucuccgaaccuagcuagcauccucuucaauuccaacuagaaagcuuaccauggagcugcucauccugaaggccaacgccaucaccaccauccugacggcggugaccuucugcuucgccagcggccagaacaucaccgaggaguucuaccaguccacgugcagcgccgucuccaagggguaccucagcgcccugcggaccggcugguacaccuccgugaucaccaucgagcugagcaacaucaaggagaacaagugcaacgggaccgacgccaaggugaagcucaucaagcaggagcuggacaaguacaagaacgcggucacggagcugcagaugcugaugugcuccaccccggcaaccggcuccggcuccgccaucgcgagcggcgucgccgugugcaaggugcugcaccucgagggggaggucaacaagaucaagagcgcccugcuguccaccaacaaggccguggugagccucuccaacggcgucagcgugcugaccuucaaggugcuggaccucaagaacuacaucgacaagcagcugcugcccauccugaacaagcagagcugcuccaucagcaacaucgagacggugauggaguuccagcagaagaacaaccggcuccuggagaucacccgcgaguucagcgugaacgccggggucaccacccccguguccacguacaugcugaccaacagcgagcuccugucccugaucaacgacaugccgaucaccaacgaccagaagaagcucaugagcaacaacgugcagaucguccggcagcaguccuacagcaucaugugcaucaucaaggaggaggugcuggcguacgugguccagcugccccucuacggcgugaucgacacccccugcuggaagcugcacacgagcccccugugcaccaccaacaccaaggagggguccaacaucugccucacgcgcaccgaccggggcugguacugcgacaacgccggcagcgucuccuucuucccgcaggccgagaccugcaaggugugcagcaaccgcguguucugcgacaccaugaacucccugacgcugcccagcgagguaaaccucugcaacgucgacaucuucaaccccaaguacgacugcaagaucaugaccuccaagaccgacgugagcuccagcgugaucaccucccugggggccaucgucagcugcuacggcaagacgaagugcaccgccagcaacaagaacaaggggaucaucaagaccuucuccaacggcugcgacuacgugagcaacaagggcguggacaccguguccgucgggaacacccuguacuacgugaacaagcaggagggcaagagccucuacgugaagggggagcccaucaucaacuucuacgacccgcuggucuuccccuccgacgaguucgacgcgagcaucucccaggugaacgagaagaucaaccagagccuggccuucauccgcaaguccgacgagcugcuccacaacgugaacgccggcaagagcacgaccaacaucaugaucaccaccaucaucaucgucaucaucgugauccugcugucccucaucgccguggggcugcugcucuacugcaaggcccggugaggacuaguaauaaggaaacuguaugaaugucugugggcaggaagugaagagauccuucuguaaagguuuuuggaauuaugucugcugaauaauaaacuuuuuugaaauaauaaaucugguagaaaaaugagaucuaaaaaaaaaaaaaaaaaaaaaaaaaaaaaaaaaaaaaaaaaaaaaaaaaaaaaaaaaaaaaaaaugcaucccccccccccccccccccccccccccccccaaaggcucuuuucagagccaccagaauu

SEQ ID NO: 7493 - RNA, 1982 nt, Artificial Sequence
  mRNA product Design h-4 comprising derived and/or modified sequence from HRSV(A2)__F-del_DSCav1_mut7 (opt1)
gggagagggcgcuuggcuugcaaggacccugagcugcggcauugaagcacacccaacccaacucgacugaagucagccucacugaaccggaucugagaaucuucucucucugggcuugccagggcucuccgaaccuagcuagcauccucuucaauuccaacuagaaagcuuaccauggagcugcucauccugaaggccaacgccaucaccaccauccugacggcggugaccuucugcuucgccagcggccagaacaucaccgaggaguucuaccaguccacgugcagcgccgucuccaagggguaccucagcgcccugcgcaccggcugguacaccuccgugaucaccaucgagcugagcaacaucaaggagaacaagugcaacgggaccgacgccaaggugaagcucaucaagcaggagcuggacaaguacaagaacgcggucacggagcugcagaugcucaugugcuccacccccgccaccggcagcggguccgccaucgccagcggcguggcggugugcaagguccugcaccuggagggcgaggugaacaagaucaaguccgcccuccugagcaccaacaaggccguggucucccugagcaacgggguguccgugcucacguucaagguccuggaccugaagaacuacaucgacaagcagcuccugccgauccugaacaagcagagcugcuccaucagcaacaucgagaccgugauggaguuccagcagaagaacaaccggcuccuggagaucacccgcgaguucuccgugaacgccggcgucaccacgcccgugagcaccuacaugcugaccaacagcgagcuccugucccugaucaacgacaugcccaucaccaacgaccagaagaagcucaugagcaacaacgugcagaucguccggcagcaguccuacagcaucaugugcaucaucaaggaggaggugcuggccuacgugguccagcugccccucuacggggugaucgacacgccgugcuggaagcugcacaccagcccccugugcaccaccaacacgaaggagggcagcaacaucugccucacccgcaccgaccgggggugguacugcgacaacgcgggcuccgugagcuucuucccccaggccgagaccugcaaggucugcuccaaccgcguguucugcgacacgaugaacagccugacccugcccuccgaggucaaccucugcaacguggacaucuucaacccgaaguacgacugcaagaucaugaccagcaagaccgacguguccagcuccgucaucacgagccugggcgccaucguguccugcuacgggaagaccaagugcaccgccagcaacaagaacaagggcaucaucaagaccuucuccaacgggugcgacuacgugagcaacaagggcgucgacacggugagcgugggcaacacccuguacuacgucaacaagcaggaggggaagucccucuacgugaagggcgagcccaucaucaacuucuacgacccccugguguuccccagcgacgaguucgacgccuccaucagccaggucaacgagaagaucaaccagucccuggcguucauccggaaguccgacgagcuccugcacaacgugaacgccgggaaguccaccaccaacaucaugaucaccacgaucaucaucgugaucaucgucauccugcucagccugaucgccgugggccugcuccuguacugcaaggcccgcugaggacuaguaauaaggaaacuguaugaaugucugugggcaggaagugaagagauccuucuguaaagguuuuuggaauuaugucugcugaauaauaaacuuuuuugaaauaauaaaucugguagaaaaaugagaucuaaaaaaaaaaaaaaaaaaaaaaaaaaaaaaaaaaaaaaaaaaaaaaaaaaaaaaaaaaaaaaaaugcaucccccccccccccccccccccccccccccccaaaggcucuuuucagagccaccagaauu

SEQ ID NO: 7494 - RNA, 1982 nt, Artificial Sequence
  mRNA product Design h-4 comprising derived and/or modified sequence from HRSV(A2)__F-del_DSCav1_mut7 (opt2)
gggagagggcgcuuggcuugcaaggacccugagcugcggcauugaagcacacccaacccaacucgacugaagucagccucacugaaccggaucugagaaucuucucucucugggcuugccagggcucuccgaaccuagcuagcauccucuucaauuccaacuagaaagcuuaccauggagcuccucauccucaaggccaacgccaucaccaccauccucaccgccgucaccuucugcuucgccuccggccagaacaucaccgaggaguucuaccaguccaccugcuccgccgucuccaagggcuaccucuccgcccuccgcaccggcugguacaccuccgucaucaccaucgagcucuccaacaucaaggagaacaagugcaacggcaccgacgccaaggucaagcucaucaagcaggagcucgacaaguacaagaacgccgucaccgagcuccagaugcucaugugcuccacccccgccaccggcuccggcuccgccaucgccuccggcgucgccgucugcaagguccuccaccucgagggcgaggucaacaagaucaaguccgcccuccucuccaccaacaaggccgucgucucccucuccaacggcgucuccguccucaccuucaagguccucgaccucaagaacuacaucgacaagcagcuccuccccauccucaacaagcaguccugcuccaucuccaacaucgagaccgucauggaguuccagcagaagaacaaccgccuccucgagaucacccgcgaguucuccgucaacgccggcgucaccacccccgucuccaccuacaugcucaccaacuccgagcuccucucccucaucaacgacaugcccaucaccaacgaccagaagaagcucauguccaacaacguccagaucguccgccagcaguccuacuccaucaugugcaucaucaaggaggagguccucgccuacgucguccagcucccccucuacggcgucaucgacacccccugcuggaagcuccacaccuccccccucugcaccaccaacaccaaggagggcuccaacaucugccucacccgcaccgaccgcggcugguacugcgacaacgccggcuccgucuccuucuucccccaggccgagaccugcaaggucugcuccaaccgcgucuucugcgacaccaugaacucccucacccuccccuccgaggucaaccucugcaacgucgacaucuucaaccccaaguacgacugcaagaucaugaccuccaagaccgacgucuccuccuccgucaucaccucccucggcgccaucgucuccugcuacggcaagaccaagugcaccgccuccaacaagaacaagggcaucaucaagaccuucuccaacggcugcgacuacgucuccaacaagggcgucgacaccgucuccgucggcaacacccucuacuacgucaacaagcaggagggcaagucccucuacgucaagggcgagcccaucaucaacuucuacgacccccucgucuuccccuccgacgaguucgacgccuccaucucccaggucaacgagaagaucaaccagucccucgccuucauccgcaaguccgacgagcuccuccacaacgucaacgccggcaaguccaccaccaacaucaugaucaccaccaucaucaucgucaucaucgucauccuccucucccucaucgccgucggccuccuccucuacugcaaggcccgcugaggacuaguaauaaggaaacuguaugaaugucugugggcaggaagugaagagauccuucuguaaagguuuuuggaauuaugucugcugaauaauaaacuuuuuugaaauaauaaaucugguagaaaaaugagaucuaaaaaaaaaaaaaaaaaaaaaaaaaaaaaaaaaaaaaaaaaaaaaaaaaaaaaaaaaaaaaaaaugcaucccccccccccccccccccccccccccccccaaaggcucuuuucagagccaccagaauu

SEQ ID NO: 7495 - RNA, 1982 nt, Artificial Sequence
  mRNA product Design h-4 comprising derived and/or modified sequence from HRSV(A2)__F-del_DSCav1_mut7 (opt3)
gggagagggcgcuuggcuugcaaggacccugagcugcggcauugaagcacacccaacccaacucgacugaagucagccucacugaaccggaucugagaaucuucucucucugggcuugccagggcucuccgaaccuagcuagcauccucuucaauuccaacuagaaagcuuaccauggagcugcucauccuuaaggccaacgcuauuaccacaauacugacugcagugacguucugcuuugccagcggccagaauaucaccgaagaguucuaccaauccacauguucugcggucucaaaaggguauuugagugcuuuaagaacuggaugguacaccagcguuauuacaaucgaacuguccaacauuaaggagaauaaaugcaacgguaccgacgccaaggugaaacuaaucaagcaggaacucgauaaguauaaaaaugcaguaacugagcugcagaugcuuauguguucuacacccgccaccggcucggggucagcuauagcaagcggaguggccgucugcaaggugcugcacuuggagggcgaaguuaacaaaaucaagagugcucuccuguccacgaauaaagccguggucucucugagcaacgguguguccguacucacuuuuaagguuuuagaccugaagaauuacauugauaaacagcuuuugccuauccugaacaagcaaucauguaguauuagcaauaucgagaccgugauggaguuccagcagaaaaacaauaggcuacucgaaauaacacgggaguuuucugucaacgcgggggugacuaccccaguguccacauauaugcugaccaauucagaacuucugagcuugauuaacgacaugccgaucacgaacgaucagaagaaacucaugaguaauaacguccaaauuguucgccagcagucuuacuccaucaugugcaucauuaaggaggaagugcuggcauauguagugcaguuaccccuguacggagucauagacacuccuuguuggaaacuccauacaagcccacuuugcaccacuaauacaaaggagggcucgaacaucugucugacccgaacggaucguggcugguacugcgacaaugccgggucuguguccuucuuuccccaagcugaaaccuguaagguuugcucaaacagaguguucugcgauacaaugaauaguuugacucuaccuagcgaggucaaccuguguaauguggacauuuuuaacccaaaauaugauugcaagaucaugaccuccaaaacagacguaucuagcucaguuauaacuagccucggagccauuguguccuguuacgguaagaccaaaugcacagcaagcaauaagaacaagggcaucaucaaaaccuucucuaaugggugugauuaugucucaaacaagggaguggacacugucagugugggcaauacgcuguacuauguuaacaaacaggaggguaagagccuuuacgugaaaggggaacccauuaucaacuuuuaugacccucugguauucccauccgaugaguuugacgcuucuauuucgcaggucaaugaaaagauaaaccaaaguuuggccuucaucaggaaguccgaugagcuccugcacaaugugaacgcgggaaaaucaacaaccaauauuaugaucacuaccaucauuauaguuaucauugugaucuuacugagucuaauugccgucggccuccugcuuuacugcaaggcacggugaggacuaguaauaaggaaacuguaugaaugucugugggcaggaagugaagagauccuucuguaaagguuuuuggaauuaugucugcugaauaauaaacuuuuuugaaauaauaaaucugguagaaaaaugagaucuaaaaaaaaaaaaaaaaaaaaaaaaaaaaaaaaaaaaaaaaaaaaaaaaaaaaaaaaaaaaaaaaugcaucccccccccccccccccccccccccccccccaaaggcucuuuucagagccaccagaauu

SEQ ID NO: 7496 - RNA, 1982 nt, Artificial Sequence
  mRNA product Design h-4 comprising derived and/or modified sequence from HRSV(A2)__F-del_DSCav1_mut7 (opt4)
gggagagggcgcuuggcuugcaaggacccugagcugcggcauugaagcacacccaacccaacucgacugaagucagccucacugaaccggaucugagaaucuucucucucugggcuugccagggcucuccgaaccuagcuagcauccucuucaauuccaacuagaaagcuuaccauggagcugcugauccugaaggccaacgccaucaccaccauccugaccgccgugaccuucugcuucgccagcggccagaacaucaccgaggaguucuaccagagcaccugcagcgccgugagcaagggcuaccugagcgcccugagaaccggcugguacaccagcgugaucaccaucgagcugagcaacaucaaggagaacaagugcaacggcaccgacgccaaggugaagcugaucaagcaggagcuggacaaguacaagaacgccgugaccgagcugcagaugcugaugugcagcacccccgccaccggcagcggcagcgccaucgccagcggcguggccgugugcaaggugcugcaccuggagggcgaggugaacaagaucaagagcgcccugcugagcaccaacaaggccguggugagccugagcaacggcgugagcgugcugaccuucaaggugcuggaccugaagaacuacaucgacaagcagcugcugcccauccugaacaagcagagcugcagcaucagcaacaucgagaccgugauggaguuccagcagaagaacaacagacugcuggagaucaccagagaguucagcgugaacgccggcgugaccacccccgugagcaccuacaugcugaccaacagcgagcugcugagccugaucaacgacaugcccaucaccaacgaccagaagaagcugaugagcaacaacgugcagaucgugagacagcagagcuacagcaucaugugcaucaucaaggaggaggugcuggccuacguggugcagcugccccuguacggcgugaucgacacccccugcuggaagcugcacaccagcccccugugcaccaccaacaccaaggagggcagcaacaucugccugaccagaaccgacagaggcugguacugcgacaacgccggcagcgugagcuucuucccccaggccgagaccugcaaggugugcagcaacagaguguucugcgacaccaugaacagccugacccugcccagcgaggugaaccugugcaacguggacaucuucaaccccaaguacgacugcaagaucaugaccagcaagaccgacgugagcagcagcgugaucaccagccugggcgccaucgugagcugcuacggcaagaccaagugcaccgccagcaacaagaacaagggcaucaucaagaccuucagcaacggcugcgacuacgugagcaacaagggcguggacaccgugagcgugggcaacacccuguacuacgugaacaagcaggagggcaagagccuguacgugaagggcgagcccaucaucaacuucuacgacccccugguguuccccagcgacgaguucgacgccagcaucagccaggugaacgagaagaucaaccagagccuggccuucaucagaaagagcgacgagcugcugcacaacgugaacgccggcaagagcaccaccaacaucaugaucaccaccaucaucaucgugaucaucgugauccugcugagccugaucgccgugggccugcugcuguacugcaaggccagaugaggacuaguaauaaggaaacuguaugaaugucugugggcaggaagugaagagauccuucuguaaagguuuuuggaauuaugucugcugaauaauaaacuuuuuugaaauaauaaaucugguagaaaaaugagaucuaaaaaaaaaaaaaaaaaaaaaaaaaaaaaaaaaaaaaaaaaaaaaaaaaaaaaaaaaaaaaaaaugcaucccccccccccccccccccccccccccccccaaaggcucuuuucagagccaccagaauu

SEQ ID NO: 7497 - RNA, 1982 nt, Artificial Sequence
  mRNA product Design h-4 comprising derived and/or modified sequence from HRSV(A2)__F-del_DSCav1_mut7 (opt5)
gggagagggcgcuuggcuugcaaggacccugagcugcggcauugaagcacacccaacccaacucgacugaagucagccucacugaaccggaucugagaaucuucucucucugggcuugccagggcucuccgaaccuagcuagcauccucuucaauuccaacuagaaagcuuaccauggagcugcucauccugaaggccaacgcuauuaccacaauccuuacggccgugaccuucugcuuugcgagcggccagaauauuacagaagaguucuaccaauccaccuguucugcugucagcaaaggguaucuguccgcccucagaacaggaugguacaccucuguuaucacaauugaacugagcaacaucaaggagaauaaaugcaacggcaccgacgccaaggugaaacuuaucaagcaggaacuggauaaguauaaaaaugcugugacggagcuccagaugcugauguguuccacccccgccacagggucuggaagcgcuauugccuccggcgucgcggugugcaagguucugcaccucgagggggaagugaacaaaaucaagagcgcccugcuuucuaccaauaaagcugucgugucccugagcaacggaguuucugugcucacauuuaagguccuggaccuuaagaauuacauugauaaacagcugcucccuauccugaacaagcaauccuguagcauuucuaauaucgagaccgugauggaguuccagcagaaaaacaaucggcugcucgaaauuacgcgcgaguuuuccgugaacgccggcgucacaaccccgguuagcacauauaugcugaccaauuccgaacuucugucucucaucaacgacaugcccaucaccaacgaucagaagaaacugaugagcaauaacgugcaaauugugagacagcaguccuacagcaucaugugcauuaucaaggaggaaguccuugcuuaugugguucagcugccucucuacggcgugauugacacacccuguuggaaacugcauacgucuccucugugcaccacaaauaccaaggagggguccaacaucugucucacacggaccgaucgcggaugguacugcgacaaugccggcagcgucucuuucuuuccccaagcggaaacguguaaggugugcagcaacagaguuuucugcgauacaaugaacucccugacccuuccuucugaggugaaucuguguaaugucgacaucuuuaacccgaaauaugauugcaagauuaugaccagcaaaacagacguguccagcucugucaucaccucccucggggccauugugagcuguuacggaaagacaaaaugcacggcuucuaauaagaacaagggcaucauuaaaaccuucuccaaugggugugauuauguuagcaacaagggaguggacacagucuccgugggcaauacccuguacuauguuaacaaacaggagggcaagucucuuuacgugaaaggggaacccaucaucaacuuuuaugacccucuggucuuccccagcgaugaguuugacgccuccauuucucaggugaaugaaaagaucaaccaaagccucgcuuucauucggaaguccgaugagcugcugcacaaugugaacgccggaaaaagcacaaccaauaucaugauuacgaccaucauuaucguuaucauugucauccuccugucucuuauugccgugggccugcuccuguacugcaaggcucgcugaggacuaguaauaaggaaacuguaugaaugucugugggcaggaagugaagagauccuucuguaaagguuuuuggaauuaugucugcugaauaauaaacuuuuuugaaauaauaaaucugguagaaaaaugagaucuaaaaaaaaaaaaaaaaaaaaaaaaaaaaaaaaaaaaaaaaaaaaaaaaaaaaaaaaaaaaaaaaugcaucccccccccccccccccccccccccccccccaaaggcucuuuucagagccaccagaauu

SEQ ID NO: 7498 - RNA, 1982 nt, Artificial Sequence
  mRNA product Design h-4 comprising derived and/or modified sequence from HRSV(A2)__F-del_DSCav1_mut7 (opt6)
gggagagggcgcuuggcuugcaaggacccugagcugcggcauugaagcacacccaacccaacucgacugaagucagccucacugaaccggaucugagaaucuucucucucugggcuugccagggcucuccgaaccuagcuagcauccucuucaauuccaacuagaaagcuuaccauggaauuacuaauccucaaagcaaacgcaauuacaaccauacuaaccgcugucaccuuuuguuuugccucaggacaaaacauaacugaagaauuuuaccaaucaacaugcuccgcaguaucuaaaggauaccucagcgcguuaagaacaggaugguacacaucgguaauaaccaucgaauuauccaacauaaaagaaaauaaaugcaauggaacagacgcaaaagucaaauuaauuaaacaagaacuagacaaauauaaaaacgcaguaaccgaauuacaaaugcuaauguguucaacaccagcaacaggaucaggaucagcuauagcuucaggaguugccguaugcaaagugcuacacuuagaaggagaagugaauaaaauaaaaucagcucuauuaucaacgaacaaagccguaguaucucuaucaaauggcguaucaguacucacauucaaaguacucgaccuaaaaaacuauauagauaaacaacuauuacccauccuaaauaaacaaagcugcucuauaucaaacaucgaaacaguaauggaauuucaacaaaaaaacaacagacuacuagaaauaacccgagaguucucaguuaaugcaggaguaacaacaccagucucaacauacaugcucacaaacucagaacuccuaucacuaauaaaugacaugccaauaacaaacgaccaaaaaaaacucaugucuaacaacguccaaauaguaagacaacaauccuacagcauaauguguauaauaaaagaagaaguuuuagcauacgucguacaacuacccuuauauggcguaauagauacaccaugcuggaaacuccauaccucaccucuauguacaacaaauaccaaagaagguucuaauauaugccuaacacgaacugaccgaggaugguacugugacaacgcaggaucagucucuuucuuuccacaagcagaaaccugcaaaguaugcaguaaccgcguauuuugcgacacaaugaacucccuaaccuuaccaucagaaguaaacuuauguaacguagacauauucaauccaaaauaugacugcaaaauaaugacaucaaaaacagacguaagcucaucaguaauaacuucacuaggcgcaauuguaucaugcuauggaaaaaccaaauguaccgcauccaacaaaaauaaaggaauaauaaaaaccuucucuaacggaugcgacuacguaucaaacaaagguguagauacaguuucuguaggaaacacacucuacuauguaaauaaacaagaaggaaaaucacuauacguaaaaggagaaccaauaauaaacuucuaugacccacuuguauuuccaucugaugaauuugaugcaagcauaucacaaguaaacgaaaaaauaaaccaaucucuagccuuuauacgaaaaagcgacgaauuacuacauaacgucaacgcuggaaaaucaacaacaaacauaaugauaacaacaauaauaauaguaauaauagucauccuauuaucacuaaucgccguaggacuacuccuauacugcaaagcuagauaaggacuaguaauaaggaaacuguaugaaugucugugggcaggaagugaagagauccuucuguaaagguuuuuggaauuaugucugcugaauaauaaacuuuuuugaaauaauaaaucugguagaaaaaugagaucuaaaaaaaaaaaaaaaaaaaaaaaaaaaaaaaaaaaaaaaaaaaaaaaaaaaaaaaaaaaaaaaaugcaucccccccccccccccccccccccccccccccaaaggcucuuuucagagccaccagaauu

SEQ ID NO: 7499 - RNA, 1982 nt, Artificial Sequence
  mRNA product Design h-4 comprising derived and/or modified sequence from HRSV(A2)__F-del_DSCav1_mut7 (opt11)
gggagagggcgcuuggcuugcaaggacccugagcugcggcauugaagcacacccaacccaacucgacugaagucagccucacugaaccggaucugagaaucuucucucucugggcuugccagggcucuccgaaccuagcuagcauccucuucaauuccaacuagaaagcuuaccauggaacuccucauccucaaagccaacgccauaaccacuauccucacagcagucacuuucugcuucgccucaggacaaaacauaaccgaagaguucuaccaauccacaugcuccgccgucuccaaaggcuaccucucagcgcuccgcaccggcugguacacauccgucaucaccaucgaacuaagcaacauaaaagaaaacaaaugcaacggcaccgacgccaaaguuaaacucaucaagcaagaacucgacaaauacaaaaacgcagucacagaacuucaaaugcucaugugcuccacacccgccacagguucuggcucagcaaucgcaagcggcgucgccguaugcaaaguccuucaccucgaaggcgaagucaacaaaaucaaauccgcccuccucuccaccaauaaagcugucgucucacucuccaacggcgucagcguccucacauucaaaguccucgaccucaaaaacuacauagacaagcaacuccucccgauacucaacaaacaaagcugcucuaucuccaacaucgaaaccgucauggaguuccaacagaaaaacaaucgucuccucgaaaucacccgcgaguucucaguaaacgccggggucaccacaccagucuccaccuacaugcucaccaacuccgaacuccuuagccucauaaacgacaugcccauaaccaacgaccaaaagaaacucaugagcaacaacguacaaauaguccgacaacaauccuauuccaucauguguaucaucaaagaagaaguccucgcauacguaguccaacucccccuauacggcguaaucgacaccccauguuggaaacuccacaccucaccacucuguaccaccaacaccaaagaaggcucaaacaucugccucacccgcacagaccgcggcugguacugcgacaacgcgggcuccgucagcuucuuuccccaagcggaaaccugcaaagucugcagcaacagagucuucugcgacacuaugaacucccucacccuccccucagaagucaaccucugcaacgucgacaucuucaacccgaaauacgacugcaaaaucaugaccagcaaaacugacgucuccucguccgucaucaccucacucggcgcaaucgugagcugcuacggcaaaaccaaaugcaccgccuccaacaaaaacaaaggcaucauaaaaacauucagcaacggcugcgacuacgucucgaacaaaggagucgacaccguaucagugggcaacacccuauacuacguaaacaagcaagaaggcaaaucacucuacguaaaaggcgaacccaucaucaacuucuacgacccccucgucuuccccuccgacgaguucgacgccuccaucucucaagucaacgagaaaaucaaccaaucccuugccuucauacguaaaagcgacgaacuccuucacaacguaaacgccgggaaauccaccacuaacauaaugaucaccaccaucaucaucguuaucauagucauccuccucucucucauagcagucggccuacuccuguacugcaaagcgcgcuaaggacuaguaauaaggaaacuguaugaaugucugugggcaggaagugaagagauccuucuguaaagguuuuuggaauuaugucugcugaauaauaaacuuuuuugaaauaauaaaucugguagaaaaaugagaucuaaaaaaaaaaaaaaaaaaaaaaaaaaaaaaaaaaaaaaaaaaaaaaaaaaaaaaaaaaaaaaaaugcaucccccccccccccccccccccccccccccccaaaggcucuuuucagagccaccagaauu

SEQ ID NO: 7500 - RNA, 1998 nt, Artificial Sequence
  mRNA product Design h-5 comprising derived and/or modified sequence from HRSV(A2)__F-del_DSCav1_mut7 (opt1)
gggagagggcgcuuggcuugcaaggacccugagcugcggcauugaagcacacccaacccaacucgacugaagucagccucacugaaccggaucugagaaucuucucucucugggcuugccagggcucuccgaaccuagcuagcauccucuucaauuccaacuagaaagcuuaccauggagcugcucauccugaaggccaacgccaucaccaccauccugacggcggugaccuucugcuucgccagcggccagaacaucaccgaggaguucuaccaguccacgugcagcgccgucuccaagggguaccucagcgcccugcggaccggcugguacaccuccgugaucaccaucgagcugagcaacaucaaggagaacaagugcaacgggaccgacgccaaggugaagcucaucaagcaggagcuggacaaguacaagaacgcggucacggagcugcagaugcugaugugcuccaccccggcaaccggcuccggcuccgccaucgcgagcggcgucgccgugugcaaggugcugcaccucgagggggaggucaacaagaucaagagcgcccugcuguccaccaacaaggccguggugagccucuccaacggcgucagcgugcugaccuucaaggugcuggaccucaagaacuacaucgacaagcagcugcugcccauccugaacaagcagagcugcuccaucagcaacaucgagacggugauggaguuccagcagaagaacaaccggcuccuggagaucacccgcgaguucagcgugaacgccggggucaccacccccguguccacguacaugcugaccaacagcgagcuccugucccugaucaacgacaugccgaucaccaacgaccagaagaagcucaugagcaacaacgugcagaucguccggcagcaguccuacagcaucaugugcaucaucaaggaggaggugcuggcguacgugguccagcugccccucuacggcgugaucgacacccccugcuggaagcugcacacgagcccccugugcaccaccaacaccaaggagggguccaacaucugccucacgcgcaccgaccggggcugguacugcgacaacgccggcagcgucuccuucuucccgcaggccgagaccugcaaggugugcagcaaccgcguguucugcgacaccaugaacucccugacgcugcccagcgagguaaaccucugcaacgucgacaucuucaaccccaaguacgacugcaagaucaugaccuccaagaccgacgugagcuccagcgugaucaccucccugggggccaucgucagcugcuacggcaagacgaagugcaccgccagcaacaagaacaaggggaucaucaagaccuucuccaacggcugcgacuacgugagcaacaagggcguggacaccguguccgucgggaacacccuguacuacgugaacaagcaggagggcaagagccucuacgugaagggggagcccaucaucaacuucuacgacccgcuggucuuccccuccgacgaguucgacgcgagcaucucccaggugaacgagaagaucaaccagagccuggccuucauccgcaaguccgacgagcugcuccacaacgugaacgccggcaagagcacgaccaacaucaugaucaccaccaucaucaucgucaucaucgugauccugcugucccucaucgccguggggcugcugcucuacugcaaggcccggugaggacuaguacuggcugcaucucccuuuccucuguccuccauccuucucccaggauggugaagggggaccugguacccagugauccccaccccaggauccuaaaucaugacuuaccugcuaauaaaaacucauuggaaaagugagaagaucuaaaaaaaaaaaaaaaaaaaaaaaaaaaaaaaaaaaaaaaaaaaaaaaaaaaaaaaaaaaaaaaaugcaucccccccccccccccccccccccccccccccaaaggcucuuuucagagccaccagaauu

SEQ ID NO: 7501 - RNA, 1998 nt, Artificial Sequence
  mRNA product Design h-5 comprising derived and/or modified sequence from HRSV(A2)__F-del_DSCav1_mut7 (opt1)
gggagagggcgcuuggcuugcaaggacccugagcugcggcauugaagcacacccaacccaacucgacugaagucagccucacugaaccggaucugagaaucuucucucucugggcuugccagggcucuccgaaccuagcuagcauccucuucaauuccaacuagaaagcuuaccauggagcugcucauccugaaggccaacgccaucaccaccauccugacggcggugaccuucugcuucgccagcggccagaacaucaccgaggaguucuaccaguccacgugcagcgccgucuccaagggguaccucagcgcccugcgcaccggcugguacaccuccgugaucaccaucgagcugagcaacaucaaggagaacaagugcaacgggaccgacgccaaggugaagcucaucaagcaggagcuggacaaguacaagaacgcggucacggagcugcagaugcucaugugcuccacccccgccaccggcagcggguccgccaucgccagcggcguggcggugugcaagguccugcaccuggagggcgaggugaacaagaucaaguccgcccuccugagcaccaacaaggccguggucucccugagcaacgggguguccgugcucacguucaagguccuggaccugaagaacuacaucgacaagcagcuccugccgauccugaacaagcagagcugcuccaucagcaacaucgagaccgugauggaguuccagcagaagaacaaccggcuccuggagaucacccgcgaguucuccgugaacgccggcgucaccacgcccgugagcaccuacaugcugaccaacagcgagcuccugucccugaucaacgacaugcccaucaccaacgaccagaagaagcucaugagcaacaacgugcagaucguccggcagcaguccuacagcaucaugugcaucaucaaggaggaggugcuggccuacgugguccagcugccccucuacggggugaucgacacgccgugcuggaagcugcacaccagcccccugugcaccaccaacacgaaggagggcagcaacaucugccucacccgcaccgaccgggggugguacugcgacaacgcgggcuccgugagcuucuucccccaggccgagaccugcaaggucugcuccaaccgcguguucugcgacacgaugaacagccugacccugcccuccgaggucaaccucugcaacguggacaucuucaacccgaaguacgacugcaagaucaugaccagcaagaccgacguguccagcuccgucaucacgagccugggcgccaucguguccugcuacgggaagaccaagugcaccgccagcaacaagaacaagggcaucaucaagaccuucuccaacgggugcgacuacgugagcaacaagggcgucgacacggugagcgugggcaacacccuguacuacgucaacaagcaggaggggaagucccucuacgugaagggcgagcccaucaucaacuucuacgacccccugguguuccccagcgacgaguucgacgccuccaucagccaggucaacgagaagaucaaccagucccuggcguucauccggaaguccgacgagcuccugcacaacgugaacgccgggaaguccaccaccaacaucaugaucaccacgaucaucaucgugaucaucgucauccugcucagccugaucgccgugggccugcuccuguacugcaaggcccgcugaggacuaguacuggcugcaucucccuuuccucuguccuccauccuucucccaggauggugaagggggaccugguacccagugauccccaccccaggauccuaaaucaugacuuaccugcuaauaaaaacucauuggaaaagugagaagaucuaaaaaaaaaaaaaaaaaaaaaaaaaaaaaaaaaaaaaaaaaaaaaaaaaaaaaaaaaaaaaaaaugcaucccccccccccccccccccccccccccccccaaaggcucuuuucagagccaccagaauu

SEQ ID NO: 7502 - RNA, 1998 nt, Artificial Sequence
  mRNA product Design h-5 comprising derived and/or modified sequence from HRSV(A2)__F-del_DSCav1_mut7 (opt2)
gggagagggcgcuuggcuugcaaggacccugagcugcggcauugaagcacacccaacccaacucgacugaagucagccucacugaaccggaucugagaaucuucucucucugggcuugccagggcucuccgaaccuagcuagcauccucuucaauuccaacuagaaagcuuaccauggagcuccucauccucaaggccaacgccaucaccaccauccucaccgccgucaccuucugcuucgccuccggccagaacaucaccgaggaguucuaccaguccaccugcuccgccgucuccaagggcuaccucuccgcccuccgcaccggcugguacaccuccgucaucaccaucgagcucuccaacaucaaggagaacaagugcaacggcaccgacgccaaggucaagcucaucaagcaggagcucgacaaguacaagaacgccgucaccgagcuccagaugcucaugugcuccacccccgccaccggcuccggcuccgccaucgccuccggcgucgccgucugcaagguccuccaccucgagggcgaggucaacaagaucaaguccgcccuccucuccaccaacaaggccgucgucucccucuccaacggcgucuccguccucaccuucaagguccucgaccucaagaacuacaucgacaagcagcuccuccccauccucaacaagcaguccugcuccaucuccaacaucgagaccgucauggaguuccagcagaagaacaaccgccuccucgagaucacccgcgaguucuccgucaacgccggcgucaccacccccgucuccaccuacaugcucaccaacuccgagcuccucucccucaucaacgacaugcccaucaccaacgaccagaagaagcucauguccaacaacguccagaucguccgccagcaguccuacuccaucaugugcaucaucaaggaggagguccucgccuacgucguccagcucccccucuacggcgucaucgacacccccugcuggaagcuccacaccuccccccucugcaccaccaacaccaaggagggcuccaacaucugccucacccgcaccgaccgcggcugguacugcgacaacgccggcuccgucuccuucuucccccaggccgagaccugcaaggucugcuccaaccgcgucuucugcgacaccaugaacucccucacccuccccuccgaggucaaccucugcaacgucgacaucuucaaccccaaguacgacugcaagaucaugaccuccaagaccgacgucuccuccuccgucaucaccucccucggcgccaucgucuccugcuacggcaagaccaagugcaccgccuccaacaagaacaagggcaucaucaagaccuucuccaacggcugcgacuacgucuccaacaagggcgucgacaccgucuccgucggcaacacccucuacuacgucaacaagcaggagggcaagucccucuacgucaagggcgagcccaucaucaacuucuacgacccccucgucuuccccuccgacgaguucgacgccuccaucucccaggucaacgagaagaucaaccagucccucgccuucauccgcaaguccgacgagcuccuccacaacgucaacgccggcaaguccaccaccaacaucaugaucaccaccaucaucaucgucaucaucgucauccuccucucccucaucgccgucggccuccuccucuacugcaaggcccgcugaggacuaguacuggcugcaucucccuuuccucuguccuccauccuucucccaggauggugaagggggaccugguacccagugauccccaccccaggauccuaaaucaugacuuaccugcuaauaaaaacucauuggaaaagugagaagaucuaaaaaaaaaaaaaaaaaaaaaaaaaaaaaaaaaaaaaaaaaaaaaaaaaaaaaaaaaaaaaaaaugcaucccccccccccccccccccccccccccccccaaaggcucuuuucagagccaccagaauu

SEQ ID NO: 7503 - RNA, 1998 nt, Artificial Sequence
  mRNA product Design h-5 comprising derived and/or modified sequence from HRSV(A2)__F-del_DSCav1_mut7 (opt3)
gggagagggcgcuuggcuugcaaggacccugagcugcggcauugaagcacacccaacccaacucgacugaagucagccucacugaaccggaucugagaaucuucucucucugggcuugccagggcucuccgaaccuagcuagcauccucuucaauuccaacuagaaagcuuaccauggagcugcucauccuuaaggccaacgcuauuaccacaauacugacugcagugacguucugcuuugccagcggccagaauaucaccgaagaguucuaccaauccacauguucugcggucucaaaaggguauuugagugcuuuaagaacuggaugguacaccagcguuauuacaaucgaacuguccaacauuaaggagaauaaaugcaacgguaccgacgccaaggugaaacuaaucaagcaggaacucgauaaguauaaaaaugcaguaacugagcugcagaugcuuauguguucuacacccgccaccggcucggggucagcuauagcaagcggaguggccgucugcaaggugcugcacuuggagggcgaaguuaacaaaaucaagagugcucuccuguccacgaauaaagccguggucucucugagcaacgguguguccguacucacuuuuaagguuuuagaccugaagaauuacauugauaaacagcuuuugccuauccugaacaagcaaucauguaguauuagcaauaucgagaccgugauggaguuccagcagaaaaacaauaggcuacucgaaauaacacgggaguuuucugucaacgcgggggugacuaccccaguguccacauauaugcugaccaauucagaacuucugagcuugauuaacgacaugccgaucacgaacgaucagaagaaacucaugaguaauaacguccaaauuguucgccagcagucuuacuccaucaugugcaucauuaaggaggaagugcuggcauauguagugcaguuaccccuguacggagucauagacacuccuuguuggaaacuccauacaagcccacuuugcaccacuaauacaaaggagggcucgaacaucugucugacccgaacggaucguggcugguacugcgacaaugccgggucuguguccuucuuuccccaagcugaaaccuguaagguuugcucaaacagaguguucugcgauacaaugaauaguuugacucuaccuagcgaggucaaccuguguaauguggacauuuuuaacccaaaauaugauugcaagaucaugaccuccaaaacagacguaucuagcucaguuauaacuagccucggagccauuguguccuguuacgguaagaccaaaugcacagcaagcaauaagaacaagggcaucaucaaaaccuucucuaaugggugugauuaugucucaaacaagggaguggacacugucagugugggcaauacgcuguacuauguuaacaaacaggaggguaagagccuuuacgugaaaggggaacccauuaucaacuuuuaugacccucugguauucccauccgaugaguuugacgcuucuauuucgcaggucaaugaaaagauaaaccaaaguuuggccuucaucaggaaguccgaugagcuccugcacaaugugaacgcgggaaaaucaacaaccaauauuaugaucacuaccaucauuauaguuaucauugugaucuuacugagucuaauugccgucggccuccugcuuuacugcaaggcacggugaggacuaguacuggcugcaucucccuuuccucuguccuccauccuucucccaggauggugaagggggaccugguacccagugauccccaccccaggauccuaaaucaugacuuaccugcuaauaaaaacucauuggaaaagugagaagaucuaaaaaaaaaaaaaaaaaaaaaaaaaaaaaaaaaaaaaaaaaaaaaaaaaaaaaaaaaaaaaaaaugcaucccccccccccccccccccccccccccccccaaaggcucuuuucagagccaccagaauu

SEQ ID NO: 7504 - RNA, 1998 nt, Artificial Sequence
  mRNA product Design h-5 comprising derived and/or modified sequence from HRSV(A2)__F-del_DSCav1_mut7 (opt4)
gggagagggcgcuuggcuugcaaggacccugagcugcggcauugaagcacacccaacccaacucgacugaagucagccucacugaaccggaucugagaaucuucucucucugggcuugccagggcucuccgaaccuagcuagcauccucuucaauuccaacuagaaagcuuaccauggagcugcugauccugaaggccaacgccaucaccaccauccugaccgccgugaccuucugcuucgccagcggccagaacaucaccgaggaguucuaccagagcaccugcagcgccgugagcaagggcuaccugagcgcccugagaaccggcugguacaccagcgugaucaccaucgagcugagcaacaucaaggagaacaagugcaacggcaccgacgccaaggugaagcugaucaagcaggagcuggacaaguacaagaacgccgugaccgagcugcagaugcugaugugcagcacccccgccaccggcagcggcagcgccaucgccagcggcguggccgugugcaaggugcugcaccuggagggcgaggugaacaagaucaagagcgcccugcugagcaccaacaaggccguggugagccugagcaacggcgugagcgugcugaccuucaaggugcuggaccugaagaacuacaucgacaagcagcugcugcccauccugaacaagcagagcugcagcaucagcaacaucgagaccgugauggaguuccagcagaagaacaacagacugcuggagaucaccagagaguucagcgugaacgccggcgugaccacccccgugagcaccuacaugcugaccaacagcgagcugcugagccugaucaacgacaugcccaucaccaacgaccagaagaagcugaugagcaacaacgugcagaucgugagacagcagagcuacagcaucaugugcaucaucaaggaggaggugcuggccuacguggugcagcugccccuguacggcgugaucgacacccccugcuggaagcugcacaccagcccccugugcaccaccaacaccaaggagggcagcaacaucugccugaccagaaccgacagaggcugguacugcgacaacgccggcagcgugagcuucuucccccaggccgagaccugcaaggugugcagcaacagaguguucugcgacaccaugaacagccugacccugcccagcgaggugaaccugugcaacguggacaucuucaaccccaaguacgacugcaagaucaugaccagcaagaccgacgugagcagcagcgugaucaccagccugggcgccaucgugagcugcuacggcaagaccaagugcaccgccagcaacaagaacaagggcaucaucaagaccuucagcaacggcugcgacuacgugagcaacaagggcguggacaccgugagcgugggcaacacccuguacuacgugaacaagcaggagggcaagagccuguacgugaagggcgagcccaucaucaacuucuacgacccccugguguuccccagcgacgaguucgacgccagcaucagccaggugaacgagaagaucaaccagagccuggccuucaucagaaagagcgacgagcugcugcacaacgugaacgccggcaagagcaccaccaacaucaugaucaccaccaucaucaucgugaucaucgugauccugcugagccugaucgccgugggccugcugcuguacugcaaggccagaugaggacuaguacuggcugcaucucccuuuccucuguccuccauccuucucccaggauggugaagggggaccugguacccagugauccccaccccaggauccuaaaucaugacuuaccugcuaauaaaaacucauuggaaaagugagaagaucuaaaaaaaaaaaaaaaaaaaaaaaaaaaaaaaaaaaaaaaaaaaaaaaaaaaaaaaaaaaaaaaaugcaucccccccccccccccccccccccccccccccaaaggcucuuuucagagccaccagaauu

SEQ ID NO: 7505 - RNA, 1998 nt, Artificial Sequence
  mRNA product Design h-5 comprising derived and/or modified sequence from HRSV(A2)__F-del_DSCav1_mut7 (opt5)
gggagagggcgcuuggcuugcaaggacccugagcugcggcauugaagcacacccaacccaacucgacugaagucagccucacugaaccggaucugagaaucuucucucucugggcuugccagggcucuccgaaccuagcuagcauccucuucaauuccaacuagaaagcuuaccauggagcugcucauccugaaggccaacgcuauuaccacaauccuuacggccgugaccuucugcuuugcgagcggccagaauauuacagaagaguucuaccaauccaccuguucugcugucagcaaaggguaucuguccgcccucagaacaggaugguacaccucuguuaucacaauugaacugagcaacaucaaggagaauaaaugcaacggcaccgacgccaaggugaaacuuaucaagcaggaacuggauaaguauaaaaaugcugugacggagcuccagaugcugauguguuccacccccgccacagggucuggaagcgcuauugccuccggcgucgcggugugcaagguucugcaccucgagggggaagugaacaaaaucaagagcgcccugcuuucuaccaauaaagcugucgugucccugagcaacggaguuucugugcucacauuuaagguccuggaccuuaagaauuacauugauaaacagcugcucccuauccugaacaagcaauccuguagcauuucuaauaucgagaccgugauggaguuccagcagaaaaacaaucggcugcucgaaauuacgcgcgaguuuuccgugaacgccggcgucacaaccccgguuagcacauauaugcugaccaauuccgaacuucugucucucaucaacgacaugcccaucaccaacgaucagaagaaacugaugagcaauaacgugcaaauugugagacagcaguccuacagcaucaugugcauuaucaaggaggaaguccuugcuuaugugguucagcugccucucuacggcgugauugacacacccuguuggaaacugcauacgucuccucugugcaccacaaauaccaaggagggguccaacaucugucucacacggaccgaucgcggaugguacugcgacaaugccggcagcgucucuuucuuuccccaagcggaaacguguaaggugugcagcaacagaguuuucugcgauacaaugaacucccugacccuuccuucugaggugaaucuguguaaugucgacaucuuuaacccgaaauaugauugcaagauuaugaccagcaaaacagacguguccagcucugucaucaccucccucggggccauugugagcuguuacggaaagacaaaaugcacggcuucuaauaagaacaagggcaucauuaaaaccuucuccaaugggugugauuauguuagcaacaagggaguggacacagucuccgugggcaauacccuguacuauguuaacaaacaggagggcaagucucuuuacgugaaaggggaacccaucaucaacuuuuaugacccucuggucuuccccagcgaugaguuugacgccuccauuucucaggugaaugaaaagaucaaccaaagccucgcuuucauucggaaguccgaugagcugcugcacaaugugaacgccggaaaaagcacaaccaauaucaugauuacgaccaucauuaucguuaucauugucauccuccugucucuuauugccgugggccugcuccuguacugcaaggcucgcugaggacuaguacuggcugcaucucccuuuccucuguccuccauccuucucccaggauggugaagggggaccugguacccagugauccccaccccaggauccuaaaucaugacuuaccugcuaauaaaaacucauuggaaaagugagaagaucuaaaaaaaaaaaaaaaaaaaaaaaaaaaaaaaaaaaaaaaaaaaaaaaaaaaaaaaaaaaaaaaaugcaucccccccccccccccccccccccccccccccaaaggcucuuuucagagccaccagaauu

SEQ ID NO: 7506 - RNA, 1998 nt, Artificial Sequence
  mRNA product Design h-5 comprising derived and/or modified sequence from HRSV(A2)__F-del_DSCav1_mut7 (opt6)
gggagagggcgcuuggcuugcaaggacccugagcugcggcauugaagcacacccaacccaacucgacugaagucagccucacugaaccggaucugagaaucuucucucucugggcuugccagggcucuccgaaccuagcuagcauccucuucaauuccaacuagaaagcuuaccauggaauuacuaauccucaaagcaaacgcaauuacaaccauacuaaccgcugucaccuuuuguuuugccucaggacaaaacauaacugaagaauuuuaccaaucaacaugcuccgcaguaucuaaaggauaccucagcgcguuaagaacaggaugguacacaucgguaauaaccaucgaauuauccaacauaaaagaaaauaaaugcaauggaacagacgcaaaagucaaauuaauuaaacaagaacuagacaaauauaaaaacgcaguaaccgaauuacaaaugcuaauguguucaacaccagcaacaggaucaggaucagcuauagcuucaggaguugccguaugcaaagugcuacacuuagaaggagaagugaauaaaauaaaaucagcucuauuaucaacgaacaaagccguaguaucucuaucaaauggcguaucaguacucacauucaaaguacucgaccuaaaaaacuauauagauaaacaacuauuacccauccuaaauaaacaaagcugcucuauaucaaacaucgaaacaguaauggaauuucaacaaaaaaacaacagacuacuagaaauaacccgagaguucucaguuaaugcaggaguaacaacaccagucucaacauacaugcucacaaacucagaacuccuaucacuaauaaaugacaugccaauaacaaacgaccaaaaaaaacucaugucuaacaacguccaaauaguaagacaacaauccuacagcauaauguguauaauaaaagaagaaguuuuagcauacgucguacaacuacccuuauauggcguaauagauacaccaugcuggaaacuccauaccucaccucuauguacaacaaauaccaaagaagguucuaauauaugccuaacacgaacugaccgaggaugguacugugacaacgcaggaucagucucuuucuuuccacaagcagaaaccugcaaaguaugcaguaaccgcguauuuugcgacacaaugaacucccuaaccuuaccaucagaaguaaacuuauguaacguagacauauucaauccaaaauaugacugcaaaauaaugacaucaaaaacagacguaagcucaucaguaauaacuucacuaggcgcaauuguaucaugcuauggaaaaaccaaauguaccgcauccaacaaaaauaaaggaauaauaaaaaccuucucuaacggaugcgacuacguaucaaacaaagguguagauacaguuucuguaggaaacacacucuacuauguaaauaaacaagaaggaaaaucacuauacguaaaaggagaaccaauaauaaacuucuaugacccacuuguauuuccaucugaugaauuugaugcaagcauaucacaaguaaacgaaaaaauaaaccaaucucuagccuuuauacgaaaaagcgacgaauuacuacauaacgucaacgcuggaaaaucaacaacaaacauaaugauaacaacaauaauaauaguaauaauagucauccuauuaucacuaaucgccguaggacuacuccuauacugcaaagcuagauaaggacuaguacuggcugcaucucccuuuccucuguccuccauccuucucccaggauggugaagggggaccugguacccagugauccccaccccaggauccuaaaucaugacuuaccugcuaauaaaaacucauuggaaaagugagaagaucuaaaaaaaaaaaaaaaaaaaaaaaaaaaaaaaaaaaaaaaaaaaaaaaaaaaaaaaaaaaaaaaaugcaucccccccccccccccccccccccccccccccaaaggcucuuuucagagccaccagaauu

SEQ ID NO: 7507 - RNA, 1998 nt, Artificial Sequence
  mRNA product Design h-5 comprising derived and/or modified sequence from HRSV(A2)__F-del_DSCav1_mut7 (opt11)
gggagagggcgcuuggcuugcaaggacccugagcugcggcauugaagcacacccaacccaacucgacugaagucagccucacugaaccggaucugagaaucuucucucucugggcuugccagggcucuccgaaccuagcuagcauccucuucaauuccaacuagaaagcuuaccauggaacuccucauccucaaagccaacgccauaaccacuauccucacagcagucacuuucugcuucgccucaggacaaaacauaaccgaagaguucuaccaauccacaugcuccgccgucuccaaaggcuaccucucagcgcuccgcaccggcugguacacauccgucaucaccaucgaacuaagcaacauaaaagaaaacaaaugcaacggcaccgacgccaaaguuaaacucaucaagcaagaacucgacaaauacaaaaacgcagucacagaacuucaaaugcucaugugcuccacacccgccacagguucuggcucagcaaucgcaagcggcgucgccguaugcaaaguccuucaccucgaaggcgaagucaacaaaaucaaauccgcccuccucuccaccaauaaagcugucgucucacucuccaacggcgucagcguccucacauucaaaguccucgaccucaaaaacuacauagacaagcaacuccucccgauacucaacaaacaaagcugcucuaucuccaacaucgaaaccgucauggaguuccaacagaaaaacaaucgucuccucgaaaucacccgcgaguucucaguaaacgccggggucaccacaccagucuccaccuacaugcucaccaacuccgaacuccuuagccucauaaacgacaugcccauaaccaacgaccaaaagaaacucaugagcaacaacguacaaauaguccgacaacaauccuauuccaucauguguaucaucaaagaagaaguccucgcauacguaguccaacucccccuauacggcguaaucgacaccccauguuggaaacuccacaccucaccacucuguaccaccaacaccaaagaaggcucaaacaucugccucacccgcacagaccgcggcugguacugcgacaacgcgggcuccgucagcuucuuuccccaagcggaaaccugcaaagucugcagcaacagagucuucugcgacacuaugaacucccucacccuccccucagaagucaaccucugcaacgucgacaucuucaacccgaaauacgacugcaaaaucaugaccagcaaaacugacgucuccucguccgucaucaccucacucggcgcaaucgugagcugcuacggcaaaaccaaaugcaccgccuccaacaaaaacaaaggcaucauaaaaacauucagcaacggcugcgacuacgucucgaacaaaggagucgacaccguaucagugggcaacacccuauacuacguaaacaagcaagaaggcaaaucacucuacguaaaaggcgaacccaucaucaacuucuacgacccccucgucuuccccuccgacgaguucgacgccuccaucucucaagucaacgagaaaaucaaccaaucccuugccuucauacguaaaagcgacgaacuccuucacaacguaaacgccgggaaauccaccacuaacauaaugaucaccaccaucaucaucguuaucauagucauccuccucucucucauagcagucggccuacuccuguacugcaaagcgcgcuaaggacuaguacuggcugcaucucccuuuccucuguccuccauccuucucccaggauggugaagggggaccugguacccagugauccccaccccaggauccuaaaucaugacuuaccugcuaauaaaaacucauuggaaaagugagaagaucuaaaaaaaaaaaaaaaaaaaaaaaaaaaaaaaaaaaaaaaaaaaaaaaaaaaaaaaaaaaaaaaaugcaucccccccccccccccccccccccccccccccaaaggcucuuuucagagccaccagaauu

SEQ ID NO: 7508 - RNA, 1931 nt, Artificial Sequence
  mRNA product Design i-1 comprising derived and/or modified sequence from HRSV(A2)__F-del_DSCav1_mut7 (opt1)
gggagagggcgcuuggcuugcaaggacccugagcugcggcauugaagcacacccaacccaacucgacugaagucagccucacugaaccggaucugagaaucuucucucucugggcuugccagggcucuccgaaccuagcuagcauccucuucaauuccaacuagaaagcuuaccauggagcugcucauccugaaggccaacgccaucaccaccauccugacggcggugaccuucugcuucgccagcggccagaacaucaccgaggaguucuaccaguccacgugcagcgccgucuccaagggguaccucagcgcccugcggaccggcugguacaccuccgugaucaccaucgagcugagcaacaucaaggagaacaagugcaacgggaccgacgccaaggugaagcucaucaagcaggagcuggacaaguacaagaacgcggucacggagcugcagaugcugaugugcuccaccccggcaaccggcuccggcuccgccaucgcgagcggcgucgccgugugcaaggugcugcaccucgagggggaggucaacaagaucaagagcgcccugcuguccaccaacaaggccguggugagccucuccaacggcgucagcgugcugaccuucaaggugcuggaccucaagaacuacaucgacaagcagcugcugcccauccugaacaagcagagcugcuccaucagcaacaucgagacggugauggaguuccagcagaagaacaaccggcuccuggagaucacccgcgaguucagcgugaacgccggggucaccacccccguguccacguacaugcugaccaacagcgagcuccugucccugaucaacgacaugccgaucaccaacgaccagaagaagcucaugagcaacaacgugcagaucguccggcagcaguccuacagcaucaugugcaucaucaaggaggaggugcuggcguacgugguccagcugccccucuacggcgugaucgacacccccugcuggaagcugcacacgagcccccugugcaccaccaacaccaaggagggguccaacaucugccucacgcgcaccgaccggggcugguacugcgacaacgccggcagcgucuccuucuucccgcaggccgagaccugcaaggugugcagcaaccgcguguucugcgacaccaugaacucccugacgcugcccagcgagguaaaccucugcaacgucgacaucuucaaccccaaguacgacugcaagaucaugaccuccaagaccgacgugagcuccagcgugaucaccucccugggggccaucgucagcugcuacggcaagacgaagugcaccgccagcaacaagaacaaggggaucaucaagaccuucuccaacggcugcgacuacgugagcaacaagggcguggacaccguguccgucgggaacacccuguacuacgugaacaagcaggagggcaagagccucuacgugaagggggagcccaucaucaacuucuacgacccgcuggucuuccccuccgacgaguucgacgcgagcaucucccaggugaacgagaagaucaaccagagccuggccuucauccgcaaguccgacgagcugcuccacaacgugaacgccggcaagagcacgaccaacaucaugaucaccaccaucaucaucgucaucaucgugauccugcugucccucaucgccguggggcugcugcucuacugcaaggcccggugaggacuaguguccaccugucccuccugggcugcuggauugucucguuuuccugccaaauaaacaggaucagcgcuuuacagaucuaaaaaaaaaaaaaaaaaaaaaaaaaaaaaaaaaaaaaaaaaaaaaaaaaaaaaaaaaaaaaaaaugcaucccccccccccccccccccccccccccccccaaaggcucuuuucagagccaccagaauu

SEQ ID NO: 7509 - RNA, 1931 nt, Artificial Sequence
  mRNA product Design i-1 comprising derived and/or modified sequence from HRSV(A2)__F-del_DSCav1_mut7 (opt1)
gggagagggcgcuuggcuugcaaggacccugagcugcggcauugaagcacacccaacccaacucgacugaagucagccucacugaaccggaucugagaaucuucucucucugggcuugccagggcucuccgaaccuagcuagcauccucuucaauuccaacuagaaagcuuaccauggagcugcucauccugaaggccaacgccaucaccaccauccugacggcggugaccuucugcuucgccagcggccagaacaucaccgaggaguucuaccaguccacgugcagcgccgucuccaagggguaccucagcgcccugcgcaccggcugguacaccuccgugaucaccaucgagcugagcaacaucaaggagaacaagugcaacgggaccgacgccaaggugaagcucaucaagcaggagcuggacaaguacaagaacgcggucacggagcugcagaugcucaugugcuccacccccgccaccggcagcggguccgccaucgccagcggcguggcggugugcaagguccugcaccuggagggcgaggugaacaagaucaaguccgcccuccugagcaccaacaaggccguggucucccugagcaacgggguguccgugcucacguucaagguccuggaccugaagaacuacaucgacaagcagcuccugccgauccugaacaagcagagcugcuccaucagcaacaucgagaccgugauggaguuccagcagaagaacaaccggcuccuggagaucacccgcgaguucuccgugaacgccggcgucaccacgcccgugagcaccuacaugcugaccaacagcgagcuccugucccugaucaacgacaugcccaucaccaacgaccagaagaagcucaugagcaacaacgugcagaucguccggcagcaguccuacagcaucaugugcaucaucaaggaggaggugcuggccuacgugguccagcugccccucuacggggugaucgacacgccgugcuggaagcugcacaccagcccccugugcaccaccaacacgaaggagggcagcaacaucugccucacccgcaccgaccgggggugguacugcgacaacgcgggcuccgugagcuucuucccccaggccgagaccugcaaggucugcuccaaccgcguguucugcgacacgaugaacagccugacccugcccuccgaggucaaccucugcaacguggacaucuucaacccgaaguacgacugcaagaucaugaccagcaagaccgacguguccagcuccgucaucacgagccugggcgccaucguguccugcuacgggaagaccaagugcaccgccagcaacaagaacaagggcaucaucaagaccuucuccaacgggugcgacuacgugagcaacaagggcgucgacacggugagcgugggcaacacccuguacuacgucaacaagcaggaggggaagucccucuacgugaagggcgagcccaucaucaacuucuacgacccccugguguuccccagcgacgaguucgacgccuccaucagccaggucaacgagaagaucaaccagucccuggcguucauccggaaguccgacgagcuccugcacaacgugaacgccgggaaguccaccaccaacaucaugaucaccacgaucaucaucgugaucaucgucauccugcucagccugaucgccgugggccugcuccuguacugcaaggcccgcugaggacuaguguccaccugucccuccugggcugcuggauugucucguuuuccugccaaauaaacaggaucagcgcuuuacagaucuaaaaaaaaaaaaaaaaaaaaaaaaaaaaaaaaaaaaaaaaaaaaaaaaaaaaaaaaaaaaaaaaugcaucccccccccccccccccccccccccccccccaaaggcucuuuucagagccaccagaauu

SEQ ID NO: 7510 - RNA, 1931 nt, Artificial Sequence
  mRNA product Design i-1 comprising derived and/or modified sequence from HRSV(A2)__F-del_DSCav1_mut7 (opt2)
gggagagggcgcuuggcuugcaaggacccugagcugcggcauugaagcacacccaacccaacucgacugaagucagccucacugaaccggaucugagaaucuucucucucugggcuugccagggcucuccgaaccuagcuagcauccucuucaauuccaacuagaaagcuuaccauggagcuccucauccucaaggccaacgccaucaccaccauccucaccgccgucaccuucugcuucgccuccggccagaacaucaccgaggaguucuaccaguccaccugcuccgccgucuccaagggcuaccucuccgcccuccgcaccggcugguacaccuccgucaucaccaucgagcucuccaacaucaaggagaacaagugcaacggcaccgacgccaaggucaagcucaucaagcaggagcucgacaaguacaagaacgccgucaccgagcuccagaugcucaugugcuccacccccgccaccggcuccggcuccgccaucgccuccggcgucgccgucugcaagguccuccaccucgagggcgaggucaacaagaucaaguccgcccuccucuccaccaacaaggccgucgucucccucuccaacggcgucuccguccucaccuucaagguccucgaccucaagaacuacaucgacaagcagcuccuccccauccucaacaagcaguccugcuccaucuccaacaucgagaccgucauggaguuccagcagaagaacaaccgccuccucgagaucacccgcgaguucuccgucaacgccggcgucaccacccccgucuccaccuacaugcucaccaacuccgagcuccucucccucaucaacgacaugcccaucaccaacgaccagaagaagcucauguccaacaacguccagaucguccgccagcaguccuacuccaucaugugcaucaucaaggaggagguccucgccuacgucguccagcucccccucuacggcgucaucgacacccccugcuggaagcuccacaccuccccccucugcaccaccaacaccaaggagggcuccaacaucugccucacccgcaccgaccgcggcugguacugcgacaacgccggcuccgucuccuucuucccccaggccgagaccugcaaggucugcuccaaccgcgucuucugcgacaccaugaacucccucacccuccccuccgaggucaaccucugcaacgucgacaucuucaaccccaaguacgacugcaagaucaugaccuccaagaccgacgucuccuccuccgucaucaccucccucggcgccaucgucuccugcuacggcaagaccaagugcaccgccuccaacaagaacaagggcaucaucaagaccuucuccaacggcugcgacuacgucuccaacaagggcgucgacaccgucuccgucggcaacacccucuacuacgucaacaagcaggagggcaagucccucuacgucaagggcgagcccaucaucaacuucuacgacccccucgucuuccccuccgacgaguucgacgccuccaucucccaggucaacgagaagaucaaccagucccucgccuucauccgcaaguccgacgagcuccuccacaacgucaacgccggcaaguccaccaccaacaucaugaucaccaccaucaucaucgucaucaucgucauccuccucucccucaucgccgucggccuccuccucuacugcaaggcccgcugaggacuaguguccaccugucccuccugggcugcuggauugucucguuuuccugccaaauaaacaggaucagcgcuuuacagaucuaaaaaaaaaaaaaaaaaaaaaaaaaaaaaaaaaaaaaaaaaaaaaaaaaaaaaaaaaaaaaaaaugcaucccccccccccccccccccccccccccccccaaaggcucuuuucagagccaccagaauu

SEQ ID NO: 7511 - RNA, 1931 nt, Artificial Sequence
  mRNA product Design i-1 comprising derived and/or modified sequence from HRSV(A2)__F-del_DSCav1_mut7 (opt3)
gggagagggcgcuuggcuugcaaggacccugagcugcggcauugaagcacacccaacccaacucgacugaagucagccucacugaaccggaucugagaaucuucucucucugggcuugccagggcucuccgaaccuagcuagcauccucuucaauuccaacuagaaagcuuaccauggagcugcucauccuuaaggccaacgcuauuaccacaauacugacugcagugacguucugcuuugccagcggccagaauaucaccgaagaguucuaccaauccacauguucugcggucucaaaaggguauuugagugcuuuaagaacuggaugguacaccagcguuauuacaaucgaacuguccaacauuaaggagaauaaaugcaacgguaccgacgccaaggugaaacuaaucaagcaggaacucgauaaguauaaaaaugcaguaacugagcugcagaugcuuauguguucuacacccgccaccggcucggggucagcuauagcaagcggaguggccgucugcaaggugcugcacuuggagggcgaaguuaacaaaaucaagagugcucuccuguccacgaauaaagccguggucucucugagcaacgguguguccguacucacuuuuaagguuuuagaccugaagaauuacauugauaaacagcuuuugccuauccugaacaagcaaucauguaguauuagcaauaucgagaccgugauggaguuccagcagaaaaacaauaggcuacucgaaauaacacgggaguuuucugucaacgcgggggugacuaccccaguguccacauauaugcugaccaauucagaacuucugagcuugauuaacgacaugccgaucacgaacgaucagaagaaacucaugaguaauaacguccaaauuguucgccagcagucuuacuccaucaugugcaucauuaaggaggaagugcuggcauauguagugcaguuaccccuguacggagucauagacacuccuuguuggaaacuccauacaagcccacuuugcaccacuaauacaaaggagggcucgaacaucugucugacccgaacggaucguggcugguacugcgacaaugccgggucuguguccuucuuuccccaagcugaaaccuguaagguuugcucaaacagaguguucugcgauacaaugaauaguuugacucuaccuagcgaggucaaccuguguaauguggacauuuuuaacccaaaauaugauugcaagaucaugaccuccaaaacagacguaucuagcucaguuauaacuagccucggagccauuguguccuguuacgguaagaccaaaugcacagcaagcaauaagaacaagggcaucaucaaaaccuucucuaaugggugugauuaugucucaaacaagggaguggacacugucagugugggcaauacgcuguacuauguuaacaaacaggaggguaagagccuuuacgugaaaggggaacccauuaucaacuuuuaugacccucugguauucccauccgaugaguuugacgcuucuauuucgcaggucaaugaaaagauaaaccaaaguuuggccuucaucaggaaguccgaugagcuccugcacaaugugaacgcgggaaaaucaacaaccaauauuaugaucacuaccaucauuauaguuaucauugugaucuuacugagucuaauugccgucggccuccugcuuuacugcaaggcacggugaggacuaguguccaccugucccuccugggcugcuggauugucucguuuuccugccaaauaaacaggaucagcgcuuuacagaucuaaaaaaaaaaaaaaaaaaaaaaaaaaaaaaaaaaaaaaaaaaaaaaaaaaaaaaaaaaaaaaaaugcaucccccccccccccccccccccccccccccccaaaggcucuuuucagagccaccagaauu

SEQ ID NO: 7512 - RNA, 1931 nt, Artificial Sequence
  mRNA product Design i-1 comprising derived and/or modified sequence from HRSV(A2)__F-del_DSCav1_mut7 (opt4)
gggagagggcgcuuggcuugcaaggacccugagcugcggcauugaagcacacccaacccaacucgacugaagucagccucacugaaccggaucugagaaucuucucucucugggcuugccagggcucuccgaaccuagcuagcauccucuucaauuccaacuagaaagcuuaccauggagcugcugauccugaaggccaacgccaucaccaccauccugaccgccgugaccuucugcuucgccagcggccagaacaucaccgaggaguucuaccagagcaccugcagcgccgugagcaagggcuaccugagcgcccugagaaccggcugguacaccagcgugaucaccaucgagcugagcaacaucaaggagaacaagugcaacggcaccgacgccaaggugaagcugaucaagcaggagcuggacaaguacaagaacgccgugaccgagcugcagaugcugaugugcagcacccccgccaccggcagcggcagcgccaucgccagcggcguggccgugugcaaggugcugcaccuggagggcgaggugaacaagaucaagagcgcccugcugagcaccaacaaggccguggugagccugagcaacggcgugagcgugcugaccuucaaggugcuggaccugaagaacuacaucgacaagcagcugcugcccauccugaacaagcagagcugcagcaucagcaacaucgagaccgugauggaguuccagcagaagaacaacagacugcuggagaucaccagagaguucagcgugaacgccggcgugaccacccccgugagcaccuacaugcugaccaacagcgagcugcugagccugaucaacgacaugcccaucaccaacgaccagaagaagcugaugagcaacaacgugcagaucgugagacagcagagcuacagcaucaugugcaucaucaaggaggaggugcuggccuacguggugcagcugccccuguacggcgugaucgacacccccugcuggaagcugcacaccagcccccugugcaccaccaacaccaaggagggcagcaacaucugccugaccagaaccgacagaggcugguacugcgacaacgccggcagcgugagcuucuucccccaggccgagaccugcaaggugugcagcaacagaguguucugcgacaccaugaacagccugacccugcccagcgaggugaaccugugcaacguggacaucuucaaccccaaguacgacugcaagaucaugaccagcaagaccgacgugagcagcagcgugaucaccagccugggcgccaucgugagcugcuacggcaagaccaagugcaccgccagcaacaagaacaagggcaucaucaagaccuucagcaacggcugcgacuacgugagcaacaagggcguggacaccgugagcgugggcaacacccuguacuacgugaacaagcaggagggcaagagccuguacgugaagggcgagcccaucaucaacuucuacgacccccugguguuccccagcgacgaguucgacgccagcaucagccaggugaacgagaagaucaaccagagccuggccuucaucagaaagagcgacgagcugcugcacaacgugaacgccggcaagagcaccaccaacaucaugaucaccaccaucaucaucgugaucaucgugauccugcugagccugaucgccgugggccugcugcuguacugcaaggccagaugaggacuaguguccaccugucccuccugggcugcuggauugucucguuuuccugccaaauaaacaggaucagcgcuuuacagaucuaaaaaaaaaaaaaaaaaaaaaaaaaaaaaaaaaaaaaaaaaaaaaaaaaaaaaaaaaaaaaaaaugcaucccccccccccccccccccccccccccccccaaaggcucuuuucagagccaccagaauu

SEQ ID NO: 7513 - RNA, 1931 nt, Artificial Sequence
  mRNA product Design i-1 comprising derived and/or modified sequence from HRSV(A2)__F-del_DSCav1_mut7 (opt5)
gggagagggcgcuuggcuugcaaggacccugagcugcggcauugaagcacacccaacccaacucgacugaagucagccucacugaaccggaucugagaaucuucucucucugggcuugccagggcucuccgaaccuagcuagcauccucuucaauuccaacuagaaagcuuaccauggagcugcucauccugaaggccaacgcuauuaccacaauccuuacggccgugaccuucugcuuugcgagcggccagaauauuacagaagaguucuaccaauccaccuguucugcugucagcaaaggguaucuguccgcccucagaacaggaugguacaccucuguuaucacaauugaacugagcaacaucaaggagaauaaaugcaacggcaccgacgccaaggugaaacuuaucaagcaggaacuggauaaguauaaaaaugcugugacggagcuccagaugcugauguguuccacccccgccacagggucuggaagcgcuauugccuccggcgucgcggugugcaagguucugcaccucgagggggaagugaacaaaaucaagagcgcccugcuuucuaccaauaaagcugucgugucccugagcaacggaguuucugugcucacauuuaagguccuggaccuuaagaauuacauugauaaacagcugcucccuauccugaacaagcaauccuguagcauuucuaauaucgagaccgugauggaguuccagcagaaaaacaaucggcugcucgaaauuacgcgcgaguuuuccgugaacgccggcgucacaaccccgguuagcacauauaugcugaccaauuccgaacuucugucucucaucaacgacaugcccaucaccaacgaucagaagaaacugaugagcaauaacgugcaaauugugagacagcaguccuacagcaucaugugcauuaucaaggaggaaguccuugcuuaugugguucagcugccucucuacggcgugauugacacacccuguuggaaacugcauacgucuccucugugcaccacaaauaccaaggagggguccaacaucugucucacacggaccgaucgcggaugguacugcgacaaugccggcagcgucucuuucuuuccccaagcggaaacguguaaggugugcagcaacagaguuuucugcgauacaaugaacucccugacccuuccuucugaggugaaucuguguaaugucgacaucuuuaacccgaaauaugauugcaagauuaugaccagcaaaacagacguguccagcucugucaucaccucccucggggccauugugagcuguuacggaaagacaaaaugcacggcuucuaauaagaacaagggcaucauuaaaaccuucuccaaugggugugauuauguuagcaacaagggaguggacacagucuccgugggcaauacccuguacuauguuaacaaacaggagggcaagucucuuuacgugaaaggggaacccaucaucaacuuuuaugacccucuggucuuccccagcgaugaguuugacgccuccauuucucaggugaaugaaaagaucaaccaaagccucgcuuucauucggaaguccgaugagcugcugcacaaugugaacgccggaaaaagcacaaccaauaucaugauuacgaccaucauuaucguuaucauugucauccuccugucucuuauugccgugggccugcuccuguacugcaaggcucgcugaggacuaguguccaccugucccuccugggcugcuggauugucucguuuuccugccaaauaaacaggaucagcgcuuuacagaucuaaaaaaaaaaaaaaaaaaaaaaaaaaaaaaaaaaaaaaaaaaaaaaaaaaaaaaaaaaaaaaaaugcaucccccccccccccccccccccccccccccccaaaggcucuuuucagagccaccagaauu

SEQ ID NO: 7514 - RNA, 1931 nt, Artificial Sequence
  mRNA product Design i-1 comprising derived and/or modified sequence from HRSV(A2)__F-del_DSCav1_mut7 (opt6)
gggagagggcgcuuggcuugcaaggacccugagcugcggcauugaagcacacccaacccaacucgacugaagucagccucacugaaccggaucugagaaucuucucucucugggcuugccagggcucuccgaaccuagcuagcauccucuucaauuccaacuagaaagcuuaccauggaauuacuaauccucaaagcaaacgcaauuacaaccauacuaaccgcugucaccuuuuguuuugccucaggacaaaacauaacugaagaauuuuaccaaucaacaugcuccgcaguaucuaaaggauaccucagcgcguuaagaacaggaugguacacaucgguaauaaccaucgaauuauccaacauaaaagaaaauaaaugcaauggaacagacgcaaaagucaaauuaauuaaacaagaacuagacaaauauaaaaacgcaguaaccgaauuacaaaugcuaauguguucaacaccagcaacaggaucaggaucagcuauagcuucaggaguugccguaugcaaagugcuacacuuagaaggagaagugaauaaaauaaaaucagcucuauuaucaacgaacaaagccguaguaucucuaucaaauggcguaucaguacucacauucaaaguacucgaccuaaaaaacuauauagauaaacaacuauuacccauccuaaauaaacaaagcugcucuauaucaaacaucgaaacaguaauggaauuucaacaaaaaaacaacagacuacuagaaauaacccgagaguucucaguuaaugcaggaguaacaacaccagucucaacauacaugcucacaaacucagaacuccuaucacuaauaaaugacaugccaauaacaaacgaccaaaaaaaacucaugucuaacaacguccaaauaguaagacaacaauccuacagcauaauguguauaauaaaagaagaaguuuuagcauacgucguacaacuacccuuauauggcguaauagauacaccaugcuggaaacuccauaccucaccucuauguacaacaaauaccaaagaagguucuaauauaugccuaacacgaacugaccgaggaugguacugugacaacgcaggaucagucucuuucuuuccacaagcagaaaccugcaaaguaugcaguaaccgcguauuuugcgacacaaugaacucccuaaccuuaccaucagaaguaaacuuauguaacguagacauauucaauccaaaauaugacugcaaaauaaugacaucaaaaacagacguaagcucaucaguaauaacuucacuaggcgcaauuguaucaugcuauggaaaaaccaaauguaccgcauccaacaaaaauaaaggaauaauaaaaaccuucucuaacggaugcgacuacguaucaaacaaagguguagauacaguuucuguaggaaacacacucuacuauguaaauaaacaagaaggaaaaucacuauacguaaaaggagaaccaauaauaaacuucuaugacccacuuguauuuccaucugaugaauuugaugcaagcauaucacaaguaaacgaaaaaauaaaccaaucucuagccuuuauacgaaaaagcgacgaauuacuacauaacgucaacgcuggaaaaucaacaacaaacauaaugauaacaacaauaauaauaguaauaauagucauccuauuaucacuaaucgccguaggacuacuccuauacugcaaagcuagauaaggacuaguguccaccugucccuccugggcugcuggauugucucguuuuccugccaaauaaacaggaucagcgcuuuacagaucuaaaaaaaaaaaaaaaaaaaaaaaaaaaaaaaaaaaaaaaaaaaaaaaaaaaaaaaaaaaaaaaaugcaucccccccccccccccccccccccccccccccaaaggcucuuuucagagccaccagaauu

SEQ ID NO: 7515 - RNA, 1931 nt, Artificial Sequence
  mRNA product Design i-1 comprising derived and/or modified sequence from HRSV(A2)__F-del_DSCav1_mut7 (opt11)
gggagagggcgcuuggcuugcaaggacccugagcugcggcauugaagcacacccaacccaacucgacugaagucagccucacugaaccggaucugagaaucuucucucucugggcuugccagggcucuccgaaccuagcuagcauccucuucaauuccaacuagaaagcuuaccauggaacuccucauccucaaagccaacgccauaaccacuauccucacagcagucacuuucugcuucgccucaggacaaaacauaaccgaagaguucuaccaauccacaugcuccgccgucuccaaaggcuaccucucagcgcuccgcaccggcugguacacauccgucaucaccaucgaacuaagcaacauaaaagaaaacaaaugcaacggcaccgacgccaaaguuaaacucaucaagcaagaacucgacaaauacaaaaacgcagucacagaacuucaaaugcucaugugcuccacacccgccacagguucuggcucagcaaucgcaagcggcgucgccguaugcaaaguccuucaccucgaaggcgaagucaacaaaaucaaauccgcccuccucuccaccaauaaagcugucgucucacucuccaacggcgucagcguccucacauucaaaguccucgaccucaaaaacuacauagacaagcaacuccucccgauacucaacaaacaaagcugcucuaucuccaacaucgaaaccgucauggaguuccaacagaaaaacaaucgucuccucgaaaucacccgcgaguucucaguaaacgccggggucaccacaccagucuccaccuacaugcucaccaacuccgaacuccuuagccucauaaacgacaugcccauaaccaacgaccaaaagaaacucaugagcaacaacguacaaauaguccgacaacaauccuauuccaucauguguaucaucaaagaagaaguccucgcauacguaguccaacucccccuauacggcguaaucgacaccccauguuggaaacuccacaccucaccacucuguaccaccaacaccaaagaaggcucaaacaucugccucacccgcacagaccgcggcugguacugcgacaacgcgggcuccgucagcuucuuuccccaagcggaaaccugcaaagucugcagcaacagagucuucugcgacacuaugaacucccucacccuccccucagaagucaaccucugcaacgucgacaucuucaacccgaaauacgacugcaaaaucaugaccagcaaaacugacgucuccucguccgucaucaccucacucggcgcaaucgugagcugcuacggcaaaaccaaaugcaccgccuccaacaaaaacaaaggcaucauaaaaacauucagcaacggcugcgacuacgucucgaacaaaggagucgacaccguaucagugggcaacacccuauacuacguaaacaagcaagaaggcaaaucacucuacguaaaaggcgaacccaucaucaacuucuacgacccccucgucuuccccuccgacgaguucgacgccuccaucucucaagucaacgagaaaaucaaccaaucccuugccuucauacguaaaagcgacgaacuccuucacaacguaaacgccgggaaauccaccacuaacauaaugaucaccaccaucaucaucguuaucauagucauccuccucucucucauagcagucggccuacuccuguacugcaaagcgcgcuaaggacuaguguccaccugucccuccugggcugcuggauugucucguuuuccugccaaauaaacaggaucagcgcuuuacagaucuaaaaaaaaaaaaaaaaaaaaaaaaaaaaaaaaaaaaaaaaaaaaaaaaaaaaaaaaaaaaaaaaugcaucccccccccccccccccccccccccccccccaaaggcucuuuucagagccaccagaauu

SEQ ID NO: 7516 - RNA, 1931 nt, Artificial Sequence
  mRNA product Design i-2 comprising derived and/or modified sequence from HRSV(A2)__F-del_DSCav1_mut7 (opt1)
gggagaggcgcugccuacggagguggcagccaucuccuucucggcaucaagcuuaccauggagcugcucauccugaaggccaacgccaucaccaccauccugacggcggugaccuucugcuucgccagcggccagaacaucaccgaggaguucuaccaguccacgugcagcgccgucuccaagggguaccucagcgcccugcggaccggcugguacaccuccgugaucaccaucgagcugagcaacaucaaggagaacaagugcaacgggaccgacgccaaggugaagcucaucaagcaggagcuggacaaguacaagaacgcggucacggagcugcagaugcugaugugcuccaccccggcaaccggcuccggcuccgccaucgcgagcggcgucgccgugugcaaggugcugcaccucgagggggaggucaacaagaucaagagcgcccugcuguccaccaacaaggccguggugagccucuccaacggcgucagcgugcugaccuucaaggugcuggaccucaagaacuacaucgacaagcagcugcugcccauccugaacaagcagagcugcuccaucagcaacaucgagacggugauggaguuccagcagaagaacaaccggcuccuggagaucacccgcgaguucagcgugaacgccggggucaccacccccguguccacguacaugcugaccaacagcgagcuccugucccugaucaacgacaugccgaucaccaacgaccagaagaagcucaugagcaacaacgugcagaucguccggcagcaguccuacagcaucaugugcaucaucaaggaggaggugcuggcguacgugguccagcugccccucuacggcgugaucgacacccccugcuggaagcugcacacgagcccccugugcaccaccaacaccaaggagggguccaacaucugccucacgcgcaccgaccggggcugguacugcgacaacgccggcagcgucuccuucuucccgcaggccgagaccugcaaggugugcagcaaccgcguguucugcgacaccaugaacucccugacgcugcccagcgagguaaaccucugcaacgucgacaucuucaaccccaaguacgacugcaagaucaugaccuccaagaccgacgugagcuccagcgugaucaccucccugggggccaucgucagcugcuacggcaagacgaagugcaccgccagcaacaagaacaaggggaucaucaagaccuucuccaacggcugcgacuacgugagcaacaagggcguggacaccguguccgucgggaacacccuguacuacgugaacaagcaggagggcaagagccucuacgugaagggggagcccaucaucaacuucuacgacccgcuggucuuccccuccgacgaguucgacgcgagcaucucccaggugaacgagaagaucaaccagagccuggccuucauccgcaaguccgacgagcugcuccacaacgugaacgccggcaagagcacgaccaacaucaugaucaccaccaucaucaucgucaucaucgugauccugcugucccucaucgccguggggcugcugcucuacugcaaggcccggugaggacuagugcaucacauuuaaaagcaucucagccuaccaugagaauaagagaaagaaaaugaagaucaauagcuuauucaucucuuuuucuuuuucguugguguaaagccaacacccugucuaaaaaacauaaauuucuuuaaucauuuugccucuuuucucugugcuucaauuaauaaaaaauggaaagaaccuagaucuaaaaaaaaaaaaaaaaaaaaaaaaaaaaaaaaaaaaaaaaaaaaaaaaaaaaaaaaaaaaaaaaugcaucccccccccccccccccccccccccccccccaaaggcucuuuucagagccaccagaauu

SEQ ID NO: 7517 - RNA, 1931 nt, Artificial Sequence
  mRNA product Design i-2 comprising derived and/or modified sequence from HRSV(A2)__F-del_DSCav1_mut7 (opt1)
gggagaggcgcugccuacggagguggcagccaucuccuucucggcaucaagcuuaccauggagcugcucauccugaaggccaacgccaucaccaccauccugacggcggugaccuucugcuucgccagcggccagaacaucaccgaggaguucuaccaguccacgugcagcgccgucuccaagggguaccucagcgcccugcgcaccggcugguacaccuccgugaucaccaucgagcugagcaacaucaaggagaacaagugcaacgggaccgacgccaaggugaagcucaucaagcaggagcuggacaaguacaagaacgcggucacggagcugcagaugcucaugugcuccacccccgccaccggcagcggguccgccaucgccagcggcguggcggugugcaagguccugcaccuggagggcgaggugaacaagaucaaguccgcccuccugagcaccaacaaggccguggucucccugagcaacgggguguccgugcucacguucaagguccuggaccugaagaacuacaucgacaagcagcuccugccgauccugaacaagcagagcugcuccaucagcaacaucgagaccgugauggaguuccagcagaagaacaaccggcuccuggagaucacccgcgaguucuccgugaacgccggcgucaccacgcccgugagcaccuacaugcugaccaacagcgagcuccugucccugaucaacgacaugcccaucaccaacgaccagaagaagcucaugagcaacaacgugcagaucguccggcagcaguccuacagcaucaugugcaucaucaaggaggaggugcuggccuacgugguccagcugccccucuacggggugaucgacacgccgugcuggaagcugcacaccagcccccugugcaccaccaacacgaaggagggcagcaacaucugccucacccgcaccgaccgggggugguacugcgacaacgcgggcuccgugagcuucuucccccaggccgagaccugcaaggucugcuccaaccgcguguucugcgacacgaugaacagccugacccugcccuccgaggucaaccucugcaacguggacaucuucaacccgaaguacgacugcaagaucaugaccagcaagaccgacguguccagcuccgucaucacgagccugggcgccaucguguccugcuacgggaagaccaagugcaccgccagcaacaagaacaagggcaucaucaagaccuucuccaacgggugcgacuacgugagcaacaagggcgucgacacggugagcgugggcaacacccuguacuacgucaacaagcaggaggggaagucccucuacgugaagggcgagcccaucaucaacuucuacgacccccugguguuccccagcgacgaguucgacgccuccaucagccaggucaacgagaagaucaaccagucccuggcguucauccggaaguccgacgagcuccugcacaacgugaacgccgggaaguccaccaccaacaucaugaucaccacgaucaucaucgugaucaucgucauccugcucagccugaucgccgugggccugcuccuguacugcaaggcccgcugaggacuagugcaucacauuuaaaagcaucucagccuaccaugagaauaagagaaagaaaaugaagaucaauagcuuauucaucucuuuuucuuuuucguugguguaaagccaacacccugucuaaaaaacauaaauuucuuuaaucauuuugccucuuuucucugugcuucaauuaauaaaaaauggaaagaaccuagaucuaaaaaaaaaaaaaaaaaaaaaaaaaaaaaaaaaaaaaaaaaaaaaaaaaaaaaaaaaaaaaaaaugcaucccccccccccccccccccccccccccccccaaaggcucuuuucagagccaccagaauu

SEQ ID NO: 7518 - RNA, 1931 nt, Artificial Sequence
  mRNA product Design i-2 comprising derived and/or modified sequence from HRSV(A2)__F-del_DSCav1_mut7 (opt2)
gggagaggcgcugccuacggagguggcagccaucuccuucucggcaucaagcuuaccauggagcuccucauccucaaggccaacgccaucaccaccauccucaccgccgucaccuucugcuucgccuccggccagaacaucaccgaggaguucuaccaguccaccugcuccgccgucuccaagggcuaccucuccgcccuccgcaccggcugguacaccuccgucaucaccaucgagcucuccaacaucaaggagaacaagugcaacggcaccgacgccaaggucaagcucaucaagcaggagcucgacaaguacaagaacgccgucaccgagcuccagaugcucaugugcuccacccccgccaccggcuccggcuccgccaucgccuccggcgucgccgucugcaagguccuccaccucgagggcgaggucaacaagaucaaguccgcccuccucuccaccaacaaggccgucgucucccucuccaacggcgucuccguccucaccuucaagguccucgaccucaagaacuacaucgacaagcagcuccuccccauccucaacaagcaguccugcuccaucuccaacaucgagaccgucauggaguuccagcagaagaacaaccgccuccucgagaucacccgcgaguucuccgucaacgccggcgucaccacccccgucuccaccuacaugcucaccaacuccgagcuccucucccucaucaacgacaugcccaucaccaacgaccagaagaagcucauguccaacaacguccagaucguccgccagcaguccuacuccaucaugugcaucaucaaggaggagguccucgccuacgucguccagcucccccucuacggcgucaucgacacccccugcuggaagcuccacaccuccccccucugcaccaccaacaccaaggagggcuccaacaucugccucacccgcaccgaccgcggcugguacugcgacaacgccggcuccgucuccuucuucccccaggccgagaccugcaaggucugcuccaaccgcgucuucugcgacaccaugaacucccucacccuccccuccgaggucaaccucugcaacgucgacaucuucaaccccaaguacgacugcaagaucaugaccuccaagaccgacgucuccuccuccgucaucaccucccucggcgccaucgucuccugcuacggcaagaccaagugcaccgccuccaacaagaacaagggcaucaucaagaccuucuccaacggcugcgacuacgucuccaacaagggcgucgacaccgucuccgucggcaacacccucuacuacgucaacaagcaggagggcaagucccucuacgucaagggcgagcccaucaucaacuucuacgacccccucgucuuccccuccgacgaguucgacgccuccaucucccaggucaacgagaagaucaaccagucccucgccuucauccgcaaguccgacgagcuccuccacaacgucaacgccggcaaguccaccaccaacaucaugaucaccaccaucaucaucgucaucaucgucauccuccucucccucaucgccgucggccuccuccucuacugcaaggcccgcugaggacuagugcaucacauuuaaaagcaucucagccuaccaugagaauaagagaaagaaaaugaagaucaauagcuuauucaucucuuuuucuuuuucguugguguaaagccaacacccugucuaaaaaacauaaauuucuuuaaucauuuugccucuuuucucugugcuucaauuaauaaaaaauggaaagaaccuagaucuaaaaaaaaaaaaaaaaaaaaaaaaaaaaaaaaaaaaaaaaaaaaaaaaaaaaaaaaaaaaaaaaugcaucccccccccccccccccccccccccccccccaaaggcucuuuucagagccaccagaauu

SEQ ID NO: 7519 - RNA, 1931 nt, Artificial Sequence
  mRNA product Design i-2 comprising derived and/or modified sequence from HRSV(A2)__F-del_DSCav1_mut7 (opt3)
gggagaggcgcugccuacggagguggcagccaucuccuucucggcaucaagcuuaccauggagcugcucauccuuaaggccaacgcuauuaccacaauacugacugcagugacguucugcuuugccagcggccagaauaucaccgaagaguucuaccaauccacauguucugcggucucaaaaggguauuugagugcuuuaagaacuggaugguacaccagcguuauuacaaucgaacuguccaacauuaaggagaauaaaugcaacgguaccgacgccaaggugaaacuaaucaagcaggaacucgauaaguauaaaaaugcaguaacugagcugcagaugcuuauguguucuacacccgccaccggcucggggucagcuauagcaagcggaguggccgucugcaaggugcugcacuuggagggcgaaguuaacaaaaucaagagugcucuccuguccacgaauaaagccguggucucucugagcaacgguguguccguacucacuuuuaagguuuuagaccugaagaauuacauugauaaacagcuuuugccuauccugaacaagcaaucauguaguauuagcaauaucgagaccgugauggaguuccagcagaaaaacaauaggcuacucgaaauaacacgggaguuuucugucaacgcgggggugacuaccccaguguccacauauaugcugaccaauucagaacuucugagcuugauuaacgacaugccgaucacgaacgaucagaagaaacucaugaguaauaacguccaaauuguucgccagcagucuuacuccaucaugugcaucauuaaggaggaagugcuggcauauguagugcaguuaccccuguacggagucauagacacuccuuguuggaaacuccauacaagcccacuuugcaccacuaauacaaaggagggcucgaacaucugucugacccgaacggaucguggcugguacugcgacaaugccgggucuguguccuucuuuccccaagcugaaaccuguaagguuugcucaaacagaguguucugcgauacaaugaauaguuugacucuaccuagcgaggucaaccuguguaauguggacauuuuuaacccaaaauaugauugcaagaucaugaccuccaaaacagacguaucuagcucaguuauaacuagccucggagccauuguguccuguuacgguaagaccaaaugcacagcaagcaauaagaacaagggcaucaucaaaaccuucucuaaugggugugauuaugucucaaacaagggaguggacacugucagugugggcaauacgcuguacuauguuaacaaacaggaggguaagagccuuuacgugaaaggggaacccauuaucaacuuuuaugacccucugguauucccauccgaugaguuugacgcuucuauuucgcaggucaaugaaaagauaaaccaaaguuuggccuucaucaggaaguccgaugagcuccugcacaaugugaacgcgggaaaaucaacaaccaauauuaugaucacuaccaucauuauaguuaucauugugaucuuacugagucuaauugccgucggccuccugcuuuacugcaaggcacggugaggacuagugcaucacauuuaaaagcaucucagccuaccaugagaauaagagaaagaaaaugaagaucaauagcuuauucaucucuuuuucuuuuucguugguguaaagccaacacccugucuaaaaaacauaaauuucuuuaaucauuuugccucuuuucucugugcuucaauuaauaaaaaauggaaagaaccuagaucuaaaaaaaaaaaaaaaaaaaaaaaaaaaaaaaaaaaaaaaaaaaaaaaaaaaaaaaaaaaaaaaaugcaucccccccccccccccccccccccccccccccaaaggcucuuuucagagccaccagaauu

SEQ ID NO: 7520 - RNA, 1931 nt, Artificial Sequence
  mRNA product Design i-2 comprising derived and/or modified sequence from HRSV(A2)__F-del_DSCav1_mut7 (opt4)
gggagaggcgcugccuacggagguggcagccaucuccuucucggcaucaagcuuaccauggagcugcugauccugaaggccaacgccaucaccaccauccugaccgccgugaccuucugcuucgccagcggccagaacaucaccgaggaguucuaccagagcaccugcagcgccgugagcaagggcuaccugagcgcccugagaaccggcugguacaccagcgugaucaccaucgagcugagcaacaucaaggagaacaagugcaacggcaccgacgccaaggugaagcugaucaagcaggagcuggacaaguacaagaacgccgugaccgagcugcagaugcugaugugcagcacccccgccaccggcagcggcagcgccaucgccagcggcguggccgugugcaaggugcugcaccuggagggcgaggugaacaagaucaagagcgcccugcugagcaccaacaaggccguggugagccugagcaacggcgugagcgugcugaccuucaaggugcuggaccugaagaacuacaucgacaagcagcugcugcccauccugaacaagcagagcugcagcaucagcaacaucgagaccgugauggaguuccagcagaagaacaacagacugcuggagaucaccagagaguucagcgugaacgccggcgugaccacccccgugagcaccuacaugcugaccaacagcgagcugcugagccugaucaacgacaugcccaucaccaacgaccagaagaagcugaugagcaacaacgugcagaucgugagacagcagagcuacagcaucaugugcaucaucaaggaggaggugcuggccuacguggugcagcugccccuguacggcgugaucgacacccccugcuggaagcugcacaccagcccccugugcaccaccaacaccaaggagggcagcaacaucugccugaccagaaccgacagaggcugguacugcgacaacgccggcagcgugagcuucuucccccaggccgagaccugcaaggugugcagcaacagaguguucugcgacaccaugaacagccugacccugcccagcgaggugaaccugugcaacguggacaucuucaaccccaaguacgacugcaagaucaugaccagcaagaccgacgugagcagcagcgugaucaccagccugggcgccaucgugagcugcuacggcaagaccaagugcaccgccagcaacaagaacaagggcaucaucaagaccuucagcaacggcugcgacuacgugagcaacaagggcguggacaccgugagcgugggcaacacccuguacuacgugaacaagcaggagggcaagagccuguacgugaagggcgagcccaucaucaacuucuacgacccccugguguuccccagcgacgaguucgacgccagcaucagccaggugaacgagaagaucaaccagagccuggccuucaucagaaagagcgacgagcugcugcacaacgugaacgccggcaagagcaccaccaacaucaugaucaccaccaucaucaucgugaucaucgugauccugcugagccugaucgccgugggccugcugcuguacugcaaggccagaugaggacuagugcaucacauuuaaaagcaucucagccuaccaugagaauaagagaaagaaaaugaagaucaauagcuuauucaucucuuuuucuuuuucguugguguaaagccaacacccugucuaaaaaacauaaauuucuuuaaucauuuugccucuuuucucugugcuucaauuaauaaaaaauggaaagaaccuagaucuaaaaaaaaaaaaaaaaaaaaaaaaaaaaaaaaaaaaaaaaaaaaaaaaaaaaaaaaaaaaaaaaugcaucccccccccccccccccccccccccccccccaaaggcucuuuucagagccaccagaauu

SEQ ID NO: 7521 - RNA, 1931 nt, Artificial Sequence
  mRNA product Design i-2 comprising derived and/or modified sequence from HRSV(A2)__F-del_DSCav1_mut7 (opt5)
gggagaggcgcugccuacggagguggcagccaucuccuucucggcaucaagcuuaccauggagcugcucauccugaaggccaacgcuauuaccacaauccuuacggccgugaccuucugcuuugcgagcggccagaauauuacagaagaguucuaccaauccaccuguucugcugucagcaaaggguaucuguccgcccucagaacaggaugguacaccucuguuaucacaauugaacugagcaacaucaaggagaauaaaugcaacggcaccgacgccaaggugaaacuuaucaagcaggaacuggauaaguauaaaaaugcugugacggagcuccagaugcugauguguuccacccccgccacagggucuggaagcgcuauugccuccggcgucgcggugugcaagguucugcaccucgagggggaagugaacaaaaucaagagcgcccugcuuucuaccaauaaagcugucgugucccugagcaacggaguuucugugcucacauuuaagguccuggaccuuaagaauuacauugauaaacagcugcucccuauccugaacaagcaauccuguagcauuucuaauaucgagaccgugauggaguuccagcagaaaaacaaucggcugcucgaaauuacgcgcgaguuuuccgugaacgccggcgucacaaccccgguuagcacauauaugcugaccaauuccgaacuucugucucucaucaacgacaugcccaucaccaacgaucagaagaaacugaugagcaauaacgugcaaauugugagacagcaguccuacagcaucaugugcauuaucaaggaggaaguccuugcuuaugugguucagcugccucucuacggcgugauugacacacccuguuggaaacugcauacgucuccucugugcaccacaaauaccaaggagggguccaacaucugucucacacggaccgaucgcggaugguacugcgacaaugccggcagcgucucuuucuuuccccaagcggaaacguguaaggugugcagcaacagaguuuucugcgauacaaugaacucccugacccuuccuucugaggugaaucuguguaaugucgacaucuuuaacccgaaauaugauugcaagauuaugaccagcaaaacagacguguccagcucugucaucaccucccucggggccauugugagcuguuacggaaagacaaaaugcacggcuucuaauaagaacaagggcaucauuaaaaccuucuccaaugggugugauuauguuagcaacaagggaguggacacagucuccgugggcaauacccuguacuauguuaacaaacaggagggcaagucucuuuacgugaaaggggaacccaucaucaacuuuuaugacccucuggucuuccccagcgaugaguuugacgccuccauuucucaggugaaugaaaagaucaaccaaagccucgcuuucauucggaaguccgaugagcugcugcacaaugugaacgccggaaaaagcacaaccaauaucaugauuacgaccaucauuaucguuaucauugucauccuccugucucuuauugccgugggccugcuccuguacugcaaggcucgcugaggacuagugcaucacauuuaaaagcaucucagccuaccaugagaauaagagaaagaaaaugaagaucaauagcuuauucaucucuuuuucuuuuucguugguguaaagccaacacccugucuaaaaaacauaaauuucuuuaaucauuuugccucuuuucucugugcuucaauuaauaaaaaauggaaagaaccuagaucuaaaaaaaaaaaaaaaaaaaaaaaaaaaaaaaaaaaaaaaaaaaaaaaaaaaaaaaaaaaaaaaaugcaucccccccccccccccccccccccccccccccaaaggcucuuuucagagccaccagaauu

SEQ ID NO: 7522 - RNA, 1931 nt, Artificial Sequence
  mRNA product Design i-2 comprising derived and/or modified sequence from HRSV(A2)__F-del_DSCav1_mut7 (opt6)
gggagaggcgcugccuacggagguggcagccaucuccuucucggcaucaagcuuaccauggaauuacuaauccucaaagcaaacgcaauuacaaccauacuaaccgcugucaccuuuuguuuugccucaggacaaaacauaacugaagaauuuuaccaaucaacaugcuccgcaguaucuaaaggauaccucagcgcguuaagaacaggaugguacacaucgguaauaaccaucgaauuauccaacauaaaagaaaauaaaugcaauggaacagacgcaaaagucaaauuaauuaaacaagaacuagacaaauauaaaaacgcaguaaccgaauuacaaaugcuaauguguucaacaccagcaacaggaucaggaucagcuauagcuucaggaguugccguaugcaaagugcuacacuuagaaggagaagugaauaaaauaaaaucagcucuauuaucaacgaacaaagccguaguaucucuaucaaauggcguaucaguacucacauucaaaguacucgaccuaaaaaacuauauagauaaacaacuauuacccauccuaaauaaacaaagcugcucuauaucaaacaucgaaacaguaauggaauuucaacaaaaaaacaacagacuacuagaaauaacccgagaguucucaguuaaugcaggaguaacaacaccagucucaacauacaugcucacaaacucagaacuccuaucacuaauaaaugacaugccaauaacaaacgaccaaaaaaaacucaugucuaacaacguccaaauaguaagacaacaauccuacagcauaauguguauaauaaaagaagaaguuuuagcauacgucguacaacuacccuuauauggcguaauagauacaccaugcuggaaacuccauaccucaccucuauguacaacaaauaccaaagaagguucuaauauaugccuaacacgaacugaccgaggaugguacugugacaacgcaggaucagucucuuucuuuccacaagcagaaaccugcaaaguaugcaguaaccgcguauuuugcgacacaaugaacucccuaaccuuaccaucagaaguaaacuuauguaacguagacauauucaauccaaaauaugacugcaaaauaaugacaucaaaaacagacguaagcucaucaguaauaacuucacuaggcgcaauuguaucaugcuauggaaaaaccaaauguaccgcauccaacaaaaauaaaggaauaauaaaaaccuucucuaacggaugcgacuacguaucaaacaaagguguagauacaguuucuguaggaaacacacucuacuauguaaauaaacaagaaggaaaaucacuauacguaaaaggagaaccaauaauaaacuucuaugacccacuuguauuuccaucugaugaauuugaugcaagcauaucacaaguaaacgaaaaaauaaaccaaucucuagccuuuauacgaaaaagcgacgaauuacuacauaacgucaacgcuggaaaaucaacaacaaacauaaugauaacaacaauaauaauaguaauaauagucauccuauuaucacuaaucgccguaggacuacuccuauacugcaaagcuagauaaggacuagugcaucacauuuaaaagcaucucagccuaccaugagaauaagagaaagaaaaugaagaucaauagcuuauucaucucuuuuucuuuuucguugguguaaagccaacacccugucuaaaaaacauaaauuucuuuaaucauuuugccucuuuucucugugcuucaauuaauaaaaaauggaaagaaccuagaucuaaaaaaaaaaaaaaaaaaaaaaaaaaaaaaaaaaaaaaaaaaaaaaaaaaaaaaaaaaaaaaaaugcaucccccccccccccccccccccccccccccccaaaggcucuuuucagagccaccagaauu

SEQ ID NO: 7523 - RNA, 1931 nt, Artificial Sequence
  mRNA product Design i-2 comprising derived and/or modified sequence from HRSV(A2)__F-del_DSCav1_mut7 (opt11)
gggagaggcgcugccuacggagguggcagccaucuccuucucggcaucaagcuuaccauggaacuccucauccucaaagccaacgccauaaccacuauccucacagcagucacuuucugcuucgccucaggacaaaacauaaccgaagaguucuaccaauccacaugcuccgccgucuccaaaggcuaccucucagcgcuccgcaccggcugguacacauccgucaucaccaucgaacuaagcaacauaaaagaaaacaaaugcaacggcaccgacgccaaaguuaaacucaucaagcaagaacucgacaaauacaaaaacgcagucacagaacuucaaaugcucaugugcuccacacccgccacagguucuggcucagcaaucgcaagcggcgucgccguaugcaaaguccuucaccucgaaggcgaagucaacaaaaucaaauccgcccuccucuccaccaauaaagcugucgucucacucuccaacggcgucagcguccucacauucaaaguccucgaccucaaaaacuacauagacaagcaacuccucccgauacucaacaaacaaagcugcucuaucuccaacaucgaaaccgucauggaguuccaacagaaaaacaaucgucuccucgaaaucacccgcgaguucucaguaaacgccggggucaccacaccagucuccaccuacaugcucaccaacuccgaacuccuuagccucauaaacgacaugcccauaaccaacgaccaaaagaaacucaugagcaacaacguacaaauaguccgacaacaauccuauuccaucauguguaucaucaaagaagaaguccucgcauacguaguccaacucccccuauacggcguaaucgacaccccauguuggaaacuccacaccucaccacucuguaccaccaacaccaaagaaggcucaaacaucugccucacccgcacagaccgcggcugguacugcgacaacgcgggcuccgucagcuucuuuccccaagcggaaaccugcaaagucugcagcaacagagucuucugcgacacuaugaacucccucacccuccccucagaagucaaccucugcaacgucgacaucuucaacccgaaauacgacugcaaaaucaugaccagcaaaacugacgucuccucguccgucaucaccucacucggcgcaaucgugagcugcuacggcaaaaccaaaugcaccgccuccaacaaaaacaaaggcaucauaaaaacauucagcaacggcugcgacuacgucucgaacaaaggagucgacaccguaucagugggcaacacccuauacuacguaaacaagcaagaaggcaaaucacucuacguaaaaggcgaacccaucaucaacuucuacgacccccucgucuuccccuccgacgaguucgacgccuccaucucucaagucaacgagaaaaucaaccaaucccuugccuucauacguaaaagcgacgaacuccuucacaacguaaacgccgggaaauccaccacuaacauaaugaucaccaccaucaucaucguuaucauagucauccuccucucucucauagcagucggccuacuccuguacugcaaagcgcgcuaaggacuagugcaucacauuuaaaagcaucucagccuaccaugagaauaagagaaagaaaaugaagaucaauagcuuauucaucucuuuuucuuuuucguugguguaaagccaacacccugucuaaaaaacauaaauuucuuuaaucauuuugccucuuuucucugugcuucaauuaauaaaaaauggaaagaaccuagaucuaaaaaaaaaaaaaaaaaaaaaaaaaaaaaaaaaaaaaaaaaaaaaaaaaaaaaaaaaaaaaaaaugcaucccccccccccccccccccccccccccccccaaaggcucuuuucagagccaccagaauu

SEQ ID NO: 7524 - RNA, 1927 nt, Artificial Sequence
  mRNA product Design i-2 comprising derived and/or modified sequence from HRSV(A2)__F-del_DSCav1_mut7 (opt1)
ggggcgcugccuacggagguggcagccaucuccuucucggcaucaagcuuaccauggagcugcucauccugaaggccaacgccaucaccaccauccugacggcggugaccuucugcuucgccagcggccagaacaucaccgaggaguucuaccaguccacgugcagcgccgucuccaagggguaccucagcgcccugcggaccggcugguacaccuccgugaucaccaucgagcugagcaacaucaaggagaacaagugcaacgggaccgacgccaaggugaagcucaucaagcaggagcuggacaaguacaagaacgcggucacggagcugcagaugcugaugugcuccaccccggcaaccggcuccggcuccgccaucgcgagcggcgucgccgugugcaaggugcugcaccucgagggggaggucaacaagaucaagagcgcccugcuguccaccaacaaggccguggugagccucuccaacggcgucagcgugcugaccuucaaggugcuggaccucaagaacuacaucgacaagcagcugcugcccauccugaacaagcagagcugcuccaucagcaacaucgagacggugauggaguuccagcagaagaacaaccggcuccuggagaucacccgcgaguucagcgugaacgccggggucaccacccccguguccacguacaugcugaccaacagcgagcuccugucccugaucaacgacaugccgaucaccaacgaccagaagaagcucaugagcaacaacgugcagaucguccggcagcaguccuacagcaucaugugcaucaucaaggaggaggugcuggcguacgugguccagcugccccucuacggcgugaucgacacccccugcuggaagcugcacacgagcccccugugcaccaccaacaccaaggagggguccaacaucugccucacgcgcaccgaccggggcugguacugcgacaacgccggcagcgucuccuucuucccgcaggccgagaccugcaaggugugcagcaaccgcguguucugcgacaccaugaacucccugacgcugcccagcgagguaaaccucugcaacgucgacaucuucaaccccaaguacgacugcaagaucaugaccuccaagaccgacgugagcuccagcgugaucaccucccugggggccaucgucagcugcuacggcaagacgaagugcaccgccagcaacaagaacaaggggaucaucaagaccuucuccaacggcugcgacuacgugagcaacaagggcguggacaccguguccgucgggaacacccuguacuacgugaacaagcaggagggcaagagccucuacgugaagggggagcccaucaucaacuucuacgacccgcuggucuuccccuccgacgaguucgacgcgagcaucucccaggugaacgagaagaucaaccagagccuggccuucauccgcaaguccgacgagcugcuccacaacgugaacgccggcaagagcacgaccaacaucaugaucaccaccaucaucaucgucaucaucgugauccugcugucccucaucgccguggggcugcugcucuacugcaaggcccggugaggacuagugcaucacauuuaaaagcaucucagccuaccaugagaauaagagaaagaaaaugaagaucaauagcuuauucaucucuuuuucuuuuucguugguguaaagccaacacccugucuaaaaaacauaaauuucuuuaaucauuuugccucuuuucucugugcuucaauuaauaaaaaauggaaagaaccuagaucuaaaaaaaaaaaaaaaaaaaaaaaaaaaaaaaaaaaaaaaaaaaaaaaaaaaaaaaaaaaaaaaaugcaucccccccccccccccccccccccccccccccaaaggcucuuuucagagccaccagaauu

SEQ ID NO: 7525 - RNA, 1927 nt, Artificial Sequence
  mRNA product Design i-2 comprising derived and/or modified sequence from HRSV(A2)__F-del_DSCav1_mut7 (opt1)
ggggcgcugccuacggagguggcagccaucuccuucucggcaucaagcuuaccauggagcugcucauccugaaggccaacgccaucaccaccauccugacggcggugaccuucugcuucgccagcggccagaacaucaccgaggaguucuaccaguccacgugcagcgccgucuccaagggguaccucagcgcccugcgcaccggcugguacaccuccgugaucaccaucgagcugagcaacaucaaggagaacaagugcaacgggaccgacgccaaggugaagcucaucaagcaggagcuggacaaguacaagaacgcggucacggagcugcagaugcucaugugcuccacccccgccaccggcagcggguccgccaucgccagcggcguggcggugugcaagguccugcaccuggagggcgaggugaacaagaucaaguccgcccuccugagcaccaacaaggccguggucucccugagcaacgggguguccgugcucacguucaagguccuggaccugaagaacuacaucgacaagcagcuccugccgauccugaacaagcagagcugcuccaucagcaacaucgagaccgugauggaguuccagcagaagaacaaccggcuccuggagaucacccgcgaguucuccgugaacgccggcgucaccacgcccgugagcaccuacaugcugaccaacagcgagcuccugucccugaucaacgacaugcccaucaccaacgaccagaagaagcucaugagcaacaacgugcagaucguccggcagcaguccuacagcaucaugugcaucaucaaggaggaggugcuggccuacgugguccagcugccccucuacggggugaucgacacgccgugcuggaagcugcacaccagcccccugugcaccaccaacacgaaggagggcagcaacaucugccucacccgcaccgaccgggggugguacugcgacaacgcgggcuccgugagcuucuucccccaggccgagaccugcaaggucugcuccaaccgcguguucugcgacacgaugaacagccugacccugcccuccgaggucaaccucugcaacguggacaucuucaacccgaaguacgacugcaagaucaugaccagcaagaccgacguguccagcuccgucaucacgagccugggcgccaucguguccugcuacgggaagaccaagugcaccgccagcaacaagaacaagggcaucaucaagaccuucuccaacgggugcgacuacgugagcaacaagggcgucgacacggugagcgugggcaacacccuguacuacgucaacaagcaggaggggaagucccucuacgugaagggcgagcccaucaucaacuucuacgacccccugguguuccccagcgacgaguucgacgccuccaucagccaggucaacgagaagaucaaccagucccuggcguucauccggaaguccgacgagcuccugcacaacgugaacgccgggaaguccaccaccaacaucaugaucaccacgaucaucaucgugaucaucgucauccugcucagccugaucgccgugggccugcuccuguacugcaaggcccgcugaggacuagugcaucacauuuaaaagcaucucagccuaccaugagaauaagagaaagaaaaugaagaucaauagcuuauucaucucuuuuucuuuuucguugguguaaagccaacacccugucuaaaaaacauaaauuucuuuaaucauuuugccucuuuucucugugcuucaauuaauaaaaaauggaaagaaccuagaucuaaaaaaaaaaaaaaaaaaaaaaaaaaaaaaaaaaaaaaaaaaaaaaaaaaaaaaaaaaaaaaaaugcaucccccccccccccccccccccccccccccccaaaggcucuuuucagagccaccagaauu

SEQ ID NO: 7526 - RNA, 1927 nt, Artificial Sequence
  mRNA product Design i-2 comprising derived and/or modified sequence from HRSV(A2)__F-del_DSCav1_mut7 (opt2)
ggggcgcugccuacggagguggcagccaucuccuucucggcaucaagcuuaccauggagcuccucauccucaaggccaacgccaucaccaccauccucaccgccgucaccuucugcuucgccuccggccagaacaucaccgaggaguucuaccaguccaccugcuccgccgucuccaagggcuaccucuccgcccuccgcaccggcugguacaccuccgucaucaccaucgagcucuccaacaucaaggagaacaagugcaacggcaccgacgccaaggucaagcucaucaagcaggagcucgacaaguacaagaacgccgucaccgagcuccagaugcucaugugcuccacccccgccaccggcuccggcuccgccaucgccuccggcgucgccgucugcaagguccuccaccucgagggcgaggucaacaagaucaaguccgcccuccucuccaccaacaaggccgucgucucccucuccaacggcgucuccguccucaccuucaagguccucgaccucaagaacuacaucgacaagcagcuccuccccauccucaacaagcaguccugcuccaucuccaacaucgagaccgucauggaguuccagcagaagaacaaccgccuccucgagaucacccgcgaguucuccgucaacgccggcgucaccacccccgucuccaccuacaugcucaccaacuccgagcuccucucccucaucaacgacaugcccaucaccaacgaccagaagaagcucauguccaacaacguccagaucguccgccagcaguccuacuccaucaugugcaucaucaaggaggagguccucgccuacgucguccagcucccccucuacggcgucaucgacacccccugcuggaagcuccacaccuccccccucugcaccaccaacaccaaggagggcuccaacaucugccucacccgcaccgaccgcggcugguacugcgacaacgccggcuccgucuccuucuucccccaggccgagaccugcaaggucugcuccaaccgcgucuucugcgacaccaugaacucccucacccuccccuccgaggucaaccucugcaacgucgacaucuucaaccccaaguacgacugcaagaucaugaccuccaagaccgacgucuccuccuccgucaucaccucccucggcgccaucgucuccugcuacggcaagaccaagugcaccgccuccaacaagaacaagggcaucaucaagaccuucuccaacggcugcgacuacgucuccaacaagggcgucgacaccgucuccgucggcaacacccucuacuacgucaacaagcaggagggcaagucccucuacgucaagggcgagcccaucaucaacuucuacgacccccucgucuuccccuccgacgaguucgacgccuccaucucccaggucaacgagaagaucaaccagucccucgccuucauccgcaaguccgacgagcuccuccacaacgucaacgccggcaaguccaccaccaacaucaugaucaccaccaucaucaucgucaucaucgucauccuccucucccucaucgccgucggccuccuccucuacugcaaggcccgcugaggacuagugcaucacauuuaaaagcaucucagccuaccaugagaauaagagaaagaaaaugaagaucaauagcuuauucaucucuuuuucuuuuucguugguguaaagccaacacccugucuaaaaaacauaaauuucuuuaaucauuuugccucuuuucucugugcuucaauuaauaaaaaauggaaagaaccuagaucuaaaaaaaaaaaaaaaaaaaaaaaaaaaaaaaaaaaaaaaaaaaaaaaaaaaaaaaaaaaaaaaaugcaucccccccccccccccccccccccccccccccaaaggcucuuuucagagccaccagaauu

SEQ ID NO: 7527 - RNA, 1927 nt, Artificial Sequence
  mRNA product Design i-2 comprising derived and/or modified sequence from HRSV(A2)__F-del_DSCav1_mut7 (opt3)
ggggcgcugccuacggagguggcagccaucuccuucucggcaucaagcuuaccauggagcugcucauccuuaaggccaacgcuauuaccacaauacugacugcagugacguucugcuuugccagcggccagaauaucaccgaagaguucuaccaauccacauguucugcggucucaaaaggguauuugagugcuuuaagaacuggaugguacaccagcguuauuacaaucgaacuguccaacauuaaggagaauaaaugcaacgguaccgacgccaaggugaaacuaaucaagcaggaacucgauaaguauaaaaaugcaguaacugagcugcagaugcuuauguguucuacacccgccaccggcucggggucagcuauagcaagcggaguggccgucugcaaggugcugcacuuggagggcgaaguuaacaaaaucaagagugcucuccuguccacgaauaaagccguggucucucugagcaacgguguguccguacucacuuuuaagguuuuagaccugaagaauuacauugauaaacagcuuuugccuauccugaacaagcaaucauguaguauuagcaauaucgagaccgugauggaguuccagcagaaaaacaauaggcuacucgaaauaacacgggaguuuucugucaacgcgggggugacuaccccaguguccacauauaugcugaccaauucagaacuucugagcuugauuaacgacaugccgaucacgaacgaucagaagaaacucaugaguaauaacguccaaauuguucgccagcagucuuacuccaucaugugcaucauuaaggaggaagugcuggcauauguagugcaguuaccccuguacggagucauagacacuccuuguuggaaacuccauacaagcccacuuugcaccacuaauacaaaggagggcucgaacaucugucugacccgaacggaucguggcugguacugcgacaaugccgggucuguguccuucuuuccccaagcugaaaccuguaagguuugcucaaacagaguguucugcgauacaaugaauaguuugacucuaccuagcgaggucaaccuguguaauguggacauuuuuaacccaaaauaugauugcaagaucaugaccuccaaaacagacguaucuagcucaguuauaacuagccucggagccauuguguccuguuacgguaagaccaaaugcacagcaagcaauaagaacaagggcaucaucaaaaccuucucuaaugggugugauuaugucucaaacaagggaguggacacugucagugugggcaauacgcuguacuauguuaacaaacaggaggguaagagccuuuacgugaaaggggaacccauuaucaacuuuuaugacccucugguauucccauccgaugaguuugacgcuucuauuucgcaggucaaugaaaagauaaaccaaaguuuggccuucaucaggaaguccgaugagcuccugcacaaugugaacgcgggaaaaucaacaaccaauauuaugaucacuaccaucauuauaguuaucauugugaucuuacugagucuaauugccgucggccuccugcuuuacugcaaggcacggugaggacuagugcaucacauuuaaaagcaucucagccuaccaugagaauaagagaaagaaaaugaagaucaauagcuuauucaucucuuuuucuuuuucguugguguaaagccaacacccugucuaaaaaacauaaauuucuuuaaucauuuugccucuuuucucugugcuucaauuaauaaaaaauggaaagaaccuagaucuaaaaaaaaaaaaaaaaaaaaaaaaaaaaaaaaaaaaaaaaaaaaaaaaaaaaaaaaaaaaaaaaugcaucccccccccccccccccccccccccccccccaaaggcucuuuucagagccaccagaauu

SEQ ID NO: 7528 - RNA, 1927 nt, Artificial Sequence
  mRNA product Design i-2 comprising derived and/or modified sequence from HRSV(A2)__F-del_DSCav1_mut7 (opt4)
ggggcgcugccuacggagguggcagccaucuccuucucggcaucaagcuuaccauggagcugcugauccugaaggccaacgccaucaccaccauccugaccgccgugaccuucugcuucgccagcggccagaacaucaccgaggaguucuaccagagcaccugcagcgccgugagcaagggcuaccugagcgcccugagaaccggcugguacaccagcgugaucaccaucgagcugagcaacaucaaggagaacaagugcaacggcaccgacgccaaggugaagcugaucaagcaggagcuggacaaguacaagaacgccgugaccgagcugcagaugcugaugugcagcacccccgccaccggcagcggcagcgccaucgccagcggcguggccgugugcaaggugcugcaccuggagggcgaggugaacaagaucaagagcgcccugcugagcaccaacaaggccguggugagccugagcaacggcgugagcgugcugaccuucaaggugcuggaccugaagaacuacaucgacaagcagcugcugcccauccugaacaagcagagcugcagcaucagcaacaucgagaccgugauggaguuccagcagaagaacaacagacugcuggagaucaccagagaguucagcgugaacgccggcgugaccacccccgugagcaccuacaugcugaccaacagcgagcugcugagccugaucaacgacaugcccaucaccaacgaccagaagaagcugaugagcaacaacgugcagaucgugagacagcagagcuacagcaucaugugcaucaucaaggaggaggugcuggccuacguggugcagcugccccuguacggcgugaucgacacccccugcuggaagcugcacaccagcccccugugcaccaccaacaccaaggagggcagcaacaucugccugaccagaaccgacagaggcugguacugcgacaacgccggcagcgugagcuucuucccccaggccgagaccugcaaggugugcagcaacagaguguucugcgacaccaugaacagccugacccugcccagcgaggugaaccugugcaacguggacaucuucaaccccaaguacgacugcaagaucaugaccagcaagaccgacgugagcagcagcgugaucaccagccugggcgccaucgugagcugcuacggcaagaccaagugcaccgccagcaacaagaacaagggcaucaucaagaccuucagcaacggcugcgacuacgugagcaacaagggcguggacaccgugagcgugggcaacacccuguacuacgugaacaagcaggagggcaagagccuguacgugaagggcgagcccaucaucaacuucuacgacccccugguguuccccagcgacgaguucgacgccagcaucagccaggugaacgagaagaucaaccagagccuggccuucaucagaaagagcgacgagcugcugcacaacgugaacgccggcaagagcaccaccaacaucaugaucaccaccaucaucaucgugaucaucgugauccugcugagccugaucgccgugggccugcugcuguacugcaaggccagaugaggacuagugcaucacauuuaaaagcaucucagccuaccaugagaauaagagaaagaaaaugaagaucaauagcuuauucaucucuuuuucuuuuucguugguguaaagccaacacccugucuaaaaaacauaaauuucuuuaaucauuuugccucuuuucucugugcuucaauuaauaaaaaauggaaagaaccuagaucuaaaaaaaaaaaaaaaaaaaaaaaaaaaaaaaaaaaaaaaaaaaaaaaaaaaaaaaaaaaaaaaaugcaucccccccccccccccccccccccccccccccaaaggcucuuuucagagccaccagaauu

SEQ ID NO: 7529 - RNA, 1927 nt, Artificial Sequence
  mRNA product Design i-2 comprising derived and/or modified sequence from HRSV(A2)__F-del_DSCav1_mut7 (opt5)
ggggcgcugccuacggagguggcagccaucuccuucucggcaucaagcuuaccauggagcugcucauccugaaggccaacgcuauuaccacaauccuuacggccgugaccuucugcuuugcgagcggccagaauauuacagaagaguucuaccaauccaccuguucugcugucagcaaaggguaucuguccgcccucagaacaggaugguacaccucuguuaucacaauugaacugagcaacaucaaggagaauaaaugcaacggcaccgacgccaaggugaaacuuaucaagcaggaacuggauaaguauaaaaaugcugugacggagcuccagaugcugauguguuccacccccgccacagggucuggaagcgcuauugccuccggcgucgcggugugcaagguucugcaccucgagggggaagugaacaaaaucaagagcgcccugcuuucuaccaauaaagcugucgugucccugagcaacggaguuucugugcucacauuuaagguccuggaccuuaagaauuacauugauaaacagcugcucccuauccugaacaagcaauccuguagcauuucuaauaucgagaccgugauggaguuccagcagaaaaacaaucggcugcucgaaauuacgcgcgaguuuuccgugaacgccggcgucacaaccccgguuagcacauauaugcugaccaauuccgaacuucugucucucaucaacgacaugcccaucaccaacgaucagaagaaacugaugagcaauaacgugcaaauugugagacagcaguccuacagcaucaugugcauuaucaaggaggaaguccuugcuuaugugguucagcugccucucuacggcgugauugacacacccuguuggaaacugcauacgucuccucugugcaccacaaauaccaaggagggguccaacaucugucucacacggaccgaucgcggaugguacugcgacaaugccggcagcgucucuuucuuuccccaagcggaaacguguaaggugugcagcaacagaguuuucugcgauacaaugaacucccugacccuuccuucugaggugaaucuguguaaugucgacaucuuuaacccgaaauaugauugcaagauuaugaccagcaaaacagacguguccagcucugucaucaccucccucggggccauugugagcuguuacggaaagacaaaaugcacggcuucuaauaagaacaagggcaucauuaaaaccuucuccaaugggugugauuauguuagcaacaagggaguggacacagucuccgugggcaauacccuguacuauguuaacaaacaggagggcaagucucuuuacgugaaaggggaacccaucaucaacuuuuaugacccucuggucuuccccagcgaugaguuugacgccuccauuucucaggugaaugaaaagaucaaccaaagccucgcuuucauucggaaguccgaugagcugcugcacaaugugaacgccggaaaaagcacaaccaauaucaugauuacgaccaucauuaucguuaucauugucauccuccugucucuuauugccgugggccugcuccuguacugcaaggcucgcugaggacuagugcaucacauuuaaaagcaucucagccuaccaugagaauaagagaaagaaaaugaagaucaauagcuuauucaucucuuuuucuuuuucguugguguaaagccaacacccugucuaaaaaacauaaauuucuuuaaucauuuugccucuuuucucugugcuucaauuaauaaaaaauggaaagaaccuagaucuaaaaaaaaaaaaaaaaaaaaaaaaaaaaaaaaaaaaaaaaaaaaaaaaaaaaaaaaaaaaaaaaugcaucccccccccccccccccccccccccccccccaaaggcucuuuucagagccaccagaauu

SEQ ID NO: 7530 - RNA, 1927 nt, Artificial Sequence
  mRNA product Design i-2 comprising derived and/or modified sequence from HRSV(A2)__F-del_DSCav1_mut7 (opt6)
ggggcgcugccuacggagguggcagccaucuccuucucggcaucaagcuuaccauggaauuacuaauccucaaagcaaacgcaauuacaaccauacuaaccgcugucaccuuuuguuuugccucaggacaaaacauaacugaagaauuuuaccaaucaacaugcuccgcaguaucuaaaggauaccucagcgcguuaagaacaggaugguacacaucgguaauaaccaucgaauuauccaacauaaaagaaaauaaaugcaauggaacagacgcaaaagucaaauuaauuaaacaagaacuagacaaauauaaaaacgcaguaaccgaauuacaaaugcuaauguguucaacaccagcaacaggaucaggaucagcuauagcuucaggaguugccguaugcaaagugcuacacuuagaaggagaagugaauaaaauaaaaucagcucuauuaucaacgaacaaagccguaguaucucuaucaaauggcguaucaguacucacauucaaaguacucgaccuaaaaaacuauauagauaaacaacuauuacccauccuaaauaaacaaagcugcucuauaucaaacaucgaaacaguaauggaauuucaacaaaaaaacaacagacuacuagaaauaacccgagaguucucaguuaaugcaggaguaacaacaccagucucaacauacaugcucacaaacucagaacuccuaucacuaauaaaugacaugccaauaacaaacgaccaaaaaaaacucaugucuaacaacguccaaauaguaagacaacaauccuacagcauaauguguauaauaaaagaagaaguuuuagcauacgucguacaacuacccuuauauggcguaauagauacaccaugcuggaaacuccauaccucaccucuauguacaacaaauaccaaagaagguucuaauauaugccuaacacgaacugaccgaggaugguacugugacaacgcaggaucagucucuuucuuuccacaagcagaaaccugcaaaguaugcaguaaccgcguauuuugcgacacaaugaacucccuaaccuuaccaucagaaguaaacuuauguaacguagacauauucaauccaaaauaugacugcaaaauaaugacaucaaaaacagacguaagcucaucaguaauaacuucacuaggcgcaauuguaucaugcuauggaaaaaccaaauguaccgcauccaacaaaaauaaaggaauaauaaaaaccuucucuaacggaugcgacuacguaucaaacaaagguguagauacaguuucuguaggaaacacacucuacuauguaaauaaacaagaaggaaaaucacuauacguaaaaggagaaccaauaauaaacuucuaugacccacuuguauuuccaucugaugaauuugaugcaagcauaucacaaguaaacgaaaaaauaaaccaaucucuagccuuuauacgaaaaagcgacgaauuacuacauaacgucaacgcuggaaaaucaacaacaaacauaaugauaacaacaauaauaauaguaauaauagucauccuauuaucacuaaucgccguaggacuacuccuauacugcaaagcuagauaaggacuagugcaucacauuuaaaagcaucucagccuaccaugagaauaagagaaagaaaaugaagaucaauagcuuauucaucucuuuuucuuuuucguugguguaaagccaacacccugucuaaaaaacauaaauuucuuuaaucauuuugccucuuuucucugugcuucaauuaauaaaaaauggaaagaaccuagaucuaaaaaaaaaaaaaaaaaaaaaaaaaaaaaaaaaaaaaaaaaaaaaaaaaaaaaaaaaaaaaaaaugcaucccccccccccccccccccccccccccccccaaaggcucuuuucagagccaccagaauu

SEQ ID NO: 7531 - RNA, 1927 nt, Artificial Sequence
  mRNA product Design i-2 comprising derived and/or modified sequence from HRSV(A2)__F-del_DSCav1_mut7 (opt11)
ggggcgcugccuacggagguggcagccaucuccuucucggcaucaagcuuaccauggaacuccucauccucaaagccaacgccauaaccacuauccucacagcagucacuuucugcuucgccucaggacaaaacauaaccgaagaguucuaccaauccacaugcuccgccgucuccaaaggcuaccucucagcgcuccgcaccggcugguacacauccgucaucaccaucgaacuaagcaacauaaaagaaaacaaaugcaacggcaccgacgccaaaguuaaacucaucaagcaagaacucgacaaauacaaaaacgcagucacagaacuucaaaugcucaugugcuccacacccgccacagguucuggcucagcaaucgcaagcggcgucgccguaugcaaaguccuucaccucgaaggcgaagucaacaaaaucaaauccgcccuccucuccaccaauaaagcugucgucucacucuccaacggcgucagcguccucacauucaaaguccucgaccucaaaaacuacauagacaagcaacuccucccgauacucaacaaacaaagcugcucuaucuccaacaucgaaaccgucauggaguuccaacagaaaaacaaucgucuccucgaaaucacccgcgaguucucaguaaacgccggggucaccacaccagucuccaccuacaugcucaccaacuccgaacuccuuagccucauaaacgacaugcccauaaccaacgaccaaaagaaacucaugagcaacaacguacaaauaguccgacaacaauccuauuccaucauguguaucaucaaagaagaaguccucgcauacguaguccaacucccccuauacggcguaaucgacaccccauguuggaaacuccacaccucaccacucuguaccaccaacaccaaagaaggcucaaacaucugccucacccgcacagaccgcggcugguacugcgacaacgcgggcuccgucagcuucuuuccccaagcggaaaccugcaaagucugcagcaacagagucuucugcgacacuaugaacucccucacccuccccucagaagucaaccucugcaacgucgacaucuucaacccgaaauacgacugcaaaaucaugaccagcaaaacugacgucuccucguccgucaucaccucacucggcgcaaucgugagcugcuacggcaaaaccaaaugcaccgccuccaacaaaaacaaaggcaucauaaaaacauucagcaacggcugcgacuacgucucgaacaaaggagucgacaccguaucagugggcaacacccuauacuacguaaacaagcaagaaggcaaaucacucuacguaaaaggcgaacccaucaucaacuucuacgacccccucgucuuccccuccgacgaguucgacgccuccaucucucaagucaacgagaaaaucaaccaaucccuugccuucauacguaaaagcgacgaacuccuucacaacguaaacgccgggaaauccaccacuaacauaaugaucaccaccaucaucaucguuaucauagucauccuccucucucucauagcagucggccuacuccuguacugcaaagcgcgcuaaggacuagugcaucacauuuaaaagcaucucagccuaccaugagaauaagagaaagaaaaugaagaucaauagcuuauucaucucuuuuucuuuuucguugguguaaagccaacacccugucuaaaaaacauaaauuucuuuaaucauuuugccucuuuucucugugcuucaauuaauaaaaaauggaaagaaccuagaucuaaaaaaaaaaaaaaaaaaaaaaaaaaaaaaaaaaaaaaaaaaaaaaaaaaaaaaaaaaaaaaaaugcaucccccccccccccccccccccccccccccccaaaggcucuuuucagagccaccagaauu

SEQ ID NO: 7532 - RNA, 1762 nt, Artificial Sequence
  mRNA product Design i-3 comprising derived and/or modified sequence from HRSV(A2)__F-del_DSCav1_mut7 (opt1)
gggagaaagcuuaccauggagcugcucauccugaaggccaacgccaucaccaccauccugacggcggugaccuucugcuucgccagcggccagaacaucaccgaggaguucuaccaguccacgugcagcgccgucuccaagggguaccucagcgcccugcggaccggcugguacaccuccgugaucaccaucgagcugagcaacaucaaggagaacaagugcaacgggaccgacgccaaggugaagcucaucaagcaggagcuggacaaguacaagaacgcggucacggagcugcagaugcugaugugcuccaccccggcaaccggcuccggcuccgccaucgcgagcggcgucgccgugugcaaggugcugcaccucgagggggaggucaacaagaucaagagcgcccugcuguccaccaacaaggccguggugagccucuccaacggcgucagcgugcugaccuucaaggugcuggaccucaagaacuacaucgacaagcagcugcugcccauccugaacaagcagagcugcuccaucagcaacaucgagacggugauggaguuccagcagaagaacaaccggcuccuggagaucacccgcgaguucagcgugaacgccggggucaccacccccguguccacguacaugcugaccaacagcgagcuccugucccugaucaacgacaugccgaucaccaacgaccagaagaagcucaugagcaacaacgugcagaucguccggcagcaguccuacagcaucaugugcaucaucaaggaggaggugcuggcguacgugguccagcugccccucuacggcgugaucgacacccccugcuggaagcugcacacgagcccccugugcaccaccaacaccaaggagggguccaacaucugccucacgcgcaccgaccggggcugguacugcgacaacgccggcagcgucuccuucuucccgcaggccgagaccugcaaggugugcagcaaccgcguguucugcgacaccaugaacucccugacgcugcccagcgagguaaaccucugcaacgucgacaucuucaaccccaaguacgacugcaagaucaugaccuccaagaccgacgugagcuccagcgugaucaccucccugggggccaucgucagcugcuacggcaagacgaagugcaccgccagcaacaagaacaaggggaucaucaagaccuucuccaacggcugcgacuacgugagcaacaagggcguggacaccguguccgucgggaacacccuguacuacgugaacaagcaggagggcaagagccucuacgugaagggggagcccaucaucaacuucuacgacccgcuggucuuccccuccgacgaguucgacgcgagcaucucccaggugaacgagaagaucaaccagagccuggccuucauccgcaaguccgacgagcugcuccacaacgugaacgccggcaagagcacgaccaacaucaugaucaccaccaucaucaucgucaucaucgugauccugcugucccucaucgccguggggcugcugcucuacugcaaggcccggugaggacuaguuauaagacugacuagcccgaugggccucccaacgggcccuccuccccuccuugcaccgagauuaauaaaaaaaaaaaaaaaaaaaaaaaaaaaaaaaaaaaaaaaaaaaaaaaaaaaaaaaaaaaaaaaaugcaucccccccccccccccccccccccccccccccaaaggcucuuuucagagccaccagaauu

SEQ ID NO: 7533 - RNA, 1762 nt, Artificial Sequence
  mRNA product Design i-3 comprising derived and/or modified sequence from HRSV(A2)__F-del_DSCav1_mut7 (opt1)
gggagaaagcuuaccauggagcugcucauccugaaggccaacgccaucaccaccauccugacggcggugaccuucugcuucgccagcggccagaacaucaccgaggaguucuaccaguccacgugcagcgccgucuccaagggguaccucagcgcccugcgcaccggcugguacaccuccgugaucaccaucgagcugagcaacaucaaggagaacaagugcaacgggaccgacgccaaggugaagcucaucaagcaggagcuggacaaguacaagaacgcggucacggagcugcagaugcucaugugcuccacccccgccaccggcagcggguccgccaucgccagcggcguggcggugugcaagguccugcaccuggagggcgaggugaacaagaucaaguccgcccuccugagcaccaacaaggccguggucucccugagcaacgggguguccgugcucacguucaagguccuggaccugaagaacuacaucgacaagcagcuccugccgauccugaacaagcagagcugcuccaucagcaacaucgagaccgugauggaguuccagcagaagaacaaccggcuccuggagaucacccgcgaguucuccgugaacgccggcgucaccacgcccgugagcaccuacaugcugaccaacagcgagcuccugucccugaucaacgacaugcccaucaccaacgaccagaagaagcucaugagcaacaacgugcagaucguccggcagcaguccuacagcaucaugugcaucaucaaggaggaggugcuggccuacgugguccagcugccccucuacggggugaucgacacgccgugcuggaagcugcacaccagcccccugugcaccaccaacacgaaggagggcagcaacaucugccucacccgcaccgaccgggggugguacugcgacaacgcgggcuccgugagcuucuucccccaggccgagaccugcaaggucugcuccaaccgcguguucugcgacacgaugaacagccugacccugcccuccgaggucaaccucugcaacguggacaucuucaacccgaaguacgacugcaagaucaugaccagcaagaccgacguguccagcuccgucaucacgagccugggcgccaucguguccugcuacgggaagaccaagugcaccgccagcaacaagaacaagggcaucaucaagaccuucuccaacgggugcgacuacgugagcaacaagggcgucgacacggugagcgugggcaacacccuguacuacgucaacaagcaggaggggaagucccucuacgugaagggcgagcccaucaucaacuucuacgacccccugguguuccccagcgacgaguucgacgccuccaucagccaggucaacgagaagaucaaccagucccuggcguucauccggaaguccgacgagcuccugcacaacgugaacgccgggaaguccaccaccaacaucaugaucaccacgaucaucaucgugaucaucgucauccugcucagccugaucgccgugggccugcuccuguacugcaaggcccgcugaggacuaguuauaagacugacuagcccgaugggccucccaacgggcccuccuccccuccuugcaccgagauuaauaaaaaaaaaaaaaaaaaaaaaaaaaaaaaaaaaaaaaaaaaaaaaaaaaaaaaaaaaaaaaaaaugcaucccccccccccccccccccccccccccccccaaaggcucuuuucagagccaccagaauu

SEQ ID NO: 7534 - RNA, 1762 nt, Artificial Sequence
  mRNA product Design i-3 comprising derived and/or modified sequence from HRSV(A2)__F-del_DSCav1_mut7 (opt2)
gggagaaagcuuaccauggagcuccucauccucaaggccaacgccaucaccaccauccucaccgccgucaccuucugcuucgccuccggccagaacaucaccgaggaguucuaccaguccaccugcuccgccgucuccaagggcuaccucuccgcccuccgcaccggcugguacaccuccgucaucaccaucgagcucuccaacaucaaggagaacaagugcaacggcaccgacgccaaggucaagcucaucaagcaggagcucgacaaguacaagaacgccgucaccgagcuccagaugcucaugugcuccacccccgccaccggcuccggcuccgccaucgccuccggcgucgccgucugcaagguccuccaccucgagggcgaggucaacaagaucaaguccgcccuccucuccaccaacaaggccgucgucucccucuccaacggcgucuccguccucaccuucaagguccucgaccucaagaacuacaucgacaagcagcuccuccccauccucaacaagcaguccugcuccaucuccaacaucgagaccgucauggaguuccagcagaagaacaaccgccuccucgagaucacccgcgaguucuccgucaacgccggcgucaccacccccgucuccaccuacaugcucaccaacuccgagcuccucucccucaucaacgacaugcccaucaccaacgaccagaagaagcucauguccaacaacguccagaucguccgccagcaguccuacuccaucaugugcaucaucaaggaggagguccucgccuacgucguccagcucccccucuacggcgucaucgacacccccugcuggaagcuccacaccuccccccucugcaccaccaacaccaaggagggcuccaacaucugccucacccgcaccgaccgcggcugguacugcgacaacgccggcuccgucuccuucuucccccaggccgagaccugcaaggucugcuccaaccgcgucuucugcgacaccaugaacucccucacccuccccuccgaggucaaccucugcaacgucgacaucuucaaccccaaguacgacugcaagaucaugaccuccaagaccgacgucuccuccuccgucaucaccucccucggcgccaucgucuccugcuacggcaagaccaagugcaccgccuccaacaagaacaagggcaucaucaagaccuucuccaacggcugcgacuacgucuccaacaagggcgucgacaccgucuccgucggcaacacccucuacuacgucaacaagcaggagggcaagucccucuacgucaagggcgagcccaucaucaacuucuacgacccccucgucuuccccuccgacgaguucgacgccuccaucucccaggucaacgagaagaucaaccagucccucgccuucauccgcaaguccgacgagcuccuccacaacgucaacgccggcaaguccaccaccaacaucaugaucaccaccaucaucaucgucaucaucgucauccuccucucccucaucgccgucggccuccuccucuacugcaaggcccgcugaggacuaguuauaagacugacuagcccgaugggccucccaacgggcccuccuccccuccuugcaccgagauuaauaaaaaaaaaaaaaaaaaaaaaaaaaaaaaaaaaaaaaaaaaaaaaaaaaaaaaaaaaaaaaaaaugcaucccccccccccccccccccccccccccccccaaaggcucuuuucagagccaccagaauu

SEQ ID NO: 7535 - RNA, 1762 nt, Artificial Sequence
  mRNA product Design i-3 comprising derived and/or modified sequence from HRSV(A2)__F-del_DSCav1_mut7 (opt3)
gggagaaagcuuaccauggagcugcucauccuuaaggccaacgcuauuaccacaauacugacugcagugacguucugcuuugccagcggccagaauaucaccgaagaguucuaccaauccacauguucugcggucucaaaaggguauuugagugcuuuaagaacuggaugguacaccagcguuauuacaaucgaacuguccaacauuaaggagaauaaaugcaacgguaccgacgccaaggugaaacuaaucaagcaggaacucgauaaguauaaaaaugcaguaacugagcugcagaugcuuauguguucuacacccgccaccggcucggggucagcuauagcaagcggaguggccgucugcaaggugcugcacuuggagggcgaaguuaacaaaaucaagagugcucuccuguccacgaauaaagccguggucucucugagcaacgguguguccguacucacuuuuaagguuuuagaccugaagaauuacauugauaaacagcuuuugccuauccugaacaagcaaucauguaguauuagcaauaucgagaccgugauggaguuccagcagaaaaacaauaggcuacucgaaauaacacgggaguuuucugucaacgcgggggugacuaccccaguguccacauauaugcugaccaauucagaacuucugagcuugauuaacgacaugccgaucacgaacgaucagaagaaacucaugaguaauaacguccaaauuguucgccagcagucuuacuccaucaugugcaucauuaaggaggaagugcuggcauauguagugcaguuaccccuguacggagucauagacacuccuuguuggaaacuccauacaagcccacuuugcaccacuaauacaaaggagggcucgaacaucugucugacccgaacggaucguggcugguacugcgacaaugccgggucuguguccuucuuuccccaagcugaaaccuguaagguuugcucaaacagaguguucugcgauacaaugaauaguuugacucuaccuagcgaggucaaccuguguaauguggacauuuuuaacccaaaauaugauugcaagaucaugaccuccaaaacagacguaucuagcucaguuauaacuagccucggagccauuguguccuguuacgguaagaccaaaugcacagcaagcaauaagaacaagggcaucaucaaaaccuucucuaaugggugugauuaugucucaaacaagggaguggacacugucagugugggcaauacgcuguacuauguuaacaaacaggaggguaagagccuuuacgugaaaggggaacccauuaucaacuuuuaugacccucugguauucccauccgaugaguuugacgcuucuauuucgcaggucaaugaaaagauaaaccaaaguuuggccuucaucaggaaguccgaugagcuccugcacaaugugaacgcgggaaaaucaacaaccaauauuaugaucacuaccaucauuauaguuaucauugugaucuuacugagucuaauugccgucggccuccugcuuuacugcaaggcacggugaggacuaguuauaagacugacuagcccgaugggccucccaacgggcccuccuccccuccuugcaccgagauuaauaaaaaaaaaaaaaaaaaaaaaaaaaaaaaaaaaaaaaaaaaaaaaaaaaaaaaaaaaaaaaaaaugcaucccccccccccccccccccccccccccccccaaaggcucuuuucagagccaccagaauu

SEQ ID NO: 7536 - RNA, 1762 nt, Artificial Sequence
  mRNA product Design i-3 comprising derived and/or modified sequence from HRSV(A2)__F-del_DSCav1_mut7 (opt4)
gggagaaagcuuaccauggagcugcugauccugaaggccaacgccaucaccaccauccugaccgccgugaccuucugcuucgccagcggccagaacaucaccgaggaguucuaccagagcaccugcagcgccgugagcaagggcuaccugagcgcccugagaaccggcugguacaccagcgugaucaccaucgagcugagcaacaucaaggagaacaagugcaacggcaccgacgccaaggugaagcugaucaagcaggagcuggacaaguacaagaacgccgugaccgagcugcagaugcugaugugcagcacccccgccaccggcagcggcagcgccaucgccagcggcguggccgugugcaaggugcugcaccuggagggcgaggugaacaagaucaagagcgcccugcugagcaccaacaaggccguggugagccugagcaacggcgugagcgugcugaccuucaaggugcuggaccugaagaacuacaucgacaagcagcugcugcccauccugaacaagcagagcugcagcaucagcaacaucgagaccgugauggaguuccagcagaagaacaacagacugcuggagaucaccagagaguucagcgugaacgccggcgugaccacccccgugagcaccuacaugcugaccaacagcgagcugcugagccugaucaacgacaugcccaucaccaacgaccagaagaagcugaugagcaacaacgugcagaucgugagacagcagagcuacagcaucaugugcaucaucaaggaggaggugcuggccuacguggugcagcugccccuguacggcgugaucgacacccccugcuggaagcugcacaccagcccccugugcaccaccaacaccaaggagggcagcaacaucugccugaccagaaccgacagaggcugguacugcgacaacgccggcagcgugagcuucuucccccaggccgagaccugcaaggugugcagcaacagaguguucugcgacaccaugaacagccugacccugcccagcgaggugaaccugugcaacguggacaucuucaaccccaaguacgacugcaagaucaugaccagcaagaccgacgugagcagcagcgugaucaccagccugggcgccaucgugagcugcuacggcaagaccaagugcaccgccagcaacaagaacaagggcaucaucaagaccuucagcaacggcugcgacuacgugagcaacaagggcguggacaccgugagcgugggcaacacccuguacuacgugaacaagcaggagggcaagagccuguacgugaagggcgagcccaucaucaacuucuacgacccccugguguuccccagcgacgaguucgacgccagcaucagccaggugaacgagaagaucaaccagagccuggccuucaucagaaagagcgacgagcugcugcacaacgugaacgccggcaagagcaccaccaacaucaugaucaccaccaucaucaucgugaucaucgugauccugcugagccugaucgccgugggccugcugcuguacugcaaggccagaugaggacuaguuauaagacugacuagcccgaugggccucccaacgggcccuccuccccuccuugcaccgagauuaauaaaaaaaaaaaaaaaaaaaaaaaaaaaaaaaaaaaaaaaaaaaaaaaaaaaaaaaaaaaaaaaaugcaucccccccccccccccccccccccccccccccaaaggcucuuuucagagccaccagaauu

SEQ ID NO: 7537 - RNA, 1762 nt, Artificial Sequence
  mRNA product Design i-3 comprising derived and/or modified sequence from HRSV(A2)__F-del_DSCav1_mut7 (opt5)
gggagaaagcuuaccauggagcugcucauccugaaggccaacgcuauuaccacaauccuuacggccgugaccuucugcuuugcgagcggccagaauauuacagaagaguucuaccaauccaccuguucugcugucagcaaaggguaucuguccgcccucagaacaggaugguacaccucuguuaucacaauugaacugagcaacaucaaggagaauaaaugcaacggcaccgacgccaaggugaaacuuaucaagcaggaacuggauaaguauaaaaaugcugugacggagcuccagaugcugauguguuccacccccgccacagggucuggaagcgcuauugccuccggcgucgcggugugcaagguucugcaccucgagggggaagugaacaaaaucaagagcgcccugcuuucuaccaauaaagcugucgugucccugagcaacggaguuucugugcucacauuuaagguccuggaccuuaagaauuacauugauaaacagcugcucccuauccugaacaagcaauccuguagcauuucuaauaucgagaccgugauggaguuccagcagaaaaacaaucggcugcucgaaauuacgcgcgaguuuuccgugaacgccggcgucacaaccccgguuagcacauauaugcugaccaauuccgaacuucugucucucaucaacgacaugcccaucaccaacgaucagaagaaacugaugagcaauaacgugcaaauugugagacagcaguccuacagcaucaugugcauuaucaaggaggaaguccuugcuuaugugguucagcugccucucuacggcgugauugacacacccuguuggaaacugcauacgucuccucugugcaccacaaauaccaaggagggguccaacaucugucucacacggaccgaucgcggaugguacugcgacaaugccggcagcgucucuuucuuuccccaagcggaaacguguaaggugugcagcaacagaguuuucugcgauacaaugaacucccugacccuuccuucugaggugaaucuguguaaugucgacaucuuuaacccgaaauaugauugcaagauuaugaccagcaaaacagacguguccagcucugucaucaccucccucggggccauugugagcuguuacggaaagacaaaaugcacggcuucuaauaagaacaagggcaucauuaaaaccuucuccaaugggugugauuauguuagcaacaagggaguggacacagucuccgugggcaauacccuguacuauguuaacaaacaggagggcaagucucuuuacgugaaaggggaacccaucaucaacuuuuaugacccucuggucuuccccagcgaugaguuugacgccuccauuucucaggugaaugaaaagaucaaccaaagccucgcuuucauucggaaguccgaugagcugcugcacaaugugaacgccggaaaaagcacaaccaauaucaugauuacgaccaucauuaucguuaucauugucauccuccugucucuuauugccgugggccugcuccuguacugcaaggcucgcugaggacuaguuauaagacugacuagcccgaugggccucccaacgggcccuccuccccuccuugcaccgagauuaauaaaaaaaaaaaaaaaaaaaaaaaaaaaaaaaaaaaaaaaaaaaaaaaaaaaaaaaaaaaaaaaaugcaucccccccccccccccccccccccccccccccaaaggcucuuuucagagccaccagaauu

SEQ ID NO: 7538 - RNA, 1762 nt, Artificial Sequence
  mRNA product Design i-3 comprising derived and/or modified sequence from HRSV(A2)__F-del_DSCav1_mut7 (opt6)
gggagaaagcuuaccauggaauuacuaauccucaaagcaaacgcaauuacaaccauacuaaccgcugucaccuuuuguuuugccucaggacaaaacauaacugaagaauuuuaccaaucaacaugcuccgcaguaucuaaaggauaccucagcgcguuaagaacaggaugguacacaucgguaauaaccaucgaauuauccaacauaaaagaaaauaaaugcaauggaacagacgcaaaagucaaauuaauuaaacaagaacuagacaaauauaaaaacgcaguaaccgaauuacaaaugcuaauguguucaacaccagcaacaggaucaggaucagcuauagcuucaggaguugccguaugcaaagugcuacacuuagaaggagaagugaauaaaauaaaaucagcucuauuaucaacgaacaaagccguaguaucucuaucaaauggcguaucaguacucacauucaaaguacucgaccuaaaaaacuauauagauaaacaacuauuacccauccuaaauaaacaaagcugcucuauaucaaacaucgaaacaguaauggaauuucaacaaaaaaacaacagacuacuagaaauaacccgagaguucucaguuaaugcaggaguaacaacaccagucucaacauacaugcucacaaacucagaacuccuaucacuaauaaaugacaugccaauaacaaacgaccaaaaaaaacucaugucuaacaacguccaaauaguaagacaacaauccuacagcauaauguguauaauaaaagaagaaguuuuagcauacgucguacaacuacccuuauauggcguaauagauacaccaugcuggaaacuccauaccucaccucuauguacaacaaauaccaaagaagguucuaauauaugccuaacacgaacugaccgaggaugguacugugacaacgcaggaucagucucuuucuuuccacaagcagaaaccugcaaaguaugcaguaaccgcguauuuugcgacacaaugaacucccuaaccuuaccaucagaaguaaacuuauguaacguagacauauucaauccaaaauaugacugcaaaauaaugacaucaaaaacagacguaagcucaucaguaauaacuucacuaggcgcaauuguaucaugcuauggaaaaaccaaauguaccgcauccaacaaaaauaaaggaauaauaaaaaccuucucuaacggaugcgacuacguaucaaacaaagguguagauacaguuucuguaggaaacacacucuacuauguaaauaaacaagaaggaaaaucacuauacguaaaaggagaaccaauaauaaacuucuaugacccacuuguauuuccaucugaugaauuugaugcaagcauaucacaaguaaacgaaaaaauaaaccaaucucuagccuuuauacgaaaaagcgacgaauuacuacauaacgucaacgcuggaaaaucaacaacaaacauaaugauaacaacaauaauaauaguaauaauagucauccuauuaucacuaaucgccguaggacuacuccuauacugcaaagcuagauaaggacuaguuauaagacugacuagcccgaugggccucccaacgggcccuccuccccuccuugcaccgagauuaauaaaaaaaaaaaaaaaaaaaaaaaaaaaaaaaaaaaaaaaaaaaaaaaaaaaaaaaaaaaaaaaaugcaucccccccccccccccccccccccccccccccaaaggcucuuuucagagccaccagaauu

SEQ ID NO: 7539 - RNA, 1762 nt, Artificial Sequence
  mRNA product Design i-3 comprising derived and/or modified sequence from HRSV(A2)__F-del_DSCav1_mut7 (opt11)
gggagaaagcuuaccauggaacuccucauccucaaagccaacgccauaaccacuauccucacagcagucacuuucugcuucgccucaggacaaaacauaaccgaagaguucuaccaauccacaugcuccgccgucuccaaaggcuaccucucagcgcuccgcaccggcugguacacauccgucaucaccaucgaacuaagcaacauaaaagaaaacaaaugcaacggcaccgacgccaaaguuaaacucaucaagcaagaacucgacaaauacaaaaacgcagucacagaacuucaaaugcucaugugcuccacacccgccacagguucuggcucagcaaucgcaagcggcgucgccguaugcaaaguccuucaccucgaaggcgaagucaacaaaaucaaauccgcccuccucuccaccaauaaagcugucgucucacucuccaacggcgucagcguccucacauucaaaguccucgaccucaaaaacuacauagacaagcaacuccucccgauacucaacaaacaaagcugcucuaucuccaacaucgaaaccgucauggaguuccaacagaaaaacaaucgucuccucgaaaucacccgcgaguucucaguaaacgccggggucaccacaccagucuccaccuacaugcucaccaacuccgaacuccuuagccucauaaacgacaugcccauaaccaacgaccaaaagaaacucaugagcaacaacguacaaauaguccgacaacaauccuauuccaucauguguaucaucaaagaagaaguccucgcauacguaguccaacucccccuauacggcguaaucgacaccccauguuggaaacuccacaccucaccacucuguaccaccaacaccaaagaaggcucaaacaucugccucacccgcacagaccgcggcugguacugcgacaacgcgggcuccgucagcuucuuuccccaagcggaaaccugcaaagucugcagcaacagagucuucugcgacacuaugaacucccucacccuccccucagaagucaaccucugcaacgucgacaucuucaacccgaaauacgacugcaaaaucaugaccagcaaaacugacgucuccucguccgucaucaccucacucggcgcaaucgugagcugcuacggcaaaaccaaaugcaccgccuccaacaaaaacaaaggcaucauaaaaacauucagcaacggcugcgacuacgucucgaacaaaggagucgacaccguaucagugggcaacacccuauacuacguaaacaagcaagaaggcaaaucacucuacguaaaaggcgaacccaucaucaacuucuacgacccccucgucuuccccuccgacgaguucgacgccuccaucucucaagucaacgagaaaaucaaccaaucccuugccuucauacguaaaagcgacgaacuccuucacaacguaaacgccgggaaauccaccacuaacauaaugaucaccaccaucaucaucguuaucauagucauccuccucucucucauagcagucggccuacuccuguacugcaaagcgcgcuaaggacuaguuauaagacugacuagcccgaugggccucccaacgggcccuccuccccuccuugcaccgagauuaauaaaaaaaaaaaaaaaaaaaaaaaaaaaaaaaaaaaaaaaaaaaaaaaaaaaaaaaaaaaaaaaaugcaucccccccccccccccccccccccccccccccaaaggcucuuuucagagccaccagaauu

SEQ ID NO: 7540 - protein, 536 aa, Artificial Sequence
  derived and/or modified protein sequence (artificial) from HRSV(A2)__F_DSCav1_mut8
MELLILKANAITTILTAVTFCFASGQNITEEFYQSTCSAVSKGYLGALRTGWYTSVITIELSNIKEIKCNGTDAKVKLIKQELDKYKNAVTDLQLLMQSTPATGSGSAIASGVAVCKVLHLEGEVNKIKSALLSTNKAVVSLSGCGVSVLTFKVLDLKNYIDKQLLPILNKQSCSIPNIETVIEFQQKNNRLLEITREFSVNAGVTTPVSTYMLTNSELLSLINDMPITNDQKKLMSNNVQIVRQQSYSIMCIIKEEVLAYVVQLPLYGVIDTPCWKLHTSPLCTTNTKEGSNICLTRTDRGWYCDNAGSVSFFPQAETCKVQSNRVFCDTMNSLTLPSEVNLCNVDIFNPKYDCKIMTSKTDVSSSVITSLGAIVSCYGKTKCTASNKCRGIIKTFSNGCDYVSNKGVDTVSVGNTLYYVNKQEGQSLYVKGEPIINFYDPLVFPSDEFDASISQVNEKINQSLAFIRKSDELLHNVNAGKSTTNIMITTIIIVIIVILLSLIAVGLLLYCKARSTPVTLSKDQLSGINNIAFSN

SEQ ID NO: 7541 - RNA, 1611 nt, Artificial Sequence
  derived and/or modified CDS sequence (opt1) from HRSV(A2)__F_DSCav1_mut8
auggagcugcucauccugaaggccaacgccaucaccaccauccugacggcggugaccuucugcuucgccagcggccagaacaucaccgaggaguucuaccaguccacgugcagcgccgucuccaagggguaccucggcgcccugcggaccggcugguacaccuccgugaucaccaucgagcugagcaacaucaaggagaucaagugcaacgggaccgacgccaaggugaagcucaucaagcaggagcuggacaaguacaagaacgcggucacggaccugcagcuccugaugcaguccaccccggcaaccggcuccggcuccgccaucgcgagcggcgucgccgugugcaaggugcugcaccucgagggggaggucaacaagaucaagagcgcccugcuguccaccaacaaggccguggugagccucuccggcugcggcgucagcgugcugaccuucaaggugcuggaccucaagaacuacaucgacaagcagcugcugcccauccugaacaagcagagcugcuccauccccaacaucgagacggugaucgaguuccagcagaagaacaaccggcuccuggagaucacccgcgaguucagcgugaacgccggggucaccacccccguguccacguacaugcugaccaacagcgagcuccugucccugaucaacgacaugccgaucaccaacgaccagaagaagcucaugagcaacaacgugcagaucguccggcagcaguccuacagcaucaugugcaucaucaaggaggaggugcuggcguacgugguccagcugccccucuacggcgugaucgacacccccugcuggaagcugcacacgagcccccugugcaccaccaacaccaaggagggguccaacaucugccucacgcgcaccgaccggggcugguacugcgacaacgccggcagcgucuccuucuucccgcaggccgagaccugcaaggugcagagcaaccgcguguucugcgacaccaugaacucccugacgcugcccagcgagguaaaccucugcaacgucgacaucuucaaccccaaguacgacugcaagaucaugaccuccaagaccgacgugagcuccagcgugaucaccucccugggggccaucgucagcugcuacggcaagacgaagugcaccgccagcaacaagugccgggggaucaucaagaccuucuccaacggcugcgacuacgugagcaacaagggcguggacaccguguccgucgggaacacccuguacuacgugaacaagcaggagggccagagccucuacgugaagggggagcccaucaucaacuucuacgacccgcuggucuuccccuccgacgaguucgacgcgagcaucucccaggugaacgagaagaucaaccagagccuggccuucauccgcaaguccgacgagcugcuccacaacgugaacgccggcaagagcacgaccaacaucaugaucaccaccaucaucaucgucaucaucgugauccugcugucccucaucgccguggggcugcugcucuacugcaaggcccggagcacgcccgucacccuguccaaggaccagcugagcggcaucaacaacaucgcguucuccaacuga

SEQ ID NO: 7542 - RNA, 1611 nt, Artificial Sequence
  derived and/or modified CDS sequence (opt1) from HRSV(A2)__F_DSCav1_mut8
auggagcugcucauccugaaggccaacgccaucaccaccauccugacggcggugaccuucugcuucgccagcggccagaacaucaccgaggaguucuaccaguccacgugcagcgccgucuccaagggguaccucggcgcccugcgcaccgggugguacaccagcgugaucaccaucgagcuguccaacaucaaggagaucaagugcaacggcaccgacgccaaggugaagcucaucaagcaggagcuggacaaguacaagaacgcggucacggaccugcagcuccugaugcagagcacccccgccaccggguccggcagcgccaucgccuccggcguggcggugugcaagguccugcaccucgagggggaggugaacaagaucaagagcgcccugcuguccaccaacaaggccguggucagccucuccggcugcggggugagcgugcugacguucaagguccuggaccucaagaacuacaucgacaagcagcugcugccgauccucaacaagcaguccugcagcauccccaacaucgagaccgugaucgaguuccagcagaagaacaaccggcugcuggagaucacccgcgaguucuccgugaacgccggcgucaccacgcccgugagcaccuacaugcucaccaacuccgagcugcugagccucaucaacgacaugcccaucaccaacgaccagaagaagcugaugagcaacaacgugcagaucguccggcagcaguccuacagcaucaugugcaucaucaaggaggaggugcuggccuacgugguccagcucccgcuguacggggugaucgacacgcccugcuggaagcugcacaccagcccccucugcaccaccaacacgaaggagggcuccaacaucugccugacccgcaccgaccggggcugguacugcgacaacgcgggguccgugagcuucuucccccaggccgagaccugcaagguccaguccaaccgcguguucugcgacacgaugaacagccugacccucccguccgaggucaaccugugcaacguggacaucuucaaccccaaguacgacugcaagaucaugaccagcaagaccgacguguccagcuccgucaucacgagccugggcgccaucguguccugcuacgggaagaccaagugcaccgccagcaacaagugccggggcaucaucaagaccuucuccaacggcugcgacuacgugagcaacaagggggucgacacgguguccgugggcaacacccucuacuacgucaacaagcaggaggggcagagccuguacgugaagggcgagcccaucaucaacuucuacgacccccugguguucccgagcgacgaguucgacgccuccaucagccaggucaacgagaagaucaaccagucccucgcguucauccgcaagagcgacgagcugcugcacaacgugaacgccgggaaguccaccaccaacaucaugaucaccacgaucaucaucgugaucaucgucauccuccugagccugaucgccgugggccuccugcuguacugcaaggcccgguccacccccgugacccugagcaaggaccagcucuccggcaucaacaacaucgccuucagcaacuga

SEQ ID NO: 7543 - RNA, 1611 nt, Artificial Sequence
  derived and/or modified CDS sequence (opt2) from HRSV(A2)__F_DSCav1_mut8
auggagcuccucauccucaaggccaacgccaucaccaccauccucaccgccgucaccuucugcuucgccuccggccagaacaucaccgaggaguucuaccaguccaccugcuccgccgucuccaagggcuaccucggcgcccuccgcaccggcugguacaccuccgucaucaccaucgagcucuccaacaucaaggagaucaagugcaacggcaccgacgccaaggucaagcucaucaagcaggagcucgacaaguacaagaacgccgucaccgaccuccagcuccucaugcaguccacccccgccaccggcuccggcuccgccaucgccuccggcgucgccgucugcaagguccuccaccucgagggcgaggucaacaagaucaaguccgcccuccucuccaccaacaaggccgucgucucccucuccggcugcggcgucuccguccucaccuucaagguccucgaccucaagaacuacaucgacaagcagcuccuccccauccucaacaagcaguccugcuccauccccaacaucgagaccgucaucgaguuccagcagaagaacaaccgccuccucgagaucacccgcgaguucuccgucaacgccggcgucaccacccccgucuccaccuacaugcucaccaacuccgagcuccucucccucaucaacgacaugcccaucaccaacgaccagaagaagcucauguccaacaacguccagaucguccgccagcaguccuacuccaucaugugcaucaucaaggaggagguccucgccuacgucguccagcucccccucuacggcgucaucgacacccccugcuggaagcuccacaccuccccccucugcaccaccaacaccaaggagggcuccaacaucugccucacccgcaccgaccgcggcugguacugcgacaacgccggcuccgucuccuucuucccccaggccgagaccugcaagguccaguccaaccgcgucuucugcgacaccaugaacucccucacccuccccuccgaggucaaccucugcaacgucgacaucuucaaccccaaguacgacugcaagaucaugaccuccaagaccgacgucuccuccuccgucaucaccucccucggcgccaucgucuccugcuacggcaagaccaagugcaccgccuccaacaagugccgcggcaucaucaagaccuucuccaacggcugcgacuacgucuccaacaagggcgucgacaccgucuccgucggcaacacccucuacuacgucaacaagcaggagggccagucccucuacgucaagggcgagcccaucaucaacuucuacgacccccucgucuuccccuccgacgaguucgacgccuccaucucccaggucaacgagaagaucaaccagucccucgccuucauccgcaaguccgacgagcuccuccacaacgucaacgccggcaaguccaccaccaacaucaugaucaccaccaucaucaucgucaucaucgucauccuccucucccucaucgccgucggccuccuccucuacugcaaggcccgcuccacccccgucacccucuccaaggaccagcucuccggcaucaacaacaucgccuucuccaacuga

SEQ ID NO: 7544 - RNA, 1611 nt, Artificial Sequence
  derived and/or modified CDS sequence (opt3) from HRSV(A2)__F_DSCav1_mut8
auggagcugcucauccuuaaggccaacgcuauuaccacaauacugacugcagugacguucugcuuugccagcggccagaauaucaccgaagaguucuaccaauccacauguucugcggucucaaaaggguauuugggagcuuuaagaacugguugguacaccaguguuauuacaaucgaacugagcaacauuaaggagaucaaaugcaauggcaccgacgccaaggugaaacuaauaaagcaggaacucgauaaguauaaaaacgcaguaacugaccugcagcuucugaugcaguccacacccgccaccgggucuggaucggcuaucgcaucaggcguggccgucuguaagguguugcaccucgagggugagguuaauaaaauuaagagcgcucugcugaguacgaacaaagccguggucucccucucugggugcggagugagcguauuaacuuuuaagguucuggaucuuaagaauuacaucgacaaacaauugcugccuauucuaaacaagcaguccuguucaaucccaaauauagaaaccgugauugaguuccagcagaaaaacaauaggcuccuggaaaucacacgggaguuuagugucaacgcgggcgugacuaccccggugagcacauauaugcuuaccaauucugagcuguugucccucauuaacgauaugcccaucacgaaugaccaaaagaaacugaugucaaacaacguccagaucguucgccagcagagcuacaguauuaugugcauaaucaaggaagagguguuagcauauguagugcaacugccucucuacggcgucauugauacuccauguuggaaacuucauacaucuccccugugcaccacuaauacaaaggaaggguccaacaucuguuugacccgaacggaccguggaugguacugcgauaaugccgguagcgugucguucuuuccucaggcugagaccuguaagguucagucuaacagaguguucugcgacacaaugaacucccuaacucugccaucagaagucaaucucugcaauguggauauauuuaaccccaaauaugacuguaagauuaugaccaguaaaacagauguaagcuccucuguuaucacuagccugggcgccaucgugucaugcuacgggaagaccaaauguacagcaaguaauaagugcaggggaauuaucaagaccuucuccaacggcugugacuaugucagcaauaaagguguggacacugucucuguggggaacacgcuuuacuauguuaauaagcaagagggacagucacuguacgugaaaggcgagccuauuauaaacuuuuaugauccauugguauucccgagugacgaauuugaugcuagcaucucccaggucaaugagaagauuaaccagucucucgccuucauccggaaaucggacgaacuguuacacaacgugaaugcgggcaagagcacaaccaacaucaugauuacuaccauaaucauuguuaucauugugauccugcuaucccucauagccgucgggcugcuuuuguacugcaaggcacgcucaacacccgugacccugaguaaagaucaacucucuggaaucaauaacauugcuuucagcaauuga

SEQ ID NO: 7545 - RNA, 1611 nt, Artificial Sequence
  derived and/or modified CDS sequence (opt4) from HRSV(A2)__F_DSCav1_mut8
auggagcugcugauccugaaggccaacgccaucaccaccauccugaccgccgugaccuucugcuucgccagcggccagaacaucaccgaggaguucuaccagagcaccugcagcgccgugagcaagggcuaccugggcgcccugagaaccggcugguacaccagcgugaucaccaucgagcugagcaacaucaaggagaucaagugcaacggcaccgacgccaaggugaagcugaucaagcaggagcuggacaaguacaagaacgccgugaccgaccugcagcugcugaugcagagcacccccgccaccggcagcggcagcgccaucgccagcggcguggccgugugcaaggugcugcaccuggagggcgaggugaacaagaucaagagcgcccugcugagcaccaacaaggccguggugagccugagcggcugcggcgugagcgugcugaccuucaaggugcuggaccugaagaacuacaucgacaagcagcugcugcccauccugaacaagcagagcugcagcauccccaacaucgagaccgugaucgaguuccagcagaagaacaacagacugcuggagaucaccagagaguucagcgugaacgccggcgugaccacccccgugagcaccuacaugcugaccaacagcgagcugcugagccugaucaacgacaugcccaucaccaacgaccagaagaagcugaugagcaacaacgugcagaucgugagacagcagagcuacagcaucaugugcaucaucaaggaggaggugcuggccuacguggugcagcugccccuguacggcgugaucgacacccccugcuggaagcugcacaccagcccccugugcaccaccaacaccaaggagggcagcaacaucugccugaccagaaccgacagaggcugguacugcgacaacgccggcagcgugagcuucuucccccaggccgagaccugcaaggugcagagcaacagaguguucugcgacaccaugaacagccugacccugcccagcgaggugaaccugugcaacguggacaucuucaaccccaaguacgacugcaagaucaugaccagcaagaccgacgugagcagcagcgugaucaccagccugggcgccaucgugagcugcuacggcaagaccaagugcaccgccagcaacaagugcagaggcaucaucaagaccuucagcaacggcugcgacuacgugagcaacaagggcguggacaccgugagcgugggcaacacccuguacuacgugaacaagcaggagggccagagccuguacgugaagggcgagcccaucaucaacuucuacgacccccugguguuccccagcgacgaguucgacgccagcaucagccaggugaacgagaagaucaaccagagccuggccuucaucagaaagagcgacgagcugcugcacaacgugaacgccggcaagagcaccaccaacaucaugaucaccaccaucaucaucgugaucaucgugauccugcugagccugaucgccgugggccugcugcuguacugcaaggccagaagcacccccgugacccugagcaaggaccagcugagcggcaucaacaacaucgccuucagcaacuga

SEQ ID NO: 7546 - RNA, 1611 nt, Artificial Sequence
  derived and/or modified CDS sequence (opt5) from HRSV(A2)__F_DSCav1_mut8
auggagcugcucauccugaaggccaacgcuauuaccacaauccuuacggccgugaccuucugcuuugcgagcggccagaauauuacagaagaguucuaccaauccaccuguucugcugucagcaaaggguaucugggagcccucagaacaggcugguacaccuccguuaucacaauugaacugucuaacaucaaggagaucaaaugcaaugggaccgacgccaaggugaaacuuauuaagcaggaacuggauaaguauaaaaacgcugugacggaccuccagcugcugaugcagagcacccccgccacaggauccggcucugcuaucgccagcggggucgcgguguguaagguucuccaccuggagggagaggugaauaaaauuaaguccgcccuucugagcaccaacaaagcugucgugucucucuccggcugcggcguuagcgugcugacauuuaagguccuugaucugaagaauuacaucgacaaacaacuccugccuauucugaacaagcagucuuguuccaucccgaauauugaaaccgugaucgaguuccagcagaaaaacaaucggcuccuggaaaucacgcgcgaguuuagcgugaacgccggggucacaacccccguuucuacauauaugcuuaccaauuccgagcugcucagccugauuaacgauaugccuaucaccaaugaccaaaagaaacuuauguccaacaacgugcagauugugagacagcagucuuacagcaucaugugcauuaucaaggaagagguccuggcuuaugugguucaacucccccuguacggagugaucgauacaccuuguuggaaacugcauacgagcccccucugcaccacaaauaccaaggaaggcagcaacauuugucugacacggaccgaccgcgggugguacugcgauaaugccggaucugucuccuucuuuccucaggcggagacguguaaggugcagagcaacagaguuuucugcgacacaaugaacucucuuacccugccgagcgaagugaaucucugcaaugucgauaucuuuaaccccaaauaugacuguaagauuaugaccuccaaaacagaugugucuagcuccgucaucaccagccugggcgccauugugucuugcuacgggaagacaaaauguacggcuuccaauaagugccggggaaucaucaagaccuucagcaacggcugugacuauguuucuaauaaaggcguggacacagucuccguggggaacacccuuuacuauguuaauaagcaagagggacagagccuguacgugaaaggcgagccuauuaucaacuuuuaugauccccucgucuucccuuccgacgaauuugaugccucuauuagccaggugaaugagaagaucaaccagucccuggcuuucauucgcaaaucugacgaacugcuccacaacgugaaugccgggaaguccacaaccaacaucaugauuacgaccaucaucauuguuaucauugucauccugcuuucccugauugccgugggacuccugcuguacugcaaggcuagaagcacacccgugacccuuucuaaagaucaacucuccggcaucaauaacaucgcguucagcaauuga

SEQ ID NO: 7547 - RNA, 1611 nt, Artificial Sequence
  derived and/or modified CDS sequence (opt6) from HRSV(A2)__F_DSCav1_mut8
auggaacuauuaauauuaaaagcaaacgcaaucacaacuauacuaacagcaguaacauucugcuuugccucaggucaaaacauaacagaggaauuuuaccaauccacaugcucugcuguaagcaaaggauaccucggagcauuaagaacuggaugguacaccucaguaauaacuauagaacuaucaaacauaaaagaaauaaaauguaauggcacagacgcaaaagugaaauuaaucaaacaagaacucgauaaauacaaaaaugccguaaccgaucuccaacuuuuaaugcaaagcacacccgcaacagguuccgggucagcaauagcaagcggaguugcaguaugcaaaguacuacacuuagaaggagaaguaaauaaaaucaaaucagccuuacuaucaacaaauaaagcaguuguaucacucucaggaugcggaguauccguacuaacauuuaaaguacuagaucuaaaaaacuacauagauaaacaacucuuaccaauacuaaauaaacaaucauguuccauacccaacauagaaaccguuaucgaauuucaacaaaaaaacaacagauuacuagaaaucacacgagaauuuucaguaaaugcuggagucacaacaccaguuaguacauacaugcucaccaauucagaacuacuaaguuuaauuaacgauaugccaauaacaaacgaccaaaaaaaacuaaugucaaauaacguacaaauaguaagacaacaaucauacucaaucaugugcauaauaaaagaagaaguacuagccuauguaguccaauuaccacucuacggcguaaucgacaccccaugcuggaaauuacacacaagcccauuaugcaccaccaacacaaaagaagguucaaacauuugcuuaaccagaaccgaucgaggaugguacugcgauaacgcaggaucugucuccuuuuucccacaagccgaaacaugcaaaguucaaucaaaccgaguuuucugugacacuaugaacucacucacacuuccaagcgaaguaaaccuaugcaacguagauauauuuaacccuaaauacgacugcaaaauaaugacaagcaaaacagacguuaguucaucaguaauuacaagucuaggcgcaauagugucaugcuacggaaaaacaaaaugcaccgcauccaauaaaugccgaggaaucauuaaaacauucucaaacggaugcgacuacgucagcaauaaaggaguagacacuguuucuguaggaaacacccuauacuauguaaacaaacaagaaggucaaucacuauacguaaagggagaaccaauuauaaauuuuuacgaccccuuaguauuuccaagugaugaauuugacgcaucuauaagucaaguuaacgaaaaaauuaaccaaucacuugcauuuauaagaaaaucagacgaacuacuccauaauguaaacgcagguaaaucaacaacaaacaucaugaucacaaccauaauaauaguaauaauuguaauauuacuaucacuaauagcaguaggauuacuacucuacugcaaagcuagaucuaccccggucacacucucaaaagaccaauuaucuggaauaaacaauauagcauucagcaacuaa

SEQ ID NO: 7548 - RNA, 1611 nt, Artificial Sequence
  derived and/or modified CDS sequence (opt11) from HRSV(A2)__F_DSCav1_mut8
auggaacuccucauccuuaaagccaacgccauaaccaccauccucaccgccgucaccuucugcuucgcuucuggccaaaacauaaccgaagaguucuaccaauccacgugcucugccgugucaaaaggcuaccucggagcccuccgcacagggugguacacuuccgucaucaccaucgaacucucuaacaucaaagaaaucaagugcaacggcacagacgcgaaagucaagcucaucaaacaagaacuagacaaauacaaaaacgccguaacagaccuccaacuccuaaugcaguccacaccagccacaggcuccggcagcgccaucgccuccggcgucgcugucugcaaaguccuacaccucgaaggcgaagucaacaaaaucaagucagcccuccuuagcaccaacaaagcagucgucucuuuaagcgggugcggagucucuguccuaaccuuuaaaguacucgaccucaaaaacuacaucgacaaacaacuacuaccaauacuaaacaaacagagcugcuccauucccaacaucgaaaccguuaucgaguuccaacaaaagaacaaccgccuccucgaaaucacccgcgaguucuccgucaacgcaggcgucaccaccccagucuccaccuauaugcuaaccaacagcgaacuccucagccucaucaaugacaugccaaucaccaacgaccaaaagaaacucauguccaacaacguacagauaguccgccagcaguccuacagcaucaugugcaucaucaaagaagaagugcucgccuacgugguacaacucccucucuacggagucauugauacacccugcuggaaacuccacacaagcccccucugcacuacaaacaccaaagaaggcucuaacauaugccucacccgcacagaccgugguugguacugcgacaacgccggcuccguauccuucuuuccacaagcugaaaccugcaaaguucaaucaaaccgagucuucugcgacaccaugaacucccucacauugcccagcgaagucaaccucugcaacgucgacaucuucaaccccaaguacgacugcaaaaucaugaccuccaaaaccgacgucagcuccagcgugaucacaagccuaggcgcgaucgucagcugcuacggcaaaaccaaaugcacagccuccaacaaaugccgcggaaucauaaaaacauucaguaacggcugcgacuacguguccaauaaaggagucgacaccguauccgucggaaacacccucuacuacgucaacaaacaagaaggacaaucccucuaugucaaaggcgaacccauuaucaacuucuacgacccccuaguuuuccccuccgacgaguucgacgcaagcauuucccaagucaacgaaaagaucaaucaaucccucgccuucauacgcaaaagcgacgaacuacuacacaacguaaacgccggcaaaagcaccaccaacaucaugaucacaacaaucaucaucgucaucaucgucauccuacucucacucaucgccguuggccuacuacucuacugcaaagcccgcuccacacccgucacccucucaaaagaccaacucuccggcaucaacaacaucgcauucagcaacuga

SEQ ID NO: 7549 - RNA, 1887 nt, Artificial Sequence
  mRNA product Design a-1 comprising derived and/or modified sequence from HRSV(A2)__F_DSCav1_mut8 (opt1)
gggagagucccgcagucggcguccagcggcucugcuuguucgugugugugucguugcaggccuuauucaagcuuaccauggagcugcucauccugaaggccaacgccaucaccaccauccugacggcggugaccuucugcuucgccagcggccagaacaucaccgaggaguucuaccaguccacgugcagcgccgucuccaagggguaccucggcgcccugcggaccggcugguacaccuccgugaucaccaucgagcugagcaacaucaaggagaucaagugcaacgggaccgacgccaaggugaagcucaucaagcaggagcuggacaaguacaagaacgcggucacggaccugcagcuccugaugcaguccaccccggcaaccggcuccggcuccgccaucgcgagcggcgucgccgugugcaaggugcugcaccucgagggggaggucaacaagaucaagagcgcccugcuguccaccaacaaggccguggugagccucuccggcugcggcgucagcgugcugaccuucaaggugcuggaccucaagaacuacaucgacaagcagcugcugcccauccugaacaagcagagcugcuccauccccaacaucgagacggugaucgaguuccagcagaagaacaaccggcuccuggagaucacccgcgaguucagcgugaacgccggggucaccacccccguguccacguacaugcugaccaacagcgagcuccugucccugaucaacgacaugccgaucaccaacgaccagaagaagcucaugagcaacaacgugcagaucguccggcagcaguccuacagcaucaugugcaucaucaaggaggaggugcuggcguacgugguccagcugccccucuacggcgugaucgacacccccugcuggaagcugcacacgagcccccugugcaccaccaacaccaaggagggguccaacaucugccucacgcgcaccgaccggggcugguacugcgacaacgccggcagcgucuccuucuucccgcaggccgagaccugcaaggugcagagcaaccgcguguucugcgacaccaugaacucccugacgcugcccagcgagguaaaccucugcaacgucgacaucuucaaccccaaguacgacugcaagaucaugaccuccaagaccgacgugagcuccagcgugaucaccucccugggggccaucgucagcugcuacggcaagacgaagugcaccgccagcaacaagugccgggggaucaucaagaccuucuccaacggcugcgacuacgugagcaacaagggcguggacaccguguccgucgggaacacccuguacuacgugaacaagcaggagggccagagccucuacgugaagggggagcccaucaucaacuucuacgacccgcuggucuuccccuccgacgaguucgacgcgagcaucucccaggugaacgagaagaucaaccagagccuggccuucauccgcaaguccgacgagcugcuccacaacgugaacgccggcaagagcacgaccaacaucaugaucaccaccaucaucaucgucaucaucgugauccugcugucccucaucgccguggggcugcugcucuacugcaaggcccggagcacgcccgucacccuguccaaggaccagcugagcggcaucaacaacaucgcguucuccaacugaggacuagucccuguucccagagcccacuuuuuuuucuuuuuuugaaauaaaauagccugucuuucagaucuaaaaaaaaaaaaaaaaaaaaaaaaaaaaaaaaaaaaaaaaaaaaaaaaaaaaaaaaaaaaaaaaugcaucccccccccccccccccccccccccccccccaaaggcucuuuucagagccaccagaauu

SEQ ID NO: 7550 - RNA, 1887 nt, Artificial Sequence
  mRNA product Design a-1 comprising derived and/or modified sequence from HRSV(A2)__F_DSCav1_mut8 (opt1)
gggagagucccgcagucggcguccagcggcucugcuuguucgugugugugucguugcaggccuuauucaagcuuaccauggagcugcucauccugaaggccaacgccaucaccaccauccugacggcggugaccuucugcuucgccagcggccagaacaucaccgaggaguucuaccaguccacgugcagcgccgucuccaagggguaccucggcgcccugcgcaccgggugguacaccagcgugaucaccaucgagcuguccaacaucaaggagaucaagugcaacggcaccgacgccaaggugaagcucaucaagcaggagcuggacaaguacaagaacgcggucacggaccugcagcuccugaugcagagcacccccgccaccggguccggcagcgccaucgccuccggcguggcggugugcaagguccugcaccucgagggggaggugaacaagaucaagagcgcccugcuguccaccaacaaggccguggucagccucuccggcugcggggugagcgugcugacguucaagguccuggaccucaagaacuacaucgacaagcagcugcugccgauccucaacaagcaguccugcagcauccccaacaucgagaccgugaucgaguuccagcagaagaacaaccggcugcuggagaucacccgcgaguucuccgugaacgccggcgucaccacgcccgugagcaccuacaugcucaccaacuccgagcugcugagccucaucaacgacaugcccaucaccaacgaccagaagaagcugaugagcaacaacgugcagaucguccggcagcaguccuacagcaucaugugcaucaucaaggaggaggugcuggccuacgugguccagcucccgcuguacggggugaucgacacgcccugcuggaagcugcacaccagcccccucugcaccaccaacacgaaggagggcuccaacaucugccugacccgcaccgaccggggcugguacugcgacaacgcgggguccgugagcuucuucccccaggccgagaccugcaagguccaguccaaccgcguguucugcgacacgaugaacagccugacccucccguccgaggucaaccugugcaacguggacaucuucaaccccaaguacgacugcaagaucaugaccagcaagaccgacguguccagcuccgucaucacgagccugggcgccaucguguccugcuacgggaagaccaagugcaccgccagcaacaagugccggggcaucaucaagaccuucuccaacggcugcgacuacgugagcaacaagggggucgacacgguguccgugggcaacacccucuacuacgucaacaagcaggaggggcagagccuguacgugaagggcgagcccaucaucaacuucuacgacccccugguguucccgagcgacgaguucgacgccuccaucagccaggucaacgagaagaucaaccagucccucgcguucauccgcaagagcgacgagcugcugcacaacgugaacgccgggaaguccaccaccaacaucaugaucaccacgaucaucaucgugaucaucgucauccuccugagccugaucgccgugggccuccugcuguacugcaaggcccgguccacccccgugacccugagcaaggaccagcucuccggcaucaacaacaucgccuucagcaacugaggacuagucccuguucccagagcccacuuuuuuuucuuuuuuugaaauaaaauagccugucuuucagaucuaaaaaaaaaaaaaaaaaaaaaaaaaaaaaaaaaaaaaaaaaaaaaaaaaaaaaaaaaaaaaaaaugcaucccccccccccccccccccccccccccccccaaaggcucuuuucagagccaccagaauu

SEQ ID NO: 7551 - RNA, 1887 nt, Artificial Sequence
  mRNA product Design a-1 comprising derived and/or modified sequence from HRSV(A2)__F_DSCav1_mut8 (opt2)
gggagagucccgcagucggcguccagcggcucugcuuguucgugugugugucguugcaggccuuauucaagcuuaccauggagcuccucauccucaaggccaacgccaucaccaccauccucaccgccgucaccuucugcuucgccuccggccagaacaucaccgaggaguucuaccaguccaccugcuccgccgucuccaagggcuaccucggcgcccuccgcaccggcugguacaccuccgucaucaccaucgagcucuccaacaucaaggagaucaagugcaacggcaccgacgccaaggucaagcucaucaagcaggagcucgacaaguacaagaacgccgucaccgaccuccagcuccucaugcaguccacccccgccaccggcuccggcuccgccaucgccuccggcgucgccgucugcaagguccuccaccucgagggcgaggucaacaagaucaaguccgcccuccucuccaccaacaaggccgucgucucccucuccggcugcggcgucuccguccucaccuucaagguccucgaccucaagaacuacaucgacaagcagcuccuccccauccucaacaagcaguccugcuccauccccaacaucgagaccgucaucgaguuccagcagaagaacaaccgccuccucgagaucacccgcgaguucuccgucaacgccggcgucaccacccccgucuccaccuacaugcucaccaacuccgagcuccucucccucaucaacgacaugcccaucaccaacgaccagaagaagcucauguccaacaacguccagaucguccgccagcaguccuacuccaucaugugcaucaucaaggaggagguccucgccuacgucguccagcucccccucuacggcgucaucgacacccccugcuggaagcuccacaccuccccccucugcaccaccaacaccaaggagggcuccaacaucugccucacccgcaccgaccgcggcugguacugcgacaacgccggcuccgucuccuucuucccccaggccgagaccugcaagguccaguccaaccgcgucuucugcgacaccaugaacucccucacccuccccuccgaggucaaccucugcaacgucgacaucuucaaccccaaguacgacugcaagaucaugaccuccaagaccgacgucuccuccuccgucaucaccucccucggcgccaucgucuccugcuacggcaagaccaagugcaccgccuccaacaagugccgcggcaucaucaagaccuucuccaacggcugcgacuacgucuccaacaagggcgucgacaccgucuccgucggcaacacccucuacuacgucaacaagcaggagggccagucccucuacgucaagggcgagcccaucaucaacuucuacgacccccucgucuuccccuccgacgaguucgacgccuccaucucccaggucaacgagaagaucaaccagucccucgccuucauccgcaaguccgacgagcuccuccacaacgucaacgccggcaaguccaccaccaacaucaugaucaccaccaucaucaucgucaucaucgucauccuccucucccucaucgccgucggccuccuccucuacugcaaggcccgcuccacccccgucacccucuccaaggaccagcucuccggcaucaacaacaucgccuucuccaacugaggacuagucccuguucccagagcccacuuuuuuuucuuuuuuugaaauaaaauagccugucuuucagaucuaaaaaaaaaaaaaaaaaaaaaaaaaaaaaaaaaaaaaaaaaaaaaaaaaaaaaaaaaaaaaaaaugcaucccccccccccccccccccccccccccccccaaaggcucuuuucagagccaccagaauu

SEQ ID NO: 7552 - RNA, 1887 nt, Artificial Sequence
  mRNA product Design a-1 comprising derived and/or modified sequence from HRSV(A2)__F_DSCav1_mut8 (opt3)
gggagagucccgcagucggcguccagcggcucugcuuguucgugugugugucguugcaggccuuauucaagcuuaccauggagcugcucauccuuaaggccaacgcuauuaccacaauacugacugcagugacguucugcuuugccagcggccagaauaucaccgaagaguucuaccaauccacauguucugcggucucaaaaggguauuugggagcuuuaagaacugguugguacaccaguguuauuacaaucgaacugagcaacauuaaggagaucaaaugcaauggcaccgacgccaaggugaaacuaauaaagcaggaacucgauaaguauaaaaacgcaguaacugaccugcagcuucugaugcaguccacacccgccaccgggucuggaucggcuaucgcaucaggcguggccgucuguaagguguugcaccucgagggugagguuaauaaaauuaagagcgcucugcugaguacgaacaaagccguggucucccucucugggugcggagugagcguauuaacuuuuaagguucuggaucuuaagaauuacaucgacaaacaauugcugccuauucuaaacaagcaguccuguucaaucccaaauauagaaaccgugauugaguuccagcagaaaaacaauaggcuccuggaaaucacacgggaguuuagugucaacgcgggcgugacuaccccggugagcacauauaugcuuaccaauucugagcuguugucccucauuaacgauaugcccaucacgaaugaccaaaagaaacugaugucaaacaacguccagaucguucgccagcagagcuacaguauuaugugcauaaucaaggaagagguguuagcauauguagugcaacugccucucuacggcgucauugauacuccauguuggaaacuucauacaucuccccugugcaccacuaauacaaaggaaggguccaacaucuguuugacccgaacggaccguggaugguacugcgauaaugccgguagcgugucguucuuuccucaggcugagaccuguaagguucagucuaacagaguguucugcgacacaaugaacucccuaacucugccaucagaagucaaucucugcaauguggauauauuuaaccccaaauaugacuguaagauuaugaccaguaaaacagauguaagcuccucuguuaucacuagccugggcgccaucgugucaugcuacgggaagaccaaauguacagcaaguaauaagugcaggggaauuaucaagaccuucuccaacggcugugacuaugucagcaauaaagguguggacacugucucuguggggaacacgcuuuacuauguuaauaagcaagagggacagucacuguacgugaaaggcgagccuauuauaaacuuuuaugauccauugguauucccgagugacgaauuugaugcuagcaucucccaggucaaugagaagauuaaccagucucucgccuucauccggaaaucggacgaacuguuacacaacgugaaugcgggcaagagcacaaccaacaucaugauuacuaccauaaucauuguuaucauugugauccugcuaucccucauagccgucgggcugcuuuuguacugcaaggcacgcucaacacccgugacccugaguaaagaucaacucucuggaaucaauaacauugcuuucagcaauugaggacuagucccuguucccagagcccacuuuuuuuucuuuuuuugaaauaaaauagccugucuuucagaucuaaaaaaaaaaaaaaaaaaaaaaaaaaaaaaaaaaaaaaaaaaaaaaaaaaaaaaaaaaaaaaaaugcaucccccccccccccccccccccccccccccccaaaggcucuuuucagagccaccagaauu

SEQ ID NO: 7553 - RNA, 1887 nt, Artificial Sequence
  mRNA product Design a-1 comprising derived and/or modified sequence from HRSV(A2)__F_DSCav1_mut8 (opt4)
gggagagucccgcagucggcguccagcggcucugcuuguucgugugugugucguugcaggccuuauucaagcuuaccauggagcugcugauccugaaggccaacgccaucaccaccauccugaccgccgugaccuucugcuucgccagcggccagaacaucaccgaggaguucuaccagagcaccugcagcgccgugagcaagggcuaccugggcgcccugagaaccggcugguacaccagcgugaucaccaucgagcugagcaacaucaaggagaucaagugcaacggcaccgacgccaaggugaagcugaucaagcaggagcuggacaaguacaagaacgccgugaccgaccugcagcugcugaugcagagcacccccgccaccggcagcggcagcgccaucgccagcggcguggccgugugcaaggugcugcaccuggagggcgaggugaacaagaucaagagcgcccugcugagcaccaacaaggccguggugagccugagcggcugcggcgugagcgugcugaccuucaaggugcuggaccugaagaacuacaucgacaagcagcugcugcccauccugaacaagcagagcugcagcauccccaacaucgagaccgugaucgaguuccagcagaagaacaacagacugcuggagaucaccagagaguucagcgugaacgccggcgugaccacccccgugagcaccuacaugcugaccaacagcgagcugcugagccugaucaacgacaugcccaucaccaacgaccagaagaagcugaugagcaacaacgugcagaucgugagacagcagagcuacagcaucaugugcaucaucaaggaggaggugcuggccuacguggugcagcugccccuguacggcgugaucgacacccccugcuggaagcugcacaccagcccccugugcaccaccaacaccaaggagggcagcaacaucugccugaccagaaccgacagaggcugguacugcgacaacgccggcagcgugagcuucuucccccaggccgagaccugcaaggugcagagcaacagaguguucugcgacaccaugaacagccugacccugcccagcgaggugaaccugugcaacguggacaucuucaaccccaaguacgacugcaagaucaugaccagcaagaccgacgugagcagcagcgugaucaccagccugggcgccaucgugagcugcuacggcaagaccaagugcaccgccagcaacaagugcagaggcaucaucaagaccuucagcaacggcugcgacuacgugagcaacaagggcguggacaccgugagcgugggcaacacccuguacuacgugaacaagcaggagggccagagccuguacgugaagggcgagcccaucaucaacuucuacgacccccugguguuccccagcgacgaguucgacgccagcaucagccaggugaacgagaagaucaaccagagccuggccuucaucagaaagagcgacgagcugcugcacaacgugaacgccggcaagagcaccaccaacaucaugaucaccaccaucaucaucgugaucaucgugauccugcugagccugaucgccgugggccugcugcuguacugcaaggccagaagcacccccgugacccugagcaaggaccagcugagcggcaucaacaacaucgccuucagcaacugaggacuagucccuguucccagagcccacuuuuuuuucuuuuuuugaaauaaaauagccugucuuucagaucuaaaaaaaaaaaaaaaaaaaaaaaaaaaaaaaaaaaaaaaaaaaaaaaaaaaaaaaaaaaaaaaaugcaucccccccccccccccccccccccccccccccaaaggcucuuuucagagccaccagaauu

SEQ ID NO: 7554 - RNA, 1887 nt, Artificial Sequence
  mRNA product Design a-1 comprising derived and/or modified sequence from HRSV(A2)__F_DSCav1_mut8 (opt5)
gggagagucccgcagucggcguccagcggcucugcuuguucgugugugugucguugcaggccuuauucaagcuuaccauggagcugcucauccugaaggccaacgcuauuaccacaauccuuacggccgugaccuucugcuuugcgagcggccagaauauuacagaagaguucuaccaauccaccuguucugcugucagcaaaggguaucugggagcccucagaacaggcugguacaccuccguuaucacaauugaacugucuaacaucaaggagaucaaaugcaaugggaccgacgccaaggugaaacuuauuaagcaggaacuggauaaguauaaaaacgcugugacggaccuccagcugcugaugcagagcacccccgccacaggauccggcucugcuaucgccagcggggucgcgguguguaagguucuccaccuggagggagaggugaauaaaauuaaguccgcccuucugagcaccaacaaagcugucgugucucucuccggcugcggcguuagcgugcugacauuuaagguccuugaucugaagaauuacaucgacaaacaacuccugccuauucugaacaagcagucuuguuccaucccgaauauugaaaccgugaucgaguuccagcagaaaaacaaucggcuccuggaaaucacgcgcgaguuuagcgugaacgccggggucacaacccccguuucuacauauaugcuuaccaauuccgagcugcucagccugauuaacgauaugccuaucaccaaugaccaaaagaaacuuauguccaacaacgugcagauugugagacagcagucuuacagcaucaugugcauuaucaaggaagagguccuggcuuaugugguucaacucccccuguacggagugaucgauacaccuuguuggaaacugcauacgagcccccucugcaccacaaauaccaaggaaggcagcaacauuugucugacacggaccgaccgcgggugguacugcgauaaugccggaucugucuccuucuuuccucaggcggagacguguaaggugcagagcaacagaguuuucugcgacacaaugaacucucuuacccugccgagcgaagugaaucucugcaaugucgauaucuuuaaccccaaauaugacuguaagauuaugaccuccaaaacagaugugucuagcuccgucaucaccagccugggcgccauugugucuugcuacgggaagacaaaauguacggcuuccaauaagugccggggaaucaucaagaccuucagcaacggcugugacuauguuucuaauaaaggcguggacacagucuccguggggaacacccuuuacuauguuaauaagcaagagggacagagccuguacgugaaaggcgagccuauuaucaacuuuuaugauccccucgucuucccuuccgacgaauuugaugccucuauuagccaggugaaugagaagaucaaccagucccuggcuuucauucgcaaaucugacgaacugcuccacaacgugaaugccgggaaguccacaaccaacaucaugauuacgaccaucaucauuguuaucauugucauccugcuuucccugauugccgugggacuccugcuguacugcaaggcuagaagcacacccgugacccuuucuaaagaucaacucuccggcaucaauaacaucgcguucagcaauugaggacuagucccuguucccagagcccacuuuuuuuucuuuuuuugaaauaaaauagccugucuuucagaucuaaaaaaaaaaaaaaaaaaaaaaaaaaaaaaaaaaaaaaaaaaaaaaaaaaaaaaaaaaaaaaaaugcaucccccccccccccccccccccccccccccccaaaggcucuuuucagagccaccagaauu

SEQ ID NO: 7555 - RNA, 1887 nt, Artificial Sequence
  mRNA product Design a-1 comprising derived and/or modified sequence from HRSV(A2)__F_DSCav1_mut8 (opt6)
gggagagucccgcagucggcguccagcggcucugcuuguucgugugugugucguugcaggccuuauucaagcuuaccauggaacuauuaauauuaaaagcaaacgcaaucacaacuauacuaacagcaguaacauucugcuuugccucaggucaaaacauaacagaggaauuuuaccaauccacaugcucugcuguaagcaaaggauaccucggagcauuaagaacuggaugguacaccucaguaauaacuauagaacuaucaaacauaaaagaaauaaaauguaauggcacagacgcaaaagugaaauuaaucaaacaagaacucgauaaauacaaaaaugccguaaccgaucuccaacuuuuaaugcaaagcacacccgcaacagguuccgggucagcaauagcaagcggaguugcaguaugcaaaguacuacacuuagaaggagaaguaaauaaaaucaaaucagccuuacuaucaacaaauaaagcaguuguaucacucucaggaugcggaguauccguacuaacauuuaaaguacuagaucuaaaaaacuacauagauaaacaacucuuaccaauacuaaauaaacaaucauguuccauacccaacauagaaaccguuaucgaauuucaacaaaaaaacaacagauuacuagaaaucacacgagaauuuucaguaaaugcuggagucacaacaccaguuaguacauacaugcucaccaauucagaacuacuaaguuuaauuaacgauaugccaauaacaaacgaccaaaaaaaacuaaugucaaauaacguacaaauaguaagacaacaaucauacucaaucaugugcauaauaaaagaagaaguacuagccuauguaguccaauuaccacucuacggcguaaucgacaccccaugcuggaaauuacacacaagcccauuaugcaccaccaacacaaaagaagguucaaacauuugcuuaaccagaaccgaucgaggaugguacugcgauaacgcaggaucugucuccuuuuucccacaagccgaaacaugcaaaguucaaucaaaccgaguuuucugugacacuaugaacucacucacacuuccaagcgaaguaaaccuaugcaacguagauauauuuaacccuaaauacgacugcaaaauaaugacaagcaaaacagacguuaguucaucaguaauuacaagucuaggcgcaauagugucaugcuacggaaaaacaaaaugcaccgcauccaauaaaugccgaggaaucauuaaaacauucucaaacggaugcgacuacgucagcaauaaaggaguagacacuguuucuguaggaaacacccuauacuauguaaacaaacaagaaggucaaucacuauacguaaagggagaaccaauuauaaauuuuuacgaccccuuaguauuuccaagugaugaauuugacgcaucuauaagucaaguuaacgaaaaaauuaaccaaucacuugcauuuauaagaaaaucagacgaacuacuccauaauguaaacgcagguaaaucaacaacaaacaucaugaucacaaccauaauaauaguaauaauuguaauauuacuaucacuaauagcaguaggauuacuacucuacugcaaagcuagaucuaccccggucacacucucaaaagaccaauuaucuggaauaaacaauauagcauucagcaacuaaggacuagucccuguucccagagcccacuuuuuuuucuuuuuuugaaauaaaauagccugucuuucagaucuaaaaaaaaaaaaaaaaaaaaaaaaaaaaaaaaaaaaaaaaaaaaaaaaaaaaaaaaaaaaaaaaugcaucccccccccccccccccccccccccccccccaaaggcucuuuucagagccaccagaauu

SEQ ID NO: 7556 - RNA, 1887 nt, Artificial Sequence
  mRNA product Design a-1 comprising derived and/or modified sequence from HRSV(A2)__F_DSCav1_mut8 (opt11)
gggagagucccgcagucggcguccagcggcucugcuuguucgugugugugucguugcaggccuuauucaagcuuaccauggaacuccucauccuuaaagccaacgccauaaccaccauccucaccgccgucaccuucugcuucgcuucuggccaaaacauaaccgaagaguucuaccaauccacgugcucugccgugucaaaaggcuaccucggagcccuccgcacagggugguacacuuccgucaucaccaucgaacucucuaacaucaaagaaaucaagugcaacggcacagacgcgaaagucaagcucaucaaacaagaacuagacaaauacaaaaacgccguaacagaccuccaacuccuaaugcaguccacaccagccacaggcuccggcagcgccaucgccuccggcgucgcugucugcaaaguccuacaccucgaaggcgaagucaacaaaaucaagucagcccuccuuagcaccaacaaagcagucgucucuuuaagcgggugcggagucucuguccuaaccuuuaaaguacucgaccucaaaaacuacaucgacaaacaacuacuaccaauacuaaacaaacagagcugcuccauucccaacaucgaaaccguuaucgaguuccaacaaaagaacaaccgccuccucgaaaucacccgcgaguucuccgucaacgcaggcgucaccaccccagucuccaccuauaugcuaaccaacagcgaacuccucagccucaucaaugacaugccaaucaccaacgaccaaaagaaacucauguccaacaacguacagauaguccgccagcaguccuacagcaucaugugcaucaucaaagaagaagugcucgccuacgugguacaacucccucucuacggagucauugauacacccugcuggaaacuccacacaagcccccucugcacuacaaacaccaaagaaggcucuaacauaugccucacccgcacagaccgugguugguacugcgacaacgccggcuccguauccuucuuuccacaagcugaaaccugcaaaguucaaucaaaccgagucuucugcgacaccaugaacucccucacauugcccagcgaagucaaccucugcaacgucgacaucuucaaccccaaguacgacugcaaaaucaugaccuccaaaaccgacgucagcuccagcgugaucacaagccuaggcgcgaucgucagcugcuacggcaaaaccaaaugcacagccuccaacaaaugccgcggaaucauaaaaacauucaguaacggcugcgacuacguguccaauaaaggagucgacaccguauccgucggaaacacccucuacuacgucaacaaacaagaaggacaaucccucuaugucaaaggcgaacccauuaucaacuucuacgacccccuaguuuuccccuccgacgaguucgacgcaagcauuucccaagucaacgaaaagaucaaucaaucccucgccuucauacgcaaaagcgacgaacuacuacacaacguaaacgccggcaaaagcaccaccaacaucaugaucacaacaaucaucaucgucaucaucgucauccuacucucacucaucgccguuggccuacuacucuacugcaaagcccgcuccacacccgucacccucucaaaagaccaacucuccggcaucaacaacaucgcauucagcaacugaggacuagucccuguucccagagcccacuuuuuuuucuuuuuuugaaauaaaauagccugucuuucagaucuaaaaaaaaaaaaaaaaaaaaaaaaaaaaaaaaaaaaaaaaaaaaaaaaaaaaaaaaaaaaaaaaugcaucccccccccccccccccccccccccccccccaaaggcucuuuucagagccaccagaauu

SEQ ID NO: 7557 - RNA, 1906 nt, Artificial Sequence
  mRNA product Design a-2 comprising derived and/or modified sequence from HRSV(A2)__F_DSCav1_mut8 (opt1)
gggagaguccgcucagccagguugcagaagcggcuuagcguguguccuaaucuucucucugcguguagguaggccugugccgcaaacaagcuuaccauggagcugcucauccugaaggccaacgccaucaccaccauccugacggcggugaccuucugcuucgccagcggccagaacaucaccgaggaguucuaccaguccacgugcagcgccgucuccaagggguaccucggcgcccugcggaccggcugguacaccuccgugaucaccaucgagcugagcaacaucaaggagaucaagugcaacgggaccgacgccaaggugaagcucaucaagcaggagcuggacaaguacaagaacgcggucacggaccugcagcuccugaugcaguccaccccggcaaccggcuccggcuccgccaucgcgagcggcgucgccgugugcaaggugcugcaccucgagggggaggucaacaagaucaagagcgcccugcuguccaccaacaaggccguggugagccucuccggcugcggcgucagcgugcugaccuucaaggugcuggaccucaagaacuacaucgacaagcagcugcugcccauccugaacaagcagagcugcuccauccccaacaucgagacggugaucgaguuccagcagaagaacaaccggcuccuggagaucacccgcgaguucagcgugaacgccggggucaccacccccguguccacguacaugcugaccaacagcgagcuccugucccugaucaacgacaugccgaucaccaacgaccagaagaagcucaugagcaacaacgugcagaucguccggcagcaguccuacagcaucaugugcaucaucaaggaggaggugcuggcguacgugguccagcugccccucuacggcgugaucgacacccccugcuggaagcugcacacgagcccccugugcaccaccaacaccaaggagggguccaacaucugccucacgcgcaccgaccggggcugguacugcgacaacgccggcagcgucuccuucuucccgcaggccgagaccugcaaggugcagagcaaccgcguguucugcgacaccaugaacucccugacgcugcccagcgagguaaaccucugcaacgucgacaucuucaaccccaaguacgacugcaagaucaugaccuccaagaccgacgugagcuccagcgugaucaccucccugggggccaucgucagcugcuacggcaagacgaagugcaccgccagcaacaagugccgggggaucaucaagaccuucuccaacggcugcgacuacgugagcaacaagggcguggacaccguguccgucgggaacacccuguacuacgugaacaagcaggagggccagagccucuacgugaagggggagcccaucaucaacuucuacgacccgcuggucuuccccuccgacgaguucgacgcgagcaucucccaggugaacgagaagaucaaccagagccuggccuucauccgcaaguccgacgagcugcuccacaacgugaacgccggcaagagcacgaccaacaucaugaucaccaccaucaucaucgucaucaucgugauccugcugucccucaucgccguggggcugcugcucuacugcaaggcccggagcacgcccgucacccuguccaaggaccagcugagcggcaucaacaacaucgcguucuccaacugaggacuagucccuguucccagagcccacuuuuuuuucuuuuuuugaaauaaaauagccugucuuucagaucuaaaaaaaaaaaaaaaaaaaaaaaaaaaaaaaaaaaaaaaaaaaaaaaaaaaaaaaaaaaaaaaaugcaucccccccccccccccccccccccccccccccaaaggcucuuuucagagccaccagaauu

SEQ ID NO: 7558 - RNA, 1906 nt, Artificial Sequence
  mRNA product Design a-2 comprising derived and/or modified sequence from HRSV(A2)__F_DSCav1_mut8 (opt1)
gggagaguccgcucagccagguugcagaagcggcuuagcguguguccuaaucuucucucugcguguagguaggccugugccgcaaacaagcuuaccauggagcugcucauccugaaggccaacgccaucaccaccauccugacggcggugaccuucugcuucgccagcggccagaacaucaccgaggaguucuaccaguccacgugcagcgccgucuccaagggguaccucggcgcccugcgcaccgggugguacaccagcgugaucaccaucgagcuguccaacaucaaggagaucaagugcaacggcaccgacgccaaggugaagcucaucaagcaggagcuggacaaguacaagaacgcggucacggaccugcagcuccugaugcagagcacccccgccaccggguccggcagcgccaucgccuccggcguggcggugugcaagguccugcaccucgagggggaggugaacaagaucaagagcgcccugcuguccaccaacaaggccguggucagccucuccggcugcggggugagcgugcugacguucaagguccuggaccucaagaacuacaucgacaagcagcugcugccgauccucaacaagcaguccugcagcauccccaacaucgagaccgugaucgaguuccagcagaagaacaaccggcugcuggagaucacccgcgaguucuccgugaacgccggcgucaccacgcccgugagcaccuacaugcucaccaacuccgagcugcugagccucaucaacgacaugcccaucaccaacgaccagaagaagcugaugagcaacaacgugcagaucguccggcagcaguccuacagcaucaugugcaucaucaaggaggaggugcuggccuacgugguccagcucccgcuguacggggugaucgacacgcccugcuggaagcugcacaccagcccccucugcaccaccaacacgaaggagggcuccaacaucugccugacccgcaccgaccggggcugguacugcgacaacgcgggguccgugagcuucuucccccaggccgagaccugcaagguccaguccaaccgcguguucugcgacacgaugaacagccugacccucccguccgaggucaaccugugcaacguggacaucuucaaccccaaguacgacugcaagaucaugaccagcaagaccgacguguccagcuccgucaucacgagccugggcgccaucguguccugcuacgggaagaccaagugcaccgccagcaacaagugccggggcaucaucaagaccuucuccaacggcugcgacuacgugagcaacaagggggucgacacgguguccgugggcaacacccucuacuacgucaacaagcaggaggggcagagccuguacgugaagggcgagcccaucaucaacuucuacgacccccugguguucccgagcgacgaguucgacgccuccaucagccaggucaacgagaagaucaaccagucccucgcguucauccgcaagagcgacgagcugcugcacaacgugaacgccgggaaguccaccaccaacaucaugaucaccacgaucaucaucgugaucaucgucauccuccugagccugaucgccgugggccuccugcuguacugcaaggcccgguccacccccgugacccugagcaaggaccagcucuccggcaucaacaacaucgccuucagcaacugaggacuagucccuguucccagagcccacuuuuuuuucuuuuuuugaaauaaaauagccugucuuucagaucuaaaaaaaaaaaaaaaaaaaaaaaaaaaaaaaaaaaaaaaaaaaaaaaaaaaaaaaaaaaaaaaaugcaucccccccccccccccccccccccccccccccaaaggcucuuuucagagccaccagaauu

SEQ ID NO: 7559 - RNA, 1906 nt, Artificial Sequence
  mRNA product Design a-2 comprising derived and/or modified sequence from HRSV(A2)__F_DSCav1_mut8 (opt2)
gggagaguccgcucagccagguugcagaagcggcuuagcguguguccuaaucuucucucugcguguagguaggccugugccgcaaacaagcuuaccauggagcuccucauccucaaggccaacgccaucaccaccauccucaccgccgucaccuucugcuucgccuccggccagaacaucaccgaggaguucuaccaguccaccugcuccgccgucuccaagggcuaccucggcgcccuccgcaccggcugguacaccuccgucaucaccaucgagcucuccaacaucaaggagaucaagugcaacggcaccgacgccaaggucaagcucaucaagcaggagcucgacaaguacaagaacgccgucaccgaccuccagcuccucaugcaguccacccccgccaccggcuccggcuccgccaucgccuccggcgucgccgucugcaagguccuccaccucgagggcgaggucaacaagaucaaguccgcccuccucuccaccaacaaggccgucgucucccucuccggcugcggcgucuccguccucaccuucaagguccucgaccucaagaacuacaucgacaagcagcuccuccccauccucaacaagcaguccugcuccauccccaacaucgagaccgucaucgaguuccagcagaagaacaaccgccuccucgagaucacccgcgaguucuccgucaacgccggcgucaccacccccgucuccaccuacaugcucaccaacuccgagcuccucucccucaucaacgacaugcccaucaccaacgaccagaagaagcucauguccaacaacguccagaucguccgccagcaguccuacuccaucaugugcaucaucaaggaggagguccucgccuacgucguccagcucccccucuacggcgucaucgacacccccugcuggaagcuccacaccuccccccucugcaccaccaacaccaaggagggcuccaacaucugccucacccgcaccgaccgcggcugguacugcgacaacgccggcuccgucuccuucuucccccaggccgagaccugcaagguccaguccaaccgcgucuucugcgacaccaugaacucccucacccuccccuccgaggucaaccucugcaacgucgacaucuucaaccccaaguacgacugcaagaucaugaccuccaagaccgacgucuccuccuccgucaucaccucccucggcgccaucgucuccugcuacggcaagaccaagugcaccgccuccaacaagugccgcggcaucaucaagaccuucuccaacggcugcgacuacgucuccaacaagggcgucgacaccgucuccgucggcaacacccucuacuacgucaacaagcaggagggccagucccucuacgucaagggcgagcccaucaucaacuucuacgacccccucgucuuccccuccgacgaguucgacgccuccaucucccaggucaacgagaagaucaaccagucccucgccuucauccgcaaguccgacgagcuccuccacaacgucaacgccggcaaguccaccaccaacaucaugaucaccaccaucaucaucgucaucaucgucauccuccucucccucaucgccgucggccuccuccucuacugcaaggcccgcuccacccccgucacccucuccaaggaccagcucuccggcaucaacaacaucgccuucuccaacugaggacuagucccuguucccagagcccacuuuuuuuucuuuuuuugaaauaaaauagccugucuuucagaucuaaaaaaaaaaaaaaaaaaaaaaaaaaaaaaaaaaaaaaaaaaaaaaaaaaaaaaaaaaaaaaaaugcaucccccccccccccccccccccccccccccccaaaggcucuuuucagagccaccagaauu

SEQ ID NO: 7560 - RNA, 1906 nt, Artificial Sequence
  mRNA product Design a-2 comprising derived and/or modified sequence from HRSV(A2)__F_DSCav1_mut8 (opt3)
gggagaguccgcucagccagguugcagaagcggcuuagcguguguccuaaucuucucucugcguguagguaggccugugccgcaaacaagcuuaccauggagcugcucauccuuaaggccaacgcuauuaccacaauacugacugcagugacguucugcuuugccagcggccagaauaucaccgaagaguucuaccaauccacauguucugcggucucaaaaggguauuugggagcuuuaagaacugguugguacaccaguguuauuacaaucgaacugagcaacauuaaggagaucaaaugcaauggcaccgacgccaaggugaaacuaauaaagcaggaacucgauaaguauaaaaacgcaguaacugaccugcagcuucugaugcaguccacacccgccaccgggucuggaucggcuaucgcaucaggcguggccgucuguaagguguugcaccucgagggugagguuaauaaaauuaagagcgcucugcugaguacgaacaaagccguggucucccucucugggugcggagugagcguauuaacuuuuaagguucuggaucuuaagaauuacaucgacaaacaauugcugccuauucuaaacaagcaguccuguucaaucccaaauauagaaaccgugauugaguuccagcagaaaaacaauaggcuccuggaaaucacacgggaguuuagugucaacgcgggcgugacuaccccggugagcacauauaugcuuaccaauucugagcuguugucccucauuaacgauaugcccaucacgaaugaccaaaagaaacugaugucaaacaacguccagaucguucgccagcagagcuacaguauuaugugcauaaucaaggaagagguguuagcauauguagugcaacugccucucuacggcgucauugauacuccauguuggaaacuucauacaucuccccugugcaccacuaauacaaaggaaggguccaacaucuguuugacccgaacggaccguggaugguacugcgauaaugccgguagcgugucguucuuuccucaggcugagaccuguaagguucagucuaacagaguguucugcgacacaaugaacucccuaacucugccaucagaagucaaucucugcaauguggauauauuuaaccccaaauaugacuguaagauuaugaccaguaaaacagauguaagcuccucuguuaucacuagccugggcgccaucgugucaugcuacgggaagaccaaauguacagcaaguaauaagugcaggggaauuaucaagaccuucuccaacggcugugacuaugucagcaauaaagguguggacacugucucuguggggaacacgcuuuacuauguuaauaagcaagagggacagucacuguacgugaaaggcgagccuauuauaaacuuuuaugauccauugguauucccgagugacgaauuugaugcuagcaucucccaggucaaugagaagauuaaccagucucucgccuucauccggaaaucggacgaacuguuacacaacgugaaugcgggcaagagcacaaccaacaucaugauuacuaccauaaucauuguuaucauugugauccugcuaucccucauagccgucgggcugcuuuuguacugcaaggcacgcucaacacccgugacccugaguaaagaucaacucucuggaaucaauaacauugcuuucagcaauugaggacuagucccuguucccagagcccacuuuuuuuucuuuuuuugaaauaaaauagccugucuuucagaucuaaaaaaaaaaaaaaaaaaaaaaaaaaaaaaaaaaaaaaaaaaaaaaaaaaaaaaaaaaaaaaaaugcaucccccccccccccccccccccccccccccccaaaggcucuuuucagagccaccagaauu

SEQ ID NO: 7561 - RNA, 1906 nt, Artificial Sequence
  mRNA product Design a-2 comprising derived and/or modified sequence from HRSV(A2)__F_DSCav1_mut8 (opt4)
gggagaguccgcucagccagguugcagaagcggcuuagcguguguccuaaucuucucucugcguguagguaggccugugccgcaaacaagcuuaccauggagcugcugauccugaaggccaacgccaucaccaccauccugaccgccgugaccuucugcuucgccagcggccagaacaucaccgaggaguucuaccagagcaccugcagcgccgugagcaagggcuaccugggcgcccugagaaccggcugguacaccagcgugaucaccaucgagcugagcaacaucaaggagaucaagugcaacggcaccgacgccaaggugaagcugaucaagcaggagcuggacaaguacaagaacgccgugaccgaccugcagcugcugaugcagagcacccccgccaccggcagcggcagcgccaucgccagcggcguggccgugugcaaggugcugcaccuggagggcgaggugaacaagaucaagagcgcccugcugagcaccaacaaggccguggugagccugagcggcugcggcgugagcgugcugaccuucaaggugcuggaccugaagaacuacaucgacaagcagcugcugcccauccugaacaagcagagcugcagcauccccaacaucgagaccgugaucgaguuccagcagaagaacaacagacugcuggagaucaccagagaguucagcgugaacgccggcgugaccacccccgugagcaccuacaugcugaccaacagcgagcugcugagccugaucaacgacaugcccaucaccaacgaccagaagaagcugaugagcaacaacgugcagaucgugagacagcagagcuacagcaucaugugcaucaucaaggaggaggugcuggccuacguggugcagcugccccuguacggcgugaucgacacccccugcuggaagcugcacaccagcccccugugcaccaccaacaccaaggagggcagcaacaucugccugaccagaaccgacagaggcugguacugcgacaacgccggcagcgugagcuucuucccccaggccgagaccugcaaggugcagagcaacagaguguucugcgacaccaugaacagccugacccugcccagcgaggugaaccugugcaacguggacaucuucaaccccaaguacgacugcaagaucaugaccagcaagaccgacgugagcagcagcgugaucaccagccugggcgccaucgugagcugcuacggcaagaccaagugcaccgccagcaacaagugcagaggcaucaucaagaccuucagcaacggcugcgacuacgugagcaacaagggcguggacaccgugagcgugggcaacacccuguacuacgugaacaagcaggagggccagagccuguacgugaagggcgagcccaucaucaacuucuacgacccccugguguuccccagcgacgaguucgacgccagcaucagccaggugaacgagaagaucaaccagagccuggccuucaucagaaagagcgacgagcugcugcacaacgugaacgccggcaagagcaccaccaacaucaugaucaccaccaucaucaucgugaucaucgugauccugcugagccugaucgccgugggccugcugcuguacugcaaggccagaagcacccccgugacccugagcaaggaccagcugagcggcaucaacaacaucgccuucagcaacugaggacuagucccuguucccagagcccacuuuuuuuucuuuuuuugaaauaaaauagccugucuuucagaucuaaaaaaaaaaaaaaaaaaaaaaaaaaaaaaaaaaaaaaaaaaaaaaaaaaaaaaaaaaaaaaaaugcaucccccccccccccccccccccccccccccccaaaggcucuuuucagagccaccagaauu

SEQ ID NO: 7562 - RNA, 1906 nt, Artificial Sequence
  mRNA product Design a-2 comprising derived and/or modified sequence from HRSV(A2)__F_DSCav1_mut8 (opt5)
gggagaguccgcucagccagguugcagaagcggcuuagcguguguccuaaucuucucucugcguguagguaggccugugccgcaaacaagcuuaccauggagcugcucauccugaaggccaacgcuauuaccacaauccuuacggccgugaccuucugcuuugcgagcggccagaauauuacagaagaguucuaccaauccaccuguucugcugucagcaaaggguaucugggagcccucagaacaggcugguacaccuccguuaucacaauugaacugucuaacaucaaggagaucaaaugcaaugggaccgacgccaaggugaaacuuauuaagcaggaacuggauaaguauaaaaacgcugugacggaccuccagcugcugaugcagagcacccccgccacaggauccggcucugcuaucgccagcggggucgcgguguguaagguucuccaccuggagggagaggugaauaaaauuaaguccgcccuucugagcaccaacaaagcugucgugucucucuccggcugcggcguuagcgugcugacauuuaagguccuugaucugaagaauuacaucgacaaacaacuccugccuauucugaacaagcagucuuguuccaucccgaauauugaaaccgugaucgaguuccagcagaaaaacaaucggcuccuggaaaucacgcgcgaguuuagcgugaacgccggggucacaacccccguuucuacauauaugcuuaccaauuccgagcugcucagccugauuaacgauaugccuaucaccaaugaccaaaagaaacuuauguccaacaacgugcagauugugagacagcagucuuacagcaucaugugcauuaucaaggaagagguccuggcuuaugugguucaacucccccuguacggagugaucgauacaccuuguuggaaacugcauacgagcccccucugcaccacaaauaccaaggaaggcagcaacauuugucugacacggaccgaccgcgggugguacugcgauaaugccggaucugucuccuucuuuccucaggcggagacguguaaggugcagagcaacagaguuuucugcgacacaaugaacucucuuacccugccgagcgaagugaaucucugcaaugucgauaucuuuaaccccaaauaugacuguaagauuaugaccuccaaaacagaugugucuagcuccgucaucaccagccugggcgccauugugucuugcuacgggaagacaaaauguacggcuuccaauaagugccggggaaucaucaagaccuucagcaacggcugugacuauguuucuaauaaaggcguggacacagucuccguggggaacacccuuuacuauguuaauaagcaagagggacagagccuguacgugaaaggcgagccuauuaucaacuuuuaugauccccucgucuucccuuccgacgaauuugaugccucuauuagccaggugaaugagaagaucaaccagucccuggcuuucauucgcaaaucugacgaacugcuccacaacgugaaugccgggaaguccacaaccaacaucaugauuacgaccaucaucauuguuaucauugucauccugcuuucccugauugccgugggacuccugcuguacugcaaggcuagaagcacacccgugacccuuucuaaagaucaacucuccggcaucaauaacaucgcguucagcaauugaggacuagucccuguucccagagcccacuuuuuuuucuuuuuuugaaauaaaauagccugucuuucagaucuaaaaaaaaaaaaaaaaaaaaaaaaaaaaaaaaaaaaaaaaaaaaaaaaaaaaaaaaaaaaaaaaugcaucccccccccccccccccccccccccccccccaaaggcucuuuucagagccaccagaauu

SEQ ID NO: 7563 - RNA, 1906 nt, Artificial Sequence
  mRNA product Design a-2 comprising derived and/or modified sequence from HRSV(A2)__F_DSCav1_mut8 (opt6)
gggagaguccgcucagccagguugcagaagcggcuuagcguguguccuaaucuucucucugcguguagguaggccugugccgcaaacaagcuuaccauggaacuauuaauauuaaaagcaaacgcaaucacaacuauacuaacagcaguaacauucugcuuugccucaggucaaaacauaacagaggaauuuuaccaauccacaugcucugcuguaagcaaaggauaccucggagcauuaagaacuggaugguacaccucaguaauaacuauagaacuaucaaacauaaaagaaauaaaauguaauggcacagacgcaaaagugaaauuaaucaaacaagaacucgauaaauacaaaaaugccguaaccgaucuccaacuuuuaaugcaaagcacacccgcaacagguuccgggucagcaauagcaagcggaguugcaguaugcaaaguacuacacuuagaaggagaaguaaauaaaaucaaaucagccuuacuaucaacaaauaaagcaguuguaucacucucaggaugcggaguauccguacuaacauuuaaaguacuagaucuaaaaaacuacauagauaaacaacucuuaccaauacuaaauaaacaaucauguuccauacccaacauagaaaccguuaucgaauuucaacaaaaaaacaacagauuacuagaaaucacacgagaauuuucaguaaaugcuggagucacaacaccaguuaguacauacaugcucaccaauucagaacuacuaaguuuaauuaacgauaugccaauaacaaacgaccaaaaaaaacuaaugucaaauaacguacaaauaguaagacaacaaucauacucaaucaugugcauaauaaaagaagaaguacuagccuauguaguccaauuaccacucuacggcguaaucgacaccccaugcuggaaauuacacacaagcccauuaugcaccaccaacacaaaagaagguucaaacauuugcuuaaccagaaccgaucgaggaugguacugcgauaacgcaggaucugucuccuuuuucccacaagccgaaacaugcaaaguucaaucaaaccgaguuuucugugacacuaugaacucacucacacuuccaagcgaaguaaaccuaugcaacguagauauauuuaacccuaaauacgacugcaaaauaaugacaagcaaaacagacguuaguucaucaguaauuacaagucuaggcgcaauagugucaugcuacggaaaaacaaaaugcaccgcauccaauaaaugccgaggaaucauuaaaacauucucaaacggaugcgacuacgucagcaauaaaggaguagacacuguuucuguaggaaacacccuauacuauguaaacaaacaagaaggucaaucacuauacguaaagggagaaccaauuauaaauuuuuacgaccccuuaguauuuccaagugaugaauuugacgcaucuauaagucaaguuaacgaaaaaauuaaccaaucacuugcauuuauaagaaaaucagacgaacuacuccauaauguaaacgcagguaaaucaacaacaaacaucaugaucacaaccauaauaauaguaauaauuguaauauuacuaucacuaauagcaguaggauuacuacucuacugcaaagcuagaucuaccccggucacacucucaaaagaccaauuaucuggaauaaacaauauagcauucagcaacuaaggacuagucccuguucccagagcccacuuuuuuuucuuuuuuugaaauaaaauagccugucuuucagaucuaaaaaaaaaaaaaaaaaaaaaaaaaaaaaaaaaaaaaaaaaaaaaaaaaaaaaaaaaaaaaaaaugcaucccccccccccccccccccccccccccccccaaaggcucuuuucagagccaccagaauu

SEQ ID NO: 7564 - RNA, 1906 nt, Artificial Sequence
  mRNA product Design a-2 comprising derived and/or modified sequence from HRSV(A2)__F_DSCav1_mut8 (opt11)
gggagaguccgcucagccagguugcagaagcggcuuagcguguguccuaaucuucucucugcguguagguaggccugugccgcaaacaagcuuaccauggaacuccucauccuuaaagccaacgccauaaccaccauccucaccgccgucaccuucugcuucgcuucuggccaaaacauaaccgaagaguucuaccaauccacgugcucugccgugucaaaaggcuaccucggagcccuccgcacagggugguacacuuccgucaucaccaucgaacucucuaacaucaaagaaaucaagugcaacggcacagacgcgaaagucaagcucaucaaacaagaacuagacaaauacaaaaacgccguaacagaccuccaacuccuaaugcaguccacaccagccacaggcuccggcagcgccaucgccuccggcgucgcugucugcaaaguccuacaccucgaaggcgaagucaacaaaaucaagucagcccuccuuagcaccaacaaagcagucgucucuuuaagcgggugcggagucucuguccuaaccuuuaaaguacucgaccucaaaaacuacaucgacaaacaacuacuaccaauacuaaacaaacagagcugcuccauucccaacaucgaaaccguuaucgaguuccaacaaaagaacaaccgccuccucgaaaucacccgcgaguucuccgucaacgcaggcgucaccaccccagucuccaccuauaugcuaaccaacagcgaacuccucagccucaucaaugacaugccaaucaccaacgaccaaaagaaacucauguccaacaacguacagauaguccgccagcaguccuacagcaucaugugcaucaucaaagaagaagugcucgccuacgugguacaacucccucucuacggagucauugauacacccugcuggaaacuccacacaagcccccucugcacuacaaacaccaaagaaggcucuaacauaugccucacccgcacagaccgugguugguacugcgacaacgccggcuccguauccuucuuuccacaagcugaaaccugcaaaguucaaucaaaccgagucuucugcgacaccaugaacucccucacauugcccagcgaagucaaccucugcaacgucgacaucuucaaccccaaguacgacugcaaaaucaugaccuccaaaaccgacgucagcuccagcgugaucacaagccuaggcgcgaucgucagcugcuacggcaaaaccaaaugcacagccuccaacaaaugccgcggaaucauaaaaacauucaguaacggcugcgacuacguguccaauaaaggagucgacaccguauccgucggaaacacccucuacuacgucaacaaacaagaaggacaaucccucuaugucaaaggcgaacccauuaucaacuucuacgacccccuaguuuuccccuccgacgaguucgacgcaagcauuucccaagucaacgaaaagaucaaucaaucccucgccuucauacgcaaaagcgacgaacuacuacacaacguaaacgccggcaaaagcaccaccaacaucaugaucacaacaaucaucaucgucaucaucgucauccuacucucacucaucgccguuggccuacuacucuacugcaaagcccgcuccacacccgucacccucucaaaagaccaacucuccggcaucaacaacaucgcauucagcaacugaggacuagucccuguucccagagcccacuuuuuuuucuuuuuuugaaauaaaauagccugucuuucagaucuaaaaaaaaaaaaaaaaaaaaaaaaaaaaaaaaaaaaaaaaaaaaaaaaaaaaaaaaaaaaaaaaugcaucccccccccccccccccccccccccccccccaaaggcucuuuucagagccaccagaauu

SEQ ID NO: 7565 - RNA, 1984 nt, Artificial Sequence
  mRNA product Design a-3 comprising derived and/or modified sequence from HRSV(A2)__F_DSCav1_mut8 (opt1)
gggagagggcgcuuggcuugcaaggacccugagcugcggcauugaagcacacccaacccaacucgacugaagucagccucacugaaccggaucugagaaucuucucucucugggcuugccagggcucuccgaaccuagcuagcauccucuucaauuccaacuagaaagcuuaccauggagcugcucauccugaaggccaacgccaucaccaccauccugacggcggugaccuucugcuucgccagcggccagaacaucaccgaggaguucuaccaguccacgugcagcgccgucuccaagggguaccucggcgcccugcggaccggcugguacaccuccgugaucaccaucgagcugagcaacaucaaggagaucaagugcaacgggaccgacgccaaggugaagcucaucaagcaggagcuggacaaguacaagaacgcggucacggaccugcagcuccugaugcaguccaccccggcaaccggcuccggcuccgccaucgcgagcggcgucgccgugugcaaggugcugcaccucgagggggaggucaacaagaucaagagcgcccugcuguccaccaacaaggccguggugagccucuccggcugcggcgucagcgugcugaccuucaaggugcuggaccucaagaacuacaucgacaagcagcugcugcccauccugaacaagcagagcugcuccauccccaacaucgagacggugaucgaguuccagcagaagaacaaccggcuccuggagaucacccgcgaguucagcgugaacgccggggucaccacccccguguccacguacaugcugaccaacagcgagcuccugucccugaucaacgacaugccgaucaccaacgaccagaagaagcucaugagcaacaacgugcagaucguccggcagcaguccuacagcaucaugugcaucaucaaggaggaggugcuggcguacgugguccagcugccccucuacggcgugaucgacacccccugcuggaagcugcacacgagcccccugugcaccaccaacaccaaggagggguccaacaucugccucacgcgcaccgaccggggcugguacugcgacaacgccggcagcgucuccuucuucccgcaggccgagaccugcaaggugcagagcaaccgcguguucugcgacaccaugaacucccugacgcugcccagcgagguaaaccucugcaacgucgacaucuucaaccccaaguacgacugcaagaucaugaccuccaagaccgacgugagcuccagcgugaucaccucccugggggccaucgucagcugcuacggcaagacgaagugcaccgccagcaacaagugccgggggaucaucaagaccuucuccaacggcugcgacuacgugagcaacaagggcguggacaccguguccgucgggaacacccuguacuacgugaacaagcaggagggccagagccucuacgugaagggggagcccaucaucaacuucuacgacccgcuggucuuccccuccgacgaguucgacgcgagcaucucccaggugaacgagaagaucaaccagagccuggccuucauccgcaaguccgacgagcugcuccacaacgugaacgccggcaagagcacgaccaacaucaugaucaccaccaucaucaucgucaucaucgugauccugcugucccucaucgccguggggcugcugcucuacugcaaggcccggagcacgcccgucacccuguccaaggaccagcugagcggcaucaacaacaucgcguucuccaacugaggacuagucccuguucccagagcccacuuuuuuuucuuuuuuugaaauaaaauagccugucuuucagaucuaaaaaaaaaaaaaaaaaaaaaaaaaaaaaaaaaaaaaaaaaaaaaaaaaaaaaaaaaaaaaaaaugcaucccccccccccccccccccccccccccccccaaaggcucuuuucagagccaccagaauu

SEQ ID NO: 7566 - RNA, 1984 nt, Artificial Sequence
  mRNA product Design a-3 comprising derived and/or modified sequence from HRSV(A2)__F_DSCav1_mut8 (opt1)
gggagagggcgcuuggcuugcaaggacccugagcugcggcauugaagcacacccaacccaacucgacugaagucagccucacugaaccggaucugagaaucuucucucucugggcuugccagggcucuccgaaccuagcuagcauccucuucaauuccaacuagaaagcuuaccauggagcugcucauccugaaggccaacgccaucaccaccauccugacggcggugaccuucugcuucgccagcggccagaacaucaccgaggaguucuaccaguccacgugcagcgccgucuccaagggguaccucggcgcccugcgcaccgggugguacaccagcgugaucaccaucgagcuguccaacaucaaggagaucaagugcaacggcaccgacgccaaggugaagcucaucaagcaggagcuggacaaguacaagaacgcggucacggaccugcagcuccugaugcagagcacccccgccaccggguccggcagcgccaucgccuccggcguggcggugugcaagguccugcaccucgagggggaggugaacaagaucaagagcgcccugcuguccaccaacaaggccguggucagccucuccggcugcggggugagcgugcugacguucaagguccuggaccucaagaacuacaucgacaagcagcugcugccgauccucaacaagcaguccugcagcauccccaacaucgagaccgugaucgaguuccagcagaagaacaaccggcugcuggagaucacccgcgaguucuccgugaacgccggcgucaccacgcccgugagcaccuacaugcucaccaacuccgagcugcugagccucaucaacgacaugcccaucaccaacgaccagaagaagcugaugagcaacaacgugcagaucguccggcagcaguccuacagcaucaugugcaucaucaaggaggaggugcuggccuacgugguccagcucccgcuguacggggugaucgacacgcccugcuggaagcugcacaccagcccccucugcaccaccaacacgaaggagggcuccaacaucugccugacccgcaccgaccggggcugguacugcgacaacgcgggguccgugagcuucuucccccaggccgagaccugcaagguccaguccaaccgcguguucugcgacacgaugaacagccugacccucccguccgaggucaaccugugcaacguggacaucuucaaccccaaguacgacugcaagaucaugaccagcaagaccgacguguccagcuccgucaucacgagccugggcgccaucguguccugcuacgggaagaccaagugcaccgccagcaacaagugccggggcaucaucaagaccuucuccaacggcugcgacuacgugagcaacaagggggucgacacgguguccgugggcaacacccucuacuacgucaacaagcaggaggggcagagccuguacgugaagggcgagcccaucaucaacuucuacgacccccugguguucccgagcgacgaguucgacgccuccaucagccaggucaacgagaagaucaaccagucccucgcguucauccgcaagagcgacgagcugcugcacaacgugaacgccgggaaguccaccaccaacaucaugaucaccacgaucaucaucgugaucaucgucauccuccugagccugaucgccgugggccuccugcuguacugcaaggcccgguccacccccgugacccugagcaaggaccagcucuccggcaucaacaacaucgccuucagcaacugaggacuagucccuguucccagagcccacuuuuuuuucuuuuuuugaaauaaaauagccugucuuucagaucuaaaaaaaaaaaaaaaaaaaaaaaaaaaaaaaaaaaaaaaaaaaaaaaaaaaaaaaaaaaaaaaaugcaucccccccccccccccccccccccccccccccaaaggcucuuuucagagccaccagaauu

SEQ ID NO: 7567 - RNA, 1984 nt, Artificial Sequence
  mRNA product Design a-3 comprising derived and/or modified sequence from HRSV(A2)__F_DSCav1_mut8 (opt2)
gggagagggcgcuuggcuugcaaggacccugagcugcggcauugaagcacacccaacccaacucgacugaagucagccucacugaaccggaucugagaaucuucucucucugggcuugccagggcucuccgaaccuagcuagcauccucuucaauuccaacuagaaagcuuaccauggagcuccucauccucaaggccaacgccaucaccaccauccucaccgccgucaccuucugcuucgccuccggccagaacaucaccgaggaguucuaccaguccaccugcuccgccgucuccaagggcuaccucggcgcccuccgcaccggcugguacaccuccgucaucaccaucgagcucuccaacaucaaggagaucaagugcaacggcaccgacgccaaggucaagcucaucaagcaggagcucgacaaguacaagaacgccgucaccgaccuccagcuccucaugcaguccacccccgccaccggcuccggcuccgccaucgccuccggcgucgccgucugcaagguccuccaccucgagggcgaggucaacaagaucaaguccgcccuccucuccaccaacaaggccgucgucucccucuccggcugcggcgucuccguccucaccuucaagguccucgaccucaagaacuacaucgacaagcagcuccuccccauccucaacaagcaguccugcuccauccccaacaucgagaccgucaucgaguuccagcagaagaacaaccgccuccucgagaucacccgcgaguucuccgucaacgccggcgucaccacccccgucuccaccuacaugcucaccaacuccgagcuccucucccucaucaacgacaugcccaucaccaacgaccagaagaagcucauguccaacaacguccagaucguccgccagcaguccuacuccaucaugugcaucaucaaggaggagguccucgccuacgucguccagcucccccucuacggcgucaucgacacccccugcuggaagcuccacaccuccccccucugcaccaccaacaccaaggagggcuccaacaucugccucacccgcaccgaccgcggcugguacugcgacaacgccggcuccgucuccuucuucccccaggccgagaccugcaagguccaguccaaccgcgucuucugcgacaccaugaacucccucacccuccccuccgaggucaaccucugcaacgucgacaucuucaaccccaaguacgacugcaagaucaugaccuccaagaccgacgucuccuccuccgucaucaccucccucggcgccaucgucuccugcuacggcaagaccaagugcaccgccuccaacaagugccgcggcaucaucaagaccuucuccaacggcugcgacuacgucuccaacaagggcgucgacaccgucuccgucggcaacacccucuacuacgucaacaagcaggagggccagucccucuacgucaagggcgagcccaucaucaacuucuacgacccccucgucuuccccuccgacgaguucgacgccuccaucucccaggucaacgagaagaucaaccagucccucgccuucauccgcaaguccgacgagcuccuccacaacgucaacgccggcaaguccaccaccaacaucaugaucaccaccaucaucaucgucaucaucgucauccuccucucccucaucgccgucggccuccuccucuacugcaaggcccgcuccacccccgucacccucuccaaggaccagcucuccggcaucaacaacaucgccuucuccaacugaggacuagucccuguucccagagcccacuuuuuuuucuuuuuuugaaauaaaauagccugucuuucagaucuaaaaaaaaaaaaaaaaaaaaaaaaaaaaaaaaaaaaaaaaaaaaaaaaaaaaaaaaaaaaaaaaugcaucccccccccccccccccccccccccccccccaaaggcucuuuucagagccaccagaauu

SEQ ID NO: 7568 - RNA, 1984 nt, Artificial Sequence
  mRNA product Design a-3 comprising derived and/or modified sequence from HRSV(A2)__F_DSCav1_mut8 (opt3)
gggagagggcgcuuggcuugcaaggacccugagcugcggcauugaagcacacccaacccaacucgacugaagucagccucacugaaccggaucugagaaucuucucucucugggcuugccagggcucuccgaaccuagcuagcauccucuucaauuccaacuagaaagcuuaccauggagcugcucauccuuaaggccaacgcuauuaccacaauacugacugcagugacguucugcuuugccagcggccagaauaucaccgaagaguucuaccaauccacauguucugcggucucaaaaggguauuugggagcuuuaagaacugguugguacaccaguguuauuacaaucgaacugagcaacauuaaggagaucaaaugcaauggcaccgacgccaaggugaaacuaauaaagcaggaacucgauaaguauaaaaacgcaguaacugaccugcagcuucugaugcaguccacacccgccaccgggucuggaucggcuaucgcaucaggcguggccgucuguaagguguugcaccucgagggugagguuaauaaaauuaagagcgcucugcugaguacgaacaaagccguggucucccucucugggugcggagugagcguauuaacuuuuaagguucuggaucuuaagaauuacaucgacaaacaauugcugccuauucuaaacaagcaguccuguucaaucccaaauauagaaaccgugauugaguuccagcagaaaaacaauaggcuccuggaaaucacacgggaguuuagugucaacgcgggcgugacuaccccggugagcacauauaugcuuaccaauucugagcuguugucccucauuaacgauaugcccaucacgaaugaccaaaagaaacugaugucaaacaacguccagaucguucgccagcagagcuacaguauuaugugcauaaucaaggaagagguguuagcauauguagugcaacugccucucuacggcgucauugauacuccauguuggaaacuucauacaucuccccugugcaccacuaauacaaaggaaggguccaacaucuguuugacccgaacggaccguggaugguacugcgauaaugccgguagcgugucguucuuuccucaggcugagaccuguaagguucagucuaacagaguguucugcgacacaaugaacucccuaacucugccaucagaagucaaucucugcaauguggauauauuuaaccccaaauaugacuguaagauuaugaccaguaaaacagauguaagcuccucuguuaucacuagccugggcgccaucgugucaugcuacgggaagaccaaauguacagcaaguaauaagugcaggggaauuaucaagaccuucuccaacggcugugacuaugucagcaauaaagguguggacacugucucuguggggaacacgcuuuacuauguuaauaagcaagagggacagucacuguacgugaaaggcgagccuauuauaaacuuuuaugauccauugguauucccgagugacgaauuugaugcuagcaucucccaggucaaugagaagauuaaccagucucucgccuucauccggaaaucggacgaacuguuacacaacgugaaugcgggcaagagcacaaccaacaucaugauuacuaccauaaucauuguuaucauugugauccugcuaucccucauagccgucgggcugcuuuuguacugcaaggcacgcucaacacccgugacccugaguaaagaucaacucucuggaaucaauaacauugcuuucagcaauugaggacuagucccuguucccagagcccacuuuuuuuucuuuuuuugaaauaaaauagccugucuuucagaucuaaaaaaaaaaaaaaaaaaaaaaaaaaaaaaaaaaaaaaaaaaaaaaaaaaaaaaaaaaaaaaaaugcaucccccccccccccccccccccccccccccccaaaggcucuuuucagagccaccagaauu

SEQ ID NO: 7569 - RNA, 1984 nt, Artificial Sequence
  mRNA product Design a-3 comprising derived and/or modified sequence from HRSV(A2)__F_DSCav1_mut8 (opt4)
gggagagggcgcuuggcuugcaaggacccugagcugcggcauugaagcacacccaacccaacucgacugaagucagccucacugaaccggaucugagaaucuucucucucugggcuugccagggcucuccgaaccuagcuagcauccucuucaauuccaacuagaaagcuuaccauggagcugcugauccugaaggccaacgccaucaccaccauccugaccgccgugaccuucugcuucgccagcggccagaacaucaccgaggaguucuaccagagcaccugcagcgccgugagcaagggcuaccugggcgcccugagaaccggcugguacaccagcgugaucaccaucgagcugagcaacaucaaggagaucaagugcaacggcaccgacgccaaggugaagcugaucaagcaggagcuggacaaguacaagaacgccgugaccgaccugcagcugcugaugcagagcacccccgccaccggcagcggcagcgccaucgccagcggcguggccgugugcaaggugcugcaccuggagggcgaggugaacaagaucaagagcgcccugcugagcaccaacaaggccguggugagccugagcggcugcggcgugagcgugcugaccuucaaggugcuggaccugaagaacuacaucgacaagcagcugcugcccauccugaacaagcagagcugcagcauccccaacaucgagaccgugaucgaguuccagcagaagaacaacagacugcuggagaucaccagagaguucagcgugaacgccggcgugaccacccccgugagcaccuacaugcugaccaacagcgagcugcugagccugaucaacgacaugcccaucaccaacgaccagaagaagcugaugagcaacaacgugcagaucgugagacagcagagcuacagcaucaugugcaucaucaaggaggaggugcuggccuacguggugcagcugccccuguacggcgugaucgacacccccugcuggaagcugcacaccagcccccugugcaccaccaacaccaaggagggcagcaacaucugccugaccagaaccgacagaggcugguacugcgacaacgccggcagcgugagcuucuucccccaggccgagaccugcaaggugcagagcaacagaguguucugcgacaccaugaacagccugacccugcccagcgaggugaaccugugcaacguggacaucuucaaccccaaguacgacugcaagaucaugaccagcaagaccgacgugagcagcagcgugaucaccagccugggcgccaucgugagcugcuacggcaagaccaagugcaccgccagcaacaagugcagaggcaucaucaagaccuucagcaacggcugcgacuacgugagcaacaagggcguggacaccgugagcgugggcaacacccuguacuacgugaacaagcaggagggccagagccuguacgugaagggcgagcccaucaucaacuucuacgacccccugguguuccccagcgacgaguucgacgccagcaucagccaggugaacgagaagaucaaccagagccuggccuucaucagaaagagcgacgagcugcugcacaacgugaacgccggcaagagcaccaccaacaucaugaucaccaccaucaucaucgugaucaucgugauccugcugagccugaucgccgugggccugcugcuguacugcaaggccagaagcacccccgugacccugagcaaggaccagcugagcggcaucaacaacaucgccuucagcaacugaggacuagucccuguucccagagcccacuuuuuuuucuuuuuuugaaauaaaauagccugucuuucagaucuaaaaaaaaaaaaaaaaaaaaaaaaaaaaaaaaaaaaaaaaaaaaaaaaaaaaaaaaaaaaaaaaugcaucccccccccccccccccccccccccccccccaaaggcucuuuucagagccaccagaauu

SEQ ID NO: 7570 - RNA, 1984 nt, Artificial Sequence
  mRNA product Design a-3 comprising derived and/or modified sequence from HRSV(A2)__F_DSCav1_mut8 (opt5)
gggagagggcgcuuggcuugcaaggacccugagcugcggcauugaagcacacccaacccaacucgacugaagucagccucacugaaccggaucugagaaucuucucucucugggcuugccagggcucuccgaaccuagcuagcauccucuucaauuccaacuagaaagcuuaccauggagcugcucauccugaaggccaacgcuauuaccacaauccuuacggccgugaccuucugcuuugcgagcggccagaauauuacagaagaguucuaccaauccaccuguucugcugucagcaaaggguaucugggagcccucagaacaggcugguacaccuccguuaucacaauugaacugucuaacaucaaggagaucaaaugcaaugggaccgacgccaaggugaaacuuauuaagcaggaacuggauaaguauaaaaacgcugugacggaccuccagcugcugaugcagagcacccccgccacaggauccggcucugcuaucgccagcggggucgcgguguguaagguucuccaccuggagggagaggugaauaaaauuaaguccgcccuucugagcaccaacaaagcugucgugucucucuccggcugcggcguuagcgugcugacauuuaagguccuugaucugaagaauuacaucgacaaacaacuccugccuauucugaacaagcagucuuguuccaucccgaauauugaaaccgugaucgaguuccagcagaaaaacaaucggcuccuggaaaucacgcgcgaguuuagcgugaacgccggggucacaacccccguuucuacauauaugcuuaccaauuccgagcugcucagccugauuaacgauaugccuaucaccaaugaccaaaagaaacuuauguccaacaacgugcagauugugagacagcagucuuacagcaucaugugcauuaucaaggaagagguccuggcuuaugugguucaacucccccuguacggagugaucgauacaccuuguuggaaacugcauacgagcccccucugcaccacaaauaccaaggaaggcagcaacauuugucugacacggaccgaccgcgggugguacugcgauaaugccggaucugucuccuucuuuccucaggcggagacguguaaggugcagagcaacagaguuuucugcgacacaaugaacucucuuacccugccgagcgaagugaaucucugcaaugucgauaucuuuaaccccaaauaugacuguaagauuaugaccuccaaaacagaugugucuagcuccgucaucaccagccugggcgccauugugucuugcuacgggaagacaaaauguacggcuuccaauaagugccggggaaucaucaagaccuucagcaacggcugugacuauguuucuaauaaaggcguggacacagucuccguggggaacacccuuuacuauguuaauaagcaagagggacagagccuguacgugaaaggcgagccuauuaucaacuuuuaugauccccucgucuucccuuccgacgaauuugaugccucuauuagccaggugaaugagaagaucaaccagucccuggcuuucauucgcaaaucugacgaacugcuccacaacgugaaugccgggaaguccacaaccaacaucaugauuacgaccaucaucauuguuaucauugucauccugcuuucccugauugccgugggacuccugcuguacugcaaggcuagaagcacacccgugacccuuucuaaagaucaacucuccggcaucaauaacaucgcguucagcaauugaggacuagucccuguucccagagcccacuuuuuuuucuuuuuuugaaauaaaauagccugucuuucagaucuaaaaaaaaaaaaaaaaaaaaaaaaaaaaaaaaaaaaaaaaaaaaaaaaaaaaaaaaaaaaaaaaugcaucccccccccccccccccccccccccccccccaaaggcucuuuucagagccaccagaauu

SEQ ID NO: 7571 - RNA, 1984 nt, Artificial Sequence
  mRNA product Design a-3 comprising derived and/or modified sequence from HRSV(A2)__F_DSCav1_mut8 (opt6)
gggagagggcgcuuggcuugcaaggacccugagcugcggcauugaagcacacccaacccaacucgacugaagucagccucacugaaccggaucugagaaucuucucucucugggcuugccagggcucuccgaaccuagcuagcauccucuucaauuccaacuagaaagcuuaccauggaacuauuaauauuaaaagcaaacgcaaucacaacuauacuaacagcaguaacauucugcuuugccucaggucaaaacauaacagaggaauuuuaccaauccacaugcucugcuguaagcaaaggauaccucggagcauuaagaacuggaugguacaccucaguaauaacuauagaacuaucaaacauaaaagaaauaaaauguaauggcacagacgcaaaagugaaauuaaucaaacaagaacucgauaaauacaaaaaugccguaaccgaucuccaacuuuuaaugcaaagcacacccgcaacagguuccgggucagcaauagcaagcggaguugcaguaugcaaaguacuacacuuagaaggagaaguaaauaaaaucaaaucagccuuacuaucaacaaauaaagcaguuguaucacucucaggaugcggaguauccguacuaacauuuaaaguacuagaucuaaaaaacuacauagauaaacaacucuuaccaauacuaaauaaacaaucauguuccauacccaacauagaaaccguuaucgaauuucaacaaaaaaacaacagauuacuagaaaucacacgagaauuuucaguaaaugcuggagucacaacaccaguuaguacauacaugcucaccaauucagaacuacuaaguuuaauuaacgauaugccaauaacaaacgaccaaaaaaaacuaaugucaaauaacguacaaauaguaagacaacaaucauacucaaucaugugcauaauaaaagaagaaguacuagccuauguaguccaauuaccacucuacggcguaaucgacaccccaugcuggaaauuacacacaagcccauuaugcaccaccaacacaaaagaagguucaaacauuugcuuaaccagaaccgaucgaggaugguacugcgauaacgcaggaucugucuccuuuuucccacaagccgaaacaugcaaaguucaaucaaaccgaguuuucugugacacuaugaacucacucacacuuccaagcgaaguaaaccuaugcaacguagauauauuuaacccuaaauacgacugcaaaauaaugacaagcaaaacagacguuaguucaucaguaauuacaagucuaggcgcaauagugucaugcuacggaaaaacaaaaugcaccgcauccaauaaaugccgaggaaucauuaaaacauucucaaacggaugcgacuacgucagcaauaaaggaguagacacuguuucuguaggaaacacccuauacuauguaaacaaacaagaaggucaaucacuauacguaaagggagaaccaauuauaaauuuuuacgaccccuuaguauuuccaagugaugaauuugacgcaucuauaagucaaguuaacgaaaaaauuaaccaaucacuugcauuuauaagaaaaucagacgaacuacuccauaauguaaacgcagguaaaucaacaacaaacaucaugaucacaaccauaauaauaguaauaauuguaauauuacuaucacuaauagcaguaggauuacuacucuacugcaaagcuagaucuaccccggucacacucucaaaagaccaauuaucuggaauaaacaauauagcauucagcaacuaaggacuagucccuguucccagagcccacuuuuuuuucuuuuuuugaaauaaaauagccugucuuucagaucuaaaaaaaaaaaaaaaaaaaaaaaaaaaaaaaaaaaaaaaaaaaaaaaaaaaaaaaaaaaaaaaaugcaucccccccccccccccccccccccccccccccaaaggcucuuuucagagccaccagaauu

SEQ ID NO: 7572 - RNA, 1984 nt, Artificial Sequence
  mRNA product Design a-3 comprising derived and/or modified sequence from HRSV(A2)__F_DSCav1_mut8 (opt11)
gggagagggcgcuuggcuugcaaggacccugagcugcggcauugaagcacacccaacccaacucgacugaagucagccucacugaaccggaucugagaaucuucucucucugggcuugccagggcucuccgaaccuagcuagcauccucuucaauuccaacuagaaagcuuaccauggaacuccucauccuuaaagccaacgccauaaccaccauccucaccgccgucaccuucugcuucgcuucuggccaaaacauaaccgaagaguucuaccaauccacgugcucugccgugucaaaaggcuaccucggagcccuccgcacagggugguacacuuccgucaucaccaucgaacucucuaacaucaaagaaaucaagugcaacggcacagacgcgaaagucaagcucaucaaacaagaacuagacaaauacaaaaacgccguaacagaccuccaacuccuaaugcaguccacaccagccacaggcuccggcagcgccaucgccuccggcgucgcugucugcaaaguccuacaccucgaaggcgaagucaacaaaaucaagucagcccuccuuagcaccaacaaagcagucgucucuuuaagcgggugcggagucucuguccuaaccuuuaaaguacucgaccucaaaaacuacaucgacaaacaacuacuaccaauacuaaacaaacagagcugcuccauucccaacaucgaaaccguuaucgaguuccaacaaaagaacaaccgccuccucgaaaucacccgcgaguucuccgucaacgcaggcgucaccaccccagucuccaccuauaugcuaaccaacagcgaacuccucagccucaucaaugacaugccaaucaccaacgaccaaaagaaacucauguccaacaacguacagauaguccgccagcaguccuacagcaucaugugcaucaucaaagaagaagugcucgccuacgugguacaacucccucucuacggagucauugauacacccugcuggaaacuccacacaagcccccucugcacuacaaacaccaaagaaggcucuaacauaugccucacccgcacagaccgugguugguacugcgacaacgccggcuccguauccuucuuuccacaagcugaaaccugcaaaguucaaucaaaccgagucuucugcgacaccaugaacucccucacauugcccagcgaagucaaccucugcaacgucgacaucuucaaccccaaguacgacugcaaaaucaugaccuccaaaaccgacgucagcuccagcgugaucacaagccuaggcgcgaucgucagcugcuacggcaaaaccaaaugcacagccuccaacaaaugccgcggaaucauaaaaacauucaguaacggcugcgacuacguguccaauaaaggagucgacaccguauccgucggaaacacccucuacuacgucaacaaacaagaaggacaaucccucuaugucaaaggcgaacccauuaucaacuucuacgacccccuaguuuuccccuccgacgaguucgacgcaagcauuucccaagucaacgaaaagaucaaucaaucccucgccuucauacgcaaaagcgacgaacuacuacacaacguaaacgccggcaaaagcaccaccaacaucaugaucacaacaaucaucaucgucaucaucgucauccuacucucacucaucgccguuggccuacuacucuacugcaaagcccgcuccacacccgucacccucucaaaagaccaacucuccggcaucaacaacaucgcauucagcaacugaggacuagucccuguucccagagcccacuuuuuuuucuuuuuuugaaauaaaauagccugucuuucagaucuaaaaaaaaaaaaaaaaaaaaaaaaaaaaaaaaaaaaaaaaaaaaaaaaaaaaaaaaaaaaaaaaugcaucccccccccccccccccccccccccccccccaaaggcucuuuucagagccaccagaauu

SEQ ID NO: 7573 - RNA, 1933 nt, Artificial Sequence
  mRNA product Design a-4 comprising derived and/or modified sequence from HRSV(A2)__F_DSCav1_mut8 (opt1)
gggagacuccugucgggcggaaguaggaggaguagaguuuaaaaacaguacucuuuuuccgguucgggacguaguugaagcaacgacaagccggauaaccgcucuugagacaggaagcuuaccauggagcugcucauccugaaggccaacgccaucaccaccauccugacggcggugaccuucugcuucgccagcggccagaacaucaccgaggaguucuaccaguccacgugcagcgccgucuccaagggguaccucggcgcccugcggaccggcugguacaccuccgugaucaccaucgagcugagcaacaucaaggagaucaagugcaacgggaccgacgccaaggugaagcucaucaagcaggagcuggacaaguacaagaacgcggucacggaccugcagcuccugaugcaguccaccccggcaaccggcuccggcuccgccaucgcgagcggcgucgccgugugcaaggugcugcaccucgagggggaggucaacaagaucaagagcgcccugcuguccaccaacaaggccguggugagccucuccggcugcggcgucagcgugcugaccuucaaggugcuggaccucaagaacuacaucgacaagcagcugcugcccauccugaacaagcagagcugcuccauccccaacaucgagacggugaucgaguuccagcagaagaacaaccggcuccuggagaucacccgcgaguucagcgugaacgccggggucaccacccccguguccacguacaugcugaccaacagcgagcuccugucccugaucaacgacaugccgaucaccaacgaccagaagaagcucaugagcaacaacgugcagaucguccggcagcaguccuacagcaucaugugcaucaucaaggaggaggugcuggcguacgugguccagcugccccucuacggcgugaucgacacccccugcuggaagcugcacacgagcccccugugcaccaccaacaccaaggagggguccaacaucugccucacgcgcaccgaccggggcugguacugcgacaacgccggcagcgucuccuucuucccgcaggccgagaccugcaaggugcagagcaaccgcguguucugcgacaccaugaacucccugacgcugcccagcgagguaaaccucugcaacgucgacaucuucaaccccaaguacgacugcaagaucaugaccuccaagaccgacgugagcuccagcgugaucaccucccugggggccaucgucagcugcuacggcaagacgaagugcaccgccagcaacaagugccgggggaucaucaagaccuucuccaacggcugcgacuacgugagcaacaagggcguggacaccguguccgucgggaacacccuguacuacgugaacaagcaggagggccagagccucuacgugaagggggagcccaucaucaacuucuacgacccgcuggucuuccccuccgacgaguucgacgcgagcaucucccaggugaacgagaagaucaaccagagccuggccuucauccgcaaguccgacgagcugcuccacaacgugaacgccggcaagagcacgaccaacaucaugaucaccaccaucaucaucgucaucaucgugauccugcugucccucaucgccguggggcugcugcucuacugcaaggcccggagcacgcccgucacccuguccaaggaccagcugagcggcaucaacaacaucgcguucuccaacugaggacuagucccuguucccagagcccacuuuuuuuucuuuuuuugaaauaaaauagccugucuuucagaucuaaaaaaaaaaaaaaaaaaaaaaaaaaaaaaaaaaaaaaaaaaaaaaaaaaaaaaaaaaaaaaaaugcaucccccccccccccccccccccccccccccccaaaggcucuuuucagagccaccagaauu

SEQ ID NO: 7574 - RNA, 1933 nt, Artificial Sequence
  mRNA product Design a-4 comprising derived and/or modified sequence from HRSV(A2)__F_DSCav1_mut8 (opt1)
gggagacuccugucgggcggaaguaggaggaguagaguuuaaaaacaguacucuuuuuccgguucgggacguaguugaagcaacgacaagccggauaaccgcucuugagacaggaagcuuaccauggagcugcucauccugaaggccaacgccaucaccaccauccugacggcggugaccuucugcuucgccagcggccagaacaucaccgaggaguucuaccaguccacgugcagcgccgucuccaagggguaccucggcgcccugcgcaccgggugguacaccagcgugaucaccaucgagcuguccaacaucaaggagaucaagugcaacggcaccgacgccaaggugaagcucaucaagcaggagcuggacaaguacaagaacgcggucacggaccugcagcuccugaugcagagcacccccgccaccggguccggcagcgccaucgccuccggcguggcggugugcaagguccugcaccucgagggggaggugaacaagaucaagagcgcccugcuguccaccaacaaggccguggucagccucuccggcugcggggugagcgugcugacguucaagguccuggaccucaagaacuacaucgacaagcagcugcugccgauccucaacaagcaguccugcagcauccccaacaucgagaccgugaucgaguuccagcagaagaacaaccggcugcuggagaucacccgcgaguucuccgugaacgccggcgucaccacgcccgugagcaccuacaugcucaccaacuccgagcugcugagccucaucaacgacaugcccaucaccaacgaccagaagaagcugaugagcaacaacgugcagaucguccggcagcaguccuacagcaucaugugcaucaucaaggaggaggugcuggccuacgugguccagcucccgcuguacggggugaucgacacgcccugcuggaagcugcacaccagcccccucugcaccaccaacacgaaggagggcuccaacaucugccugacccgcaccgaccggggcugguacugcgacaacgcgggguccgugagcuucuucccccaggccgagaccugcaagguccaguccaaccgcguguucugcgacacgaugaacagccugacccucccguccgaggucaaccugugcaacguggacaucuucaaccccaaguacgacugcaagaucaugaccagcaagaccgacguguccagcuccgucaucacgagccugggcgccaucguguccugcuacgggaagaccaagugcaccgccagcaacaagugccggggcaucaucaagaccuucuccaacggcugcgacuacgugagcaacaagggggucgacacgguguccgugggcaacacccucuacuacgucaacaagcaggaggggcagagccuguacgugaagggcgagcccaucaucaacuucuacgacccccugguguucccgagcgacgaguucgacgccuccaucagccaggucaacgagaagaucaaccagucccucgcguucauccgcaagagcgacgagcugcugcacaacgugaacgccgggaaguccaccaccaacaucaugaucaccacgaucaucaucgugaucaucgucauccuccugagccugaucgccgugggccuccugcuguacugcaaggcccgguccacccccgugacccugagcaaggaccagcucuccggcaucaacaacaucgccuucagcaacugaggacuagucccuguucccagagcccacuuuuuuuucuuuuuuugaaauaaaauagccugucuuucagaucuaaaaaaaaaaaaaaaaaaaaaaaaaaaaaaaaaaaaaaaaaaaaaaaaaaaaaaaaaaaaaaaaugcaucccccccccccccccccccccccccccccccaaaggcucuuuucagagccaccagaauu

SEQ ID NO: 7575 - RNA, 1933 nt, Artificial Sequence
  mRNA product Design a-4 comprising derived and/or modified sequence from HRSV(A2)__F_DSCav1_mut8 (opt2)
gggagacuccugucgggcggaaguaggaggaguagaguuuaaaaacaguacucuuuuuccgguucgggacguaguugaagcaacgacaagccggauaaccgcucuugagacaggaagcuuaccauggagcuccucauccucaaggccaacgccaucaccaccauccucaccgccgucaccuucugcuucgccuccggccagaacaucaccgaggaguucuaccaguccaccugcuccgccgucuccaagggcuaccucggcgcccuccgcaccggcugguacaccuccgucaucaccaucgagcucuccaacaucaaggagaucaagugcaacggcaccgacgccaaggucaagcucaucaagcaggagcucgacaaguacaagaacgccgucaccgaccuccagcuccucaugcaguccacccccgccaccggcuccggcuccgccaucgccuccggcgucgccgucugcaagguccuccaccucgagggcgaggucaacaagaucaaguccgcccuccucuccaccaacaaggccgucgucucccucuccggcugcggcgucuccguccucaccuucaagguccucgaccucaagaacuacaucgacaagcagcuccuccccauccucaacaagcaguccugcuccauccccaacaucgagaccgucaucgaguuccagcagaagaacaaccgccuccucgagaucacccgcgaguucuccgucaacgccggcgucaccacccccgucuccaccuacaugcucaccaacuccgagcuccucucccucaucaacgacaugcccaucaccaacgaccagaagaagcucauguccaacaacguccagaucguccgccagcaguccuacuccaucaugugcaucaucaaggaggagguccucgccuacgucguccagcucccccucuacggcgucaucgacacccccugcuggaagcuccacaccuccccccucugcaccaccaacaccaaggagggcuccaacaucugccucacccgcaccgaccgcggcugguacugcgacaacgccggcuccgucuccuucuucccccaggccgagaccugcaagguccaguccaaccgcgucuucugcgacaccaugaacucccucacccuccccuccgaggucaaccucugcaacgucgacaucuucaaccccaaguacgacugcaagaucaugaccuccaagaccgacgucuccuccuccgucaucaccucccucggcgccaucgucuccugcuacggcaagaccaagugcaccgccuccaacaagugccgcggcaucaucaagaccuucuccaacggcugcgacuacgucuccaacaagggcgucgacaccgucuccgucggcaacacccucuacuacgucaacaagcaggagggccagucccucuacgucaagggcgagcccaucaucaacuucuacgacccccucgucuuccccuccgacgaguucgacgccuccaucucccaggucaacgagaagaucaaccagucccucgccuucauccgcaaguccgacgagcuccuccacaacgucaacgccggcaaguccaccaccaacaucaugaucaccaccaucaucaucgucaucaucgucauccuccucucccucaucgccgucggccuccuccucuacugcaaggcccgcuccacccccgucacccucuccaaggaccagcucuccggcaucaacaacaucgccuucuccaacugaggacuagucccuguucccagagcccacuuuuuuuucuuuuuuugaaauaaaauagccugucuuucagaucuaaaaaaaaaaaaaaaaaaaaaaaaaaaaaaaaaaaaaaaaaaaaaaaaaaaaaaaaaaaaaaaaugcaucccccccccccccccccccccccccccccccaaaggcucuuuucagagccaccagaauu

SEQ ID NO: 7576 - RNA, 1933 nt, Artificial Sequence
  mRNA product Design a-4 comprising derived and/or modified sequence from HRSV(A2)__F_DSCav1_mut8 (opt3)
gggagacuccugucgggcggaaguaggaggaguagaguuuaaaaacaguacucuuuuuccgguucgggacguaguugaagcaacgacaagccggauaaccgcucuugagacaggaagcuuaccauggagcugcucauccuuaaggccaacgcuauuaccacaauacugacugcagugacguucugcuuugccagcggccagaauaucaccgaagaguucuaccaauccacauguucugcggucucaaaaggguauuugggagcuuuaagaacugguugguacaccaguguuauuacaaucgaacugagcaacauuaaggagaucaaaugcaauggcaccgacgccaaggugaaacuaauaaagcaggaacucgauaaguauaaaaacgcaguaacugaccugcagcuucugaugcaguccacacccgccaccgggucuggaucggcuaucgcaucaggcguggccgucuguaagguguugcaccucgagggugagguuaauaaaauuaagagcgcucugcugaguacgaacaaagccguggucucccucucugggugcggagugagcguauuaacuuuuaagguucuggaucuuaagaauuacaucgacaaacaauugcugccuauucuaaacaagcaguccuguucaaucccaaauauagaaaccgugauugaguuccagcagaaaaacaauaggcuccuggaaaucacacgggaguuuagugucaacgcgggcgugacuaccccggugagcacauauaugcuuaccaauucugagcuguugucccucauuaacgauaugcccaucacgaaugaccaaaagaaacugaugucaaacaacguccagaucguucgccagcagagcuacaguauuaugugcauaaucaaggaagagguguuagcauauguagugcaacugccucucuacggcgucauugauacuccauguuggaaacuucauacaucuccccugugcaccacuaauacaaaggaaggguccaacaucuguuugacccgaacggaccguggaugguacugcgauaaugccgguagcgugucguucuuuccucaggcugagaccuguaagguucagucuaacagaguguucugcgacacaaugaacucccuaacucugccaucagaagucaaucucugcaauguggauauauuuaaccccaaauaugacuguaagauuaugaccaguaaaacagauguaagcuccucuguuaucacuagccugggcgccaucgugucaugcuacgggaagaccaaauguacagcaaguaauaagugcaggggaauuaucaagaccuucuccaacggcugugacuaugucagcaauaaagguguggacacugucucuguggggaacacgcuuuacuauguuaauaagcaagagggacagucacuguacgugaaaggcgagccuauuauaaacuuuuaugauccauugguauucccgagugacgaauuugaugcuagcaucucccaggucaaugagaagauuaaccagucucucgccuucauccggaaaucggacgaacuguuacacaacgugaaugcgggcaagagcacaaccaacaucaugauuacuaccauaaucauuguuaucauugugauccugcuaucccucauagccgucgggcugcuuuuguacugcaaggcacgcucaacacccgugacccugaguaaagaucaacucucuggaaucaauaacauugcuuucagcaauugaggacuagucccuguucccagagcccacuuuuuuuucuuuuuuugaaauaaaauagccugucuuucagaucuaaaaaaaaaaaaaaaaaaaaaaaaaaaaaaaaaaaaaaaaaaaaaaaaaaaaaaaaaaaaaaaaugcaucccccccccccccccccccccccccccccccaaaggcucuuuucagagccaccagaauu

SEQ ID NO: 7577 - RNA, 1933 nt, Artificial Sequence
  mRNA product Design a-4 comprising derived and/or modified sequence from HRSV(A2)__F_DSCav1_mut8 (opt4)
gggagacuccugucgggcggaaguaggaggaguagaguuuaaaaacaguacucuuuuuccgguucgggacguaguugaagcaacgacaagccggauaaccgcucuugagacaggaagcuuaccauggagcugcugauccugaaggccaacgccaucaccaccauccugaccgccgugaccuucugcuucgccagcggccagaacaucaccgaggaguucuaccagagcaccugcagcgccgugagcaagggcuaccugggcgcccugagaaccggcugguacaccagcgugaucaccaucgagcugagcaacaucaaggagaucaagugcaacggcaccgacgccaaggugaagcugaucaagcaggagcuggacaaguacaagaacgccgugaccgaccugcagcugcugaugcagagcacccccgccaccggcagcggcagcgccaucgccagcggcguggccgugugcaaggugcugcaccuggagggcgaggugaacaagaucaagagcgcccugcugagcaccaacaaggccguggugagccugagcggcugcggcgugagcgugcugaccuucaaggugcuggaccugaagaacuacaucgacaagcagcugcugcccauccugaacaagcagagcugcagcauccccaacaucgagaccgugaucgaguuccagcagaagaacaacagacugcuggagaucaccagagaguucagcgugaacgccggcgugaccacccccgugagcaccuacaugcugaccaacagcgagcugcugagccugaucaacgacaugcccaucaccaacgaccagaagaagcugaugagcaacaacgugcagaucgugagacagcagagcuacagcaucaugugcaucaucaaggaggaggugcuggccuacguggugcagcugccccuguacggcgugaucgacacccccugcuggaagcugcacaccagcccccugugcaccaccaacaccaaggagggcagcaacaucugccugaccagaaccgacagaggcugguacugcgacaacgccggcagcgugagcuucuucccccaggccgagaccugcaaggugcagagcaacagaguguucugcgacaccaugaacagccugacccugcccagcgaggugaaccugugcaacguggacaucuucaaccccaaguacgacugcaagaucaugaccagcaagaccgacgugagcagcagcgugaucaccagccugggcgccaucgugagcugcuacggcaagaccaagugcaccgccagcaacaagugcagaggcaucaucaagaccuucagcaacggcugcgacuacgugagcaacaagggcguggacaccgugagcgugggcaacacccuguacuacgugaacaagcaggagggccagagccuguacgugaagggcgagcccaucaucaacuucuacgacccccugguguuccccagcgacgaguucgacgccagcaucagccaggugaacgagaagaucaaccagagccuggccuucaucagaaagagcgacgagcugcugcacaacgugaacgccggcaagagcaccaccaacaucaugaucaccaccaucaucaucgugaucaucgugauccugcugagccugaucgccgugggccugcugcuguacugcaaggccagaagcacccccgugacccugagcaaggaccagcugagcggcaucaacaacaucgccuucagcaacugaggacuagucccuguucccagagcccacuuuuuuuucuuuuuuugaaauaaaauagccugucuuucagaucuaaaaaaaaaaaaaaaaaaaaaaaaaaaaaaaaaaaaaaaaaaaaaaaaaaaaaaaaaaaaaaaaugcaucccccccccccccccccccccccccccccccaaaggcucuuuucagagccaccagaauu

SEQ ID NO: 7578 - RNA, 1933 nt, Artificial Sequence
  mRNA product Design a-4 comprising derived and/or modified sequence from HRSV(A2)__F_DSCav1_mut8 (opt5)
gggagacuccugucgggcggaaguaggaggaguagaguuuaaaaacaguacucuuuuuccgguucgggacguaguugaagcaacgacaagccggauaaccgcucuugagacaggaagcuuaccauggagcugcucauccugaaggccaacgcuauuaccacaauccuuacggccgugaccuucugcuuugcgagcggccagaauauuacagaagaguucuaccaauccaccuguucugcugucagcaaaggguaucugggagcccucagaacaggcugguacaccuccguuaucacaauugaacugucuaacaucaaggagaucaaaugcaaugggaccgacgccaaggugaaacuuauuaagcaggaacuggauaaguauaaaaacgcugugacggaccuccagcugcugaugcagagcacccccgccacaggauccggcucugcuaucgccagcggggucgcgguguguaagguucuccaccuggagggagaggugaauaaaauuaaguccgcccuucugagcaccaacaaagcugucgugucucucuccggcugcggcguuagcgugcugacauuuaagguccuugaucugaagaauuacaucgacaaacaacuccugccuauucugaacaagcagucuuguuccaucccgaauauugaaaccgugaucgaguuccagcagaaaaacaaucggcuccuggaaaucacgcgcgaguuuagcgugaacgccggggucacaacccccguuucuacauauaugcuuaccaauuccgagcugcucagccugauuaacgauaugccuaucaccaaugaccaaaagaaacuuauguccaacaacgugcagauugugagacagcagucuuacagcaucaugugcauuaucaaggaagagguccuggcuuaugugguucaacucccccuguacggagugaucgauacaccuuguuggaaacugcauacgagcccccucugcaccacaaauaccaaggaaggcagcaacauuugucugacacggaccgaccgcgggugguacugcgauaaugccggaucugucuccuucuuuccucaggcggagacguguaaggugcagagcaacagaguuuucugcgacacaaugaacucucuuacccugccgagcgaagugaaucucugcaaugucgauaucuuuaaccccaaauaugacuguaagauuaugaccuccaaaacagaugugucuagcuccgucaucaccagccugggcgccauugugucuugcuacgggaagacaaaauguacggcuuccaauaagugccggggaaucaucaagaccuucagcaacggcugugacuauguuucuaauaaaggcguggacacagucuccguggggaacacccuuuacuauguuaauaagcaagagggacagagccuguacgugaaaggcgagccuauuaucaacuuuuaugauccccucgucuucccuuccgacgaauuugaugccucuauuagccaggugaaugagaagaucaaccagucccuggcuuucauucgcaaaucugacgaacugcuccacaacgugaaugccgggaaguccacaaccaacaucaugauuacgaccaucaucauuguuaucauugucauccugcuuucccugauugccgugggacuccugcuguacugcaaggcuagaagcacacccgugacccuuucuaaagaucaacucuccggcaucaauaacaucgcguucagcaauugaggacuagucccuguucccagagcccacuuuuuuuucuuuuuuugaaauaaaauagccugucuuucagaucuaaaaaaaaaaaaaaaaaaaaaaaaaaaaaaaaaaaaaaaaaaaaaaaaaaaaaaaaaaaaaaaaugcaucccccccccccccccccccccccccccccccaaaggcucuuuucagagccaccagaauu

SEQ ID NO: 7579 - RNA, 1933 nt, Artificial Sequence
  mRNA product Design a-4 comprising derived and/or modified sequence from HRSV(A2)__F_DSCav1_mut8 (opt6)
gggagacuccugucgggcggaaguaggaggaguagaguuuaaaaacaguacucuuuuuccgguucgggacguaguugaagcaacgacaagccggauaaccgcucuugagacaggaagcuuaccauggaacuauuaauauuaaaagcaaacgcaaucacaacuauacuaacagcaguaacauucugcuuugccucaggucaaaacauaacagaggaauuuuaccaauccacaugcucugcuguaagcaaaggauaccucggagcauuaagaacuggaugguacaccucaguaauaacuauagaacuaucaaacauaaaagaaauaaaauguaauggcacagacgcaaaagugaaauuaaucaaacaagaacucgauaaauacaaaaaugccguaaccgaucuccaacuuuuaaugcaaagcacacccgcaacagguuccgggucagcaauagcaagcggaguugcaguaugcaaaguacuacacuuagaaggagaaguaaauaaaaucaaaucagccuuacuaucaacaaauaaagcaguuguaucacucucaggaugcggaguauccguacuaacauuuaaaguacuagaucuaaaaaacuacauagauaaacaacucuuaccaauacuaaauaaacaaucauguuccauacccaacauagaaaccguuaucgaauuucaacaaaaaaacaacagauuacuagaaaucacacgagaauuuucaguaaaugcuggagucacaacaccaguuaguacauacaugcucaccaauucagaacuacuaaguuuaauuaacgauaugccaauaacaaacgaccaaaaaaaacuaaugucaaauaacguacaaauaguaagacaacaaucauacucaaucaugugcauaauaaaagaagaaguacuagccuauguaguccaauuaccacucuacggcguaaucgacaccccaugcuggaaauuacacacaagcccauuaugcaccaccaacacaaaagaagguucaaacauuugcuuaaccagaaccgaucgaggaugguacugcgauaacgcaggaucugucuccuuuuucccacaagccgaaacaugcaaaguucaaucaaaccgaguuuucugugacacuaugaacucacucacacuuccaagcgaaguaaaccuaugcaacguagauauauuuaacccuaaauacgacugcaaaauaaugacaagcaaaacagacguuaguucaucaguaauuacaagucuaggcgcaauagugucaugcuacggaaaaacaaaaugcaccgcauccaauaaaugccgaggaaucauuaaaacauucucaaacggaugcgacuacgucagcaauaaaggaguagacacuguuucuguaggaaacacccuauacuauguaaacaaacaagaaggucaaucacuauacguaaagggagaaccaauuauaaauuuuuacgaccccuuaguauuuccaagugaugaauuugacgcaucuauaagucaaguuaacgaaaaaauuaaccaaucacuugcauuuauaagaaaaucagacgaacuacuccauaauguaaacgcagguaaaucaacaacaaacaucaugaucacaaccauaauaauaguaauaauuguaauauuacuaucacuaauagcaguaggauuacuacucuacugcaaagcuagaucuaccccggucacacucucaaaagaccaauuaucuggaauaaacaauauagcauucagcaacuaaggacuagucccuguucccagagcccacuuuuuuuucuuuuuuugaaauaaaauagccugucuuucagaucuaaaaaaaaaaaaaaaaaaaaaaaaaaaaaaaaaaaaaaaaaaaaaaaaaaaaaaaaaaaaaaaaugcaucccccccccccccccccccccccccccccccaaaggcucuuuucagagccaccagaauu

SEQ ID NO: 7580 - RNA, 1933 nt, Artificial Sequence
  mRNA product Design a-4 comprising derived and/or modified sequence from HRSV(A2)__F_DSCav1_mut8 (opt11)
gggagacuccugucgggcggaaguaggaggaguagaguuuaaaaacaguacucuuuuuccgguucgggacguaguugaagcaacgacaagccggauaaccgcucuugagacaggaagcuuaccauggaacuccucauccuuaaagccaacgccauaaccaccauccucaccgccgucaccuucugcuucgcuucuggccaaaacauaaccgaagaguucuaccaauccacgugcucugccgugucaaaaggcuaccucggagcccuccgcacagggugguacacuuccgucaucaccaucgaacucucuaacaucaaagaaaucaagugcaacggcacagacgcgaaagucaagcucaucaaacaagaacuagacaaauacaaaaacgccguaacagaccuccaacuccuaaugcaguccacaccagccacaggcuccggcagcgccaucgccuccggcgucgcugucugcaaaguccuacaccucgaaggcgaagucaacaaaaucaagucagcccuccuuagcaccaacaaagcagucgucucuuuaagcgggugcggagucucuguccuaaccuuuaaaguacucgaccucaaaaacuacaucgacaaacaacuacuaccaauacuaaacaaacagagcugcuccauucccaacaucgaaaccguuaucgaguuccaacaaaagaacaaccgccuccucgaaaucacccgcgaguucuccgucaacgcaggcgucaccaccccagucuccaccuauaugcuaaccaacagcgaacuccucagccucaucaaugacaugccaaucaccaacgaccaaaagaaacucauguccaacaacguacagauaguccgccagcaguccuacagcaucaugugcaucaucaaagaagaagugcucgccuacgugguacaacucccucucuacggagucauugauacacccugcuggaaacuccacacaagcccccucugcacuacaaacaccaaagaaggcucuaacauaugccucacccgcacagaccgugguugguacugcgacaacgccggcuccguauccuucuuuccacaagcugaaaccugcaaaguucaaucaaaccgagucuucugcgacaccaugaacucccucacauugcccagcgaagucaaccucugcaacgucgacaucuucaaccccaaguacgacugcaaaaucaugaccuccaaaaccgacgucagcuccagcgugaucacaagccuaggcgcgaucgucagcugcuacggcaaaaccaaaugcacagccuccaacaaaugccgcggaaucauaaaaacauucaguaacggcugcgacuacguguccaauaaaggagucgacaccguauccgucggaaacacccucuacuacgucaacaaacaagaaggacaaucccucuaugucaaaggcgaacccauuaucaacuucuacgacccccuaguuuuccccuccgacgaguucgacgcaagcauuucccaagucaacgaaaagaucaaucaaucccucgccuucauacgcaaaagcgacgaacuacuacacaacguaaacgccggcaaaagcaccaccaacaucaugaucacaacaaucaucaucgucaucaucgucauccuacucucacucaucgccguuggccuacuacucuacugcaaagcccgcuccacacccgucacccucucaaaagaccaacucuccggcaucaacaacaucgcauucagcaacugaggacuagucccuguucccagagcccacuuuuuuuucuuuuuuugaaauaaaauagccugucuuucagaucuaaaaaaaaaaaaaaaaaaaaaaaaaaaaaaaaaaaaaaaaaaaaaaaaaaaaaaaaaaaaaaaaugcaucccccccccccccccccccccccccccccccaaaggcucuuuucagagccaccagaauu

SEQ ID NO: 7581 - RNA, 1879 nt, Artificial Sequence
  mRNA product Design a-5 comprising derived and/or modified sequence from HRSV(A2)__F_DSCav1_mut8 (opt1)
gggagacuuucccauucuguagcagaauuugguguugccuguggucuuggucccgcggagaagcuuaccauggagcugcucauccugaaggccaacgccaucaccaccauccugacggcggugaccuucugcuucgccagcggccagaacaucaccgaggaguucuaccaguccacgugcagcgccgucuccaagggguaccucggcgcccugcggaccggcugguacaccuccgugaucaccaucgagcugagcaacaucaaggagaucaagugcaacgggaccgacgccaaggugaagcucaucaagcaggagcuggacaaguacaagaacgcggucacggaccugcagcuccugaugcaguccaccccggcaaccggcuccggcuccgccaucgcgagcggcgucgccgugugcaaggugcugcaccucgagggggaggucaacaagaucaagagcgcccugcuguccaccaacaaggccguggugagccucuccggcugcggcgucagcgugcugaccuucaaggugcuggaccucaagaacuacaucgacaagcagcugcugcccauccugaacaagcagagcugcuccauccccaacaucgagacggugaucgaguuccagcagaagaacaaccggcuccuggagaucacccgcgaguucagcgugaacgccggggucaccacccccguguccacguacaugcugaccaacagcgagcuccugucccugaucaacgacaugccgaucaccaacgaccagaagaagcucaugagcaacaacgugcagaucguccggcagcaguccuacagcaucaugugcaucaucaaggaggaggugcuggcguacgugguccagcugccccucuacggcgugaucgacacccccugcuggaagcugcacacgagcccccugugcaccaccaacaccaaggagggguccaacaucugccucacgcgcaccgaccggggcugguacugcgacaacgccggcagcgucuccuucuucccgcaggccgagaccugcaaggugcagagcaaccgcguguucugcgacaccaugaacucccugacgcugcccagcgagguaaaccucugcaacgucgacaucuucaaccccaaguacgacugcaagaucaugaccuccaagaccgacgugagcuccagcgugaucaccucccugggggccaucgucagcugcuacggcaagacgaagugcaccgccagcaacaagugccgggggaucaucaagaccuucuccaacggcugcgacuacgugagcaacaagggcguggacaccguguccgucgggaacacccuguacuacgugaacaagcaggagggccagagccucuacgugaagggggagcccaucaucaacuucuacgacccgcuggucuuccccuccgacgaguucgacgcgagcaucucccaggugaacgagaagaucaaccagagccuggccuucauccgcaaguccgacgagcugcuccacaacgugaacgccggcaagagcacgaccaacaucaugaucaccaccaucaucaucgucaucaucgugauccugcugucccucaucgccguggggcugcugcucuacugcaaggcccggagcacgcccgucacccuguccaaggaccagcugagcggcaucaacaacaucgcguucuccaacugaggacuagucccuguucccagagcccacuuuuuuuucuuuuuuugaaauaaaauagccugucuuucagaucuaaaaaaaaaaaaaaaaaaaaaaaaaaaaaaaaaaaaaaaaaaaaaaaaaaaaaaaaaaaaaaaaugcaucccccccccccccccccccccccccccccccaaaggcucuuuucagagccaccagaauu

SEQ ID NO: 7582 - RNA, 1879 nt, Artificial Sequence
  mRNA product Design a-5 comprising derived and/or modified sequence from HRSV(A2)__F_DSCav1_mut8 (opt1)
gggagacuuucccauucuguagcagaauuugguguugccuguggucuuggucccgcggagaagcuuaccauggagcugcucauccugaaggccaacgccaucaccaccauccugacggcggugaccuucugcuucgccagcggccagaacaucaccgaggaguucuaccaguccacgugcagcgccgucuccaagggguaccucggcgcccugcgcaccgggugguacaccagcgugaucaccaucgagcuguccaacaucaaggagaucaagugcaacggcaccgacgccaaggugaagcucaucaagcaggagcuggacaaguacaagaacgcggucacggaccugcagcuccugaugcagagcacccccgccaccggguccggcagcgccaucgccuccggcguggcggugugcaagguccugcaccucgagggggaggugaacaagaucaagagcgcccugcuguccaccaacaaggccguggucagccucuccggcugcggggugagcgugcugacguucaagguccuggaccucaagaacuacaucgacaagcagcugcugccgauccucaacaagcaguccugcagcauccccaacaucgagaccgugaucgaguuccagcagaagaacaaccggcugcuggagaucacccgcgaguucuccgugaacgccggcgucaccacgcccgugagcaccuacaugcucaccaacuccgagcugcugagccucaucaacgacaugcccaucaccaacgaccagaagaagcugaugagcaacaacgugcagaucguccggcagcaguccuacagcaucaugugcaucaucaaggaggaggugcuggccuacgugguccagcucccgcuguacggggugaucgacacgcccugcuggaagcugcacaccagcccccucugcaccaccaacacgaaggagggcuccaacaucugccugacccgcaccgaccggggcugguacugcgacaacgcgggguccgugagcuucuucccccaggccgagaccugcaagguccaguccaaccgcguguucugcgacacgaugaacagccugacccucccguccgaggucaaccugugcaacguggacaucuucaaccccaaguacgacugcaagaucaugaccagcaagaccgacguguccagcuccgucaucacgagccugggcgccaucguguccugcuacgggaagaccaagugcaccgccagcaacaagugccggggcaucaucaagaccuucuccaacggcugcgacuacgugagcaacaagggggucgacacgguguccgugggcaacacccucuacuacgucaacaagcaggaggggcagagccuguacgugaagggcgagcccaucaucaacuucuacgacccccugguguucccgagcgacgaguucgacgccuccaucagccaggucaacgagaagaucaaccagucccucgcguucauccgcaagagcgacgagcugcugcacaacgugaacgccgggaaguccaccaccaacaucaugaucaccacgaucaucaucgugaucaucgucauccuccugagccugaucgccgugggccuccugcuguacugcaaggcccgguccacccccgugacccugagcaaggaccagcucuccggcaucaacaacaucgccuucagcaacugaggacuagucccuguucccagagcccacuuuuuuuucuuuuuuugaaauaaaauagccugucuuucagaucuaaaaaaaaaaaaaaaaaaaaaaaaaaaaaaaaaaaaaaaaaaaaaaaaaaaaaaaaaaaaaaaaugcaucccccccccccccccccccccccccccccccaaaggcucuuuucagagccaccagaauu

SEQ ID NO: 7583 - RNA, 1879 nt, Artificial Sequence
  mRNA product Design a-5 comprising derived and/or modified sequence from HRSV(A2)__F_DSCav1_mut8 (opt2)
gggagacuuucccauucuguagcagaauuugguguugccuguggucuuggucccgcggagaagcuuaccauggagcuccucauccucaaggccaacgccaucaccaccauccucaccgccgucaccuucugcuucgccuccggccagaacaucaccgaggaguucuaccaguccaccugcuccgccgucuccaagggcuaccucggcgcccuccgcaccggcugguacaccuccgucaucaccaucgagcucuccaacaucaaggagaucaagugcaacggcaccgacgccaaggucaagcucaucaagcaggagcucgacaaguacaagaacgccgucaccgaccuccagcuccucaugcaguccacccccgccaccggcuccggcuccgccaucgccuccggcgucgccgucugcaagguccuccaccucgagggcgaggucaacaagaucaaguccgcccuccucuccaccaacaaggccgucgucucccucuccggcugcggcgucuccguccucaccuucaagguccucgaccucaagaacuacaucgacaagcagcuccuccccauccucaacaagcaguccugcuccauccccaacaucgagaccgucaucgaguuccagcagaagaacaaccgccuccucgagaucacccgcgaguucuccgucaacgccggcgucaccacccccgucuccaccuacaugcucaccaacuccgagcuccucucccucaucaacgacaugcccaucaccaacgaccagaagaagcucauguccaacaacguccagaucguccgccagcaguccuacuccaucaugugcaucaucaaggaggagguccucgccuacgucguccagcucccccucuacggcgucaucgacacccccugcuggaagcuccacaccuccccccucugcaccaccaacaccaaggagggcuccaacaucugccucacccgcaccgaccgcggcugguacugcgacaacgccggcuccgucuccuucuucccccaggccgagaccugcaagguccaguccaaccgcgucuucugcgacaccaugaacucccucacccuccccuccgaggucaaccucugcaacgucgacaucuucaaccccaaguacgacugcaagaucaugaccuccaagaccgacgucuccuccuccgucaucaccucccucggcgccaucgucuccugcuacggcaagaccaagugcaccgccuccaacaagugccgcggcaucaucaagaccuucuccaacggcugcgacuacgucuccaacaagggcgucgacaccgucuccgucggcaacacccucuacuacgucaacaagcaggagggccagucccucuacgucaagggcgagcccaucaucaacuucuacgacccccucgucuuccccuccgacgaguucgacgccuccaucucccaggucaacgagaagaucaaccagucccucgccuucauccgcaaguccgacgagcuccuccacaacgucaacgccggcaaguccaccaccaacaucaugaucaccaccaucaucaucgucaucaucgucauccuccucucccucaucgccgucggccuccuccucuacugcaaggcccgcuccacccccgucacccucuccaaggaccagcucuccggcaucaacaacaucgccuucuccaacugaggacuagucccuguucccagagcccacuuuuuuuucuuuuuuugaaauaaaauagccugucuuucagaucuaaaaaaaaaaaaaaaaaaaaaaaaaaaaaaaaaaaaaaaaaaaaaaaaaaaaaaaaaaaaaaaaugcaucccccccccccccccccccccccccccccccaaaggcucuuuucagagccaccagaauu

SEQ ID NO: 7584 - RNA, 1879 nt, Artificial Sequence
  mRNA product Design a-5 comprising derived and/or modified sequence from HRSV(A2)__F_DSCav1_mut8 (opt3)
gggagacuuucccauucuguagcagaauuugguguugccuguggucuuggucccgcggagaagcuuaccauggagcugcucauccuuaaggccaacgcuauuaccacaauacugacugcagugacguucugcuuugccagcggccagaauaucaccgaagaguucuaccaauccacauguucugcggucucaaaaggguauuugggagcuuuaagaacugguugguacaccaguguuauuacaaucgaacugagcaacauuaaggagaucaaaugcaauggcaccgacgccaaggugaaacuaauaaagcaggaacucgauaaguauaaaaacgcaguaacugaccugcagcuucugaugcaguccacacccgccaccgggucuggaucggcuaucgcaucaggcguggccgucuguaagguguugcaccucgagggugagguuaauaaaauuaagagcgcucugcugaguacgaacaaagccguggucucccucucugggugcggagugagcguauuaacuuuuaagguucuggaucuuaagaauuacaucgacaaacaauugcugccuauucuaaacaagcaguccuguucaaucccaaauauagaaaccgugauugaguuccagcagaaaaacaauaggcuccuggaaaucacacgggaguuuagugucaacgcgggcgugacuaccccggugagcacauauaugcuuaccaauucugagcuguugucccucauuaacgauaugcccaucacgaaugaccaaaagaaacugaugucaaacaacguccagaucguucgccagcagagcuacaguauuaugugcauaaucaaggaagagguguuagcauauguagugcaacugccucucuacggcgucauugauacuccauguuggaaacuucauacaucuccccugugcaccacuaauacaaaggaaggguccaacaucuguuugacccgaacggaccguggaugguacugcgauaaugccgguagcgugucguucuuuccucaggcugagaccuguaagguucagucuaacagaguguucugcgacacaaugaacucccuaacucugccaucagaagucaaucucugcaauguggauauauuuaaccccaaauaugacuguaagauuaugaccaguaaaacagauguaagcuccucuguuaucacuagccugggcgccaucgugucaugcuacgggaagaccaaauguacagcaaguaauaagugcaggggaauuaucaagaccuucuccaacggcugugacuaugucagcaauaaagguguggacacugucucuguggggaacacgcuuuacuauguuaauaagcaagagggacagucacuguacgugaaaggcgagccuauuauaaacuuuuaugauccauugguauucccgagugacgaauuugaugcuagcaucucccaggucaaugagaagauuaaccagucucucgccuucauccggaaaucggacgaacuguuacacaacgugaaugcgggcaagagcacaaccaacaucaugauuacuaccauaaucauuguuaucauugugauccugcuaucccucauagccgucgggcugcuuuuguacugcaaggcacgcucaacacccgugacccugaguaaagaucaacucucuggaaucaauaacauugcuuucagcaauugaggacuagucccuguucccagagcccacuuuuuuuucuuuuuuugaaauaaaauagccugucuuucagaucuaaaaaaaaaaaaaaaaaaaaaaaaaaaaaaaaaaaaaaaaaaaaaaaaaaaaaaaaaaaaaaaaugcaucccccccccccccccccccccccccccccccaaaggcucuuuucagagccaccagaauu

SEQ ID NO: 7585 - RNA, 1879 nt, Artificial Sequence
  mRNA product Design a-5 comprising derived and/or modified sequence from HRSV(A2)__F_DSCav1_mut8 (opt4)
gggagacuuucccauucuguagcagaauuugguguugccuguggucuuggucccgcggagaagcuuaccauggagcugcugauccugaaggccaacgccaucaccaccauccugaccgccgugaccuucugcuucgccagcggccagaacaucaccgaggaguucuaccagagcaccugcagcgccgugagcaagggcuaccugggcgcccugagaaccggcugguacaccagcgugaucaccaucgagcugagcaacaucaaggagaucaagugcaacggcaccgacgccaaggugaagcugaucaagcaggagcuggacaaguacaagaacgccgugaccgaccugcagcugcugaugcagagcacccccgccaccggcagcggcagcgccaucgccagcggcguggccgugugcaaggugcugcaccuggagggcgaggugaacaagaucaagagcgcccugcugagcaccaacaaggccguggugagccugagcggcugcggcgugagcgugcugaccuucaaggugcuggaccugaagaacuacaucgacaagcagcugcugcccauccugaacaagcagagcugcagcauccccaacaucgagaccgugaucgaguuccagcagaagaacaacagacugcuggagaucaccagagaguucagcgugaacgccggcgugaccacccccgugagcaccuacaugcugaccaacagcgagcugcugagccugaucaacgacaugcccaucaccaacgaccagaagaagcugaugagcaacaacgugcagaucgugagacagcagagcuacagcaucaugugcaucaucaaggaggaggugcuggccuacguggugcagcugccccuguacggcgugaucgacacccccugcuggaagcugcacaccagcccccugugcaccaccaacaccaaggagggcagcaacaucugccugaccagaaccgacagaggcugguacugcgacaacgccggcagcgugagcuucuucccccaggccgagaccugcaaggugcagagcaacagaguguucugcgacaccaugaacagccugacccugcccagcgaggugaaccugugcaacguggacaucuucaaccccaaguacgacugcaagaucaugaccagcaagaccgacgugagcagcagcgugaucaccagccugggcgccaucgugagcugcuacggcaagaccaagugcaccgccagcaacaagugcagaggcaucaucaagaccuucagcaacggcugcgacuacgugagcaacaagggcguggacaccgugagcgugggcaacacccuguacuacgugaacaagcaggagggccagagccuguacgugaagggcgagcccaucaucaacuucuacgacccccugguguuccccagcgacgaguucgacgccagcaucagccaggugaacgagaagaucaaccagagccuggccuucaucagaaagagcgacgagcugcugcacaacgugaacgccggcaagagcaccaccaacaucaugaucaccaccaucaucaucgugaucaucgugauccugcugagccugaucgccgugggccugcugcuguacugcaaggccagaagcacccccgugacccugagcaaggaccagcugagcggcaucaacaacaucgccuucagcaacugaggacuagucccuguucccagagcccacuuuuuuuucuuuuuuugaaauaaaauagccugucuuucagaucuaaaaaaaaaaaaaaaaaaaaaaaaaaaaaaaaaaaaaaaaaaaaaaaaaaaaaaaaaaaaaaaaugcaucccccccccccccccccccccccccccccccaaaggcucuuuucagagccaccagaauu

SEQ ID NO: 7586 - RNA, 1879 nt, Artificial Sequence
  mRNA product Design a-5 comprising derived and/or modified sequence from HRSV(A2)__F_DSCav1_mut8 (opt5)
gggagacuuucccauucuguagcagaauuugguguugccuguggucuuggucccgcggagaagcuuaccauggagcugcucauccugaaggccaacgcuauuaccacaauccuuacggccgugaccuucugcuuugcgagcggccagaauauuacagaagaguucuaccaauccaccuguucugcugucagcaaaggguaucugggagcccucagaacaggcugguacaccuccguuaucacaauugaacugucuaacaucaaggagaucaaaugcaaugggaccgacgccaaggugaaacuuauuaagcaggaacuggauaaguauaaaaacgcugugacggaccuccagcugcugaugcagagcacccccgccacaggauccggcucugcuaucgccagcggggucgcgguguguaagguucuccaccuggagggagaggugaauaaaauuaaguccgcccuucugagcaccaacaaagcugucgugucucucuccggcugcggcguuagcgugcugacauuuaagguccuugaucugaagaauuacaucgacaaacaacuccugccuauucugaacaagcagucuuguuccaucccgaauauugaaaccgugaucgaguuccagcagaaaaacaaucggcuccuggaaaucacgcgcgaguuuagcgugaacgccggggucacaacccccguuucuacauauaugcuuaccaauuccgagcugcucagccugauuaacgauaugccuaucaccaaugaccaaaagaaacuuauguccaacaacgugcagauugugagacagcagucuuacagcaucaugugcauuaucaaggaagagguccuggcuuaugugguucaacucccccuguacggagugaucgauacaccuuguuggaaacugcauacgagcccccucugcaccacaaauaccaaggaaggcagcaacauuugucugacacggaccgaccgcgggugguacugcgauaaugccggaucugucuccuucuuuccucaggcggagacguguaaggugcagagcaacagaguuuucugcgacacaaugaacucucuuacccugccgagcgaagugaaucucugcaaugucgauaucuuuaaccccaaauaugacuguaagauuaugaccuccaaaacagaugugucuagcuccgucaucaccagccugggcgccauugugucuugcuacgggaagacaaaauguacggcuuccaauaagugccggggaaucaucaagaccuucagcaacggcugugacuauguuucuaauaaaggcguggacacagucuccguggggaacacccuuuacuauguuaauaagcaagagggacagagccuguacgugaaaggcgagccuauuaucaacuuuuaugauccccucgucuucccuuccgacgaauuugaugccucuauuagccaggugaaugagaagaucaaccagucccuggcuuucauucgcaaaucugacgaacugcuccacaacgugaaugccgggaaguccacaaccaacaucaugauuacgaccaucaucauuguuaucauugucauccugcuuucccugauugccgugggacuccugcuguacugcaaggcuagaagcacacccgugacccuuucuaaagaucaacucuccggcaucaauaacaucgcguucagcaauugaggacuagucccuguucccagagcccacuuuuuuuucuuuuuuugaaauaaaauagccugucuuucagaucuaaaaaaaaaaaaaaaaaaaaaaaaaaaaaaaaaaaaaaaaaaaaaaaaaaaaaaaaaaaaaaaaugcaucccccccccccccccccccccccccccccccaaaggcucuuuucagagccaccagaauu

SEQ ID NO: 7587 - RNA, 1879 nt, Artificial Sequence
  mRNA product Design a-5 comprising derived and/or modified sequence from HRSV(A2)__F_DSCav1_mut8 (opt6)
gggagacuuucccauucuguagcagaauuugguguugccuguggucuuggucccgcggagaagcuuaccauggaacuauuaauauuaaaagcaaacgcaaucacaacuauacuaacagcaguaacauucugcuuugccucaggucaaaacauaacagaggaauuuuaccaauccacaugcucugcuguaagcaaaggauaccucggagcauuaagaacuggaugguacaccucaguaauaacuauagaacuaucaaacauaaaagaaauaaaauguaauggcacagacgcaaaagugaaauuaaucaaacaagaacucgauaaauacaaaaaugccguaaccgaucuccaacuuuuaaugcaaagcacacccgcaacagguuccgggucagcaauagcaagcggaguugcaguaugcaaaguacuacacuuagaaggagaaguaaauaaaaucaaaucagccuuacuaucaacaaauaaagcaguuguaucacucucaggaugcggaguauccguacuaacauuuaaaguacuagaucuaaaaaacuacauagauaaacaacucuuaccaauacuaaauaaacaaucauguuccauacccaacauagaaaccguuaucgaauuucaacaaaaaaacaacagauuacuagaaaucacacgagaauuuucaguaaaugcuggagucacaacaccaguuaguacauacaugcucaccaauucagaacuacuaaguuuaauuaacgauaugccaauaacaaacgaccaaaaaaaacuaaugucaaauaacguacaaauaguaagacaacaaucauacucaaucaugugcauaauaaaagaagaaguacuagccuauguaguccaauuaccacucuacggcguaaucgacaccccaugcuggaaauuacacacaagcccauuaugcaccaccaacacaaaagaagguucaaacauuugcuuaaccagaaccgaucgaggaugguacugcgauaacgcaggaucugucuccuuuuucccacaagccgaaacaugcaaaguucaaucaaaccgaguuuucugugacacuaugaacucacucacacuuccaagcgaaguaaaccuaugcaacguagauauauuuaacccuaaauacgacugcaaaauaaugacaagcaaaacagacguuaguucaucaguaauuacaagucuaggcgcaauagugucaugcuacggaaaaacaaaaugcaccgcauccaauaaaugccgaggaaucauuaaaacauucucaaacggaugcgacuacgucagcaauaaaggaguagacacuguuucuguaggaaacacccuauacuauguaaacaaacaagaaggucaaucacuauacguaaagggagaaccaauuauaaauuuuuacgaccccuuaguauuuccaagugaugaauuugacgcaucuauaagucaaguuaacgaaaaaauuaaccaaucacuugcauuuauaagaaaaucagacgaacuacuccauaauguaaacgcagguaaaucaacaacaaacaucaugaucacaaccauaauaauaguaauaauuguaauauuacuaucacuaauagcaguaggauuacuacucuacugcaaagcuagaucuaccccggucacacucucaaaagaccaauuaucuggaauaaacaauauagcauucagcaacuaaggacuagucccuguucccagagcccacuuuuuuuucuuuuuuugaaauaaaauagccugucuuucagaucuaaaaaaaaaaaaaaaaaaaaaaaaaaaaaaaaaaaaaaaaaaaaaaaaaaaaaaaaaaaaaaaaugcaucccccccccccccccccccccccccccccccaaaggcucuuuucagagccaccagaauu

SEQ ID NO: 7588 - RNA, 1879 nt, Artificial Sequence
  mRNA product Design a-5 comprising derived and/or modified sequence from HRSV(A2)__F_DSCav1_mut8 (opt11)
gggagacuuucccauucuguagcagaauuugguguugccuguggucuuggucccgcggagaagcuuaccauggaacuccucauccuuaaagccaacgccauaaccaccauccucaccgccgucaccuucugcuucgcuucuggccaaaacauaaccgaagaguucuaccaauccacgugcucugccgugucaaaaggcuaccucggagcccuccgcacagggugguacacuuccgucaucaccaucgaacucucuaacaucaaagaaaucaagugcaacggcacagacgcgaaagucaagcucaucaaacaagaacuagacaaauacaaaaacgccguaacagaccuccaacuccuaaugcaguccacaccagccacaggcuccggcagcgccaucgccuccggcgucgcugucugcaaaguccuacaccucgaaggcgaagucaacaaaaucaagucagcccuccuuagcaccaacaaagcagucgucucuuuaagcgggugcggagucucuguccuaaccuuuaaaguacucgaccucaaaaacuacaucgacaaacaacuacuaccaauacuaaacaaacagagcugcuccauucccaacaucgaaaccguuaucgaguuccaacaaaagaacaaccgccuccucgaaaucacccgcgaguucuccgucaacgcaggcgucaccaccccagucuccaccuauaugcuaaccaacagcgaacuccucagccucaucaaugacaugccaaucaccaacgaccaaaagaaacucauguccaacaacguacagauaguccgccagcaguccuacagcaucaugugcaucaucaaagaagaagugcucgccuacgugguacaacucccucucuacggagucauugauacacccugcuggaaacuccacacaagcccccucugcacuacaaacaccaaagaaggcucuaacauaugccucacccgcacagaccgugguugguacugcgacaacgccggcuccguauccuucuuuccacaagcugaaaccugcaaaguucaaucaaaccgagucuucugcgacaccaugaacucccucacauugcccagcgaagucaaccucugcaacgucgacaucuucaaccccaaguacgacugcaaaaucaugaccuccaaaaccgacgucagcuccagcgugaucacaagccuaggcgcgaucgucagcugcuacggcaaaaccaaaugcacagccuccaacaaaugccgcggaaucauaaaaacauucaguaacggcugcgacuacguguccaauaaaggagucgacaccguauccgucggaaacacccucuacuacgucaacaaacaagaaggacaaucccucuaugucaaaggcgaacccauuaucaacuucuacgacccccuaguuuuccccuccgacgaguucgacgcaagcauuucccaagucaacgaaaagaucaaucaaucccucgccuucauacgcaaaagcgacgaacuacuacacaacguaaacgccggcaaaagcaccaccaacaucaugaucacaacaaucaucaucgucaucaucgucauccuacucucacucaucgccguuggccuacuacucuacugcaaagcccgcuccacacccgucacccucucaaaagaccaacucuccggcaucaacaacaucgcauucagcaacugaggacuagucccuguucccagagcccacuuuuuuuucuuuuuuugaaauaaaauagccugucuuucagaucuaaaaaaaaaaaaaaaaaaaaaaaaaaaaaaaaaaaaaaaaaaaaaaaaaaaaaaaaaaaaaaaaugcaucccccccccccccccccccccccccccccccaaaggcucuuuucagagccaccagaauu

SEQ ID NO: 7589 - RNA, 2060 nt, Artificial Sequence
  mRNA product Design b-1 comprising derived and/or modified sequence from HRSV(A2)__F_DSCav1_mut8 (opt1)
gggagacggagacggccugcaggaccugcucucucagcccucagccgaggccuacgccgagccgagugcgcagccgacgaccgggaggagccgcagccuucaacucugagguacugugauccgcgcugcccgccgggccgccccaguccgcugcugcggcaccuccuucccucgcgcccucuucgcucgccagcgccuucccugugagccugcgucaccgcggccgccaagcuuaccauggagcugcucauccugaaggccaacgccaucaccaccauccugacggcggugaccuucugcuucgccagcggccagaacaucaccgaggaguucuaccaguccacgugcagcgccgucuccaagggguaccucggcgcccugcggaccggcugguacaccuccgugaucaccaucgagcugagcaacaucaaggagaucaagugcaacgggaccgacgccaaggugaagcucaucaagcaggagcuggacaaguacaagaacgcggucacggaccugcagcuccugaugcaguccaccccggcaaccggcuccggcuccgccaucgcgagcggcgucgccgugugcaaggugcugcaccucgagggggaggucaacaagaucaagagcgcccugcuguccaccaacaaggccguggugagccucuccggcugcggcgucagcgugcugaccuucaaggugcuggaccucaagaacuacaucgacaagcagcugcugcccauccugaacaagcagagcugcuccauccccaacaucgagacggugaucgaguuccagcagaagaacaaccggcuccuggagaucacccgcgaguucagcgugaacgccggggucaccacccccguguccacguacaugcugaccaacagcgagcuccugucccugaucaacgacaugccgaucaccaacgaccagaagaagcucaugagcaacaacgugcagaucguccggcagcaguccuacagcaucaugugcaucaucaaggaggaggugcuggcguacgugguccagcugccccucuacggcgugaucgacacccccugcuggaagcugcacacgagcccccugugcaccaccaacaccaaggagggguccaacaucugccucacgcgcaccgaccggggcugguacugcgacaacgccggcagcgucuccuucuucccgcaggccgagaccugcaaggugcagagcaaccgcguguucugcgacaccaugaacucccugacgcugcccagcgagguaaaccucugcaacgucgacaucuucaaccccaaguacgacugcaagaucaugaccuccaagaccgacgugagcuccagcgugaucaccucccugggggccaucgucagcugcuacggcaagacgaagugcaccgccagcaacaagugccgggggaucaucaagaccuucuccaacggcugcgacuacgugagcaacaagggcguggacaccguguccgucgggaacacccuguacuacgugaacaagcaggagggccagagccucuacgugaagggggagcccaucaucaacuucuacgacccgcuggucuuccccuccgacgaguucgacgcgagcaucucccaggugaacgagaagaucaaccagagccuggccuucauccgcaaguccgacgagcugcuccacaacgugaacgccggcaagagcacgaccaacaucaugaucaccaccaucaucaucgucaucaucgugauccugcugucccucaucgccguggggcugcugcucuacugcaaggcccggagcacgcccgucacccuguccaaggaccagcugagcggcaucaacaacaucgcguucuccaacugaggacuaguguccaccugucccuccugggcugcuggauugucucguuuuccugccaaauaaacaggaucagcgcuuuacagaucuaaaaaaaaaaaaaaaaaaaaaaaaaaaaaaaaaaaaaaaaaaaaaaaaaaaaaaaaaaaaaaaaugcaucccccccccccccccccccccccccccccccaaaggcucuuuucagagccaccagaauu

SEQ ID NO: 7590 - RNA, 2060 nt, Artificial Sequence
  mRNA product Design b-1 comprising derived and/or modified sequence from HRSV(A2)__F_DSCav1_mut8 (opt1)
gggagacggagacggccugcaggaccugcucucucagcccucagccgaggccuacgccgagccgagugcgcagccgacgaccgggaggagccgcagccuucaacucugagguacugugauccgcgcugcccgccgggccgccccaguccgcugcugcggcaccuccuucccucgcgcccucuucgcucgccagcgccuucccugugagccugcgucaccgcggccgccaagcuuaccauggagcugcucauccugaaggccaacgccaucaccaccauccugacggcggugaccuucugcuucgccagcggccagaacaucaccgaggaguucuaccaguccacgugcagcgccgucuccaagggguaccucggcgcccugcgcaccgggugguacaccagcgugaucaccaucgagcuguccaacaucaaggagaucaagugcaacggcaccgacgccaaggugaagcucaucaagcaggagcuggacaaguacaagaacgcggucacggaccugcagcuccugaugcagagcacccccgccaccggguccggcagcgccaucgccuccggcguggcggugugcaagguccugcaccucgagggggaggugaacaagaucaagagcgcccugcuguccaccaacaaggccguggucagccucuccggcugcggggugagcgugcugacguucaagguccuggaccucaagaacuacaucgacaagcagcugcugccgauccucaacaagcaguccugcagcauccccaacaucgagaccgugaucgaguuccagcagaagaacaaccggcugcuggagaucacccgcgaguucuccgugaacgccggcgucaccacgcccgugagcaccuacaugcucaccaacuccgagcugcugagccucaucaacgacaugcccaucaccaacgaccagaagaagcugaugagcaacaacgugcagaucguccggcagcaguccuacagcaucaugugcaucaucaaggaggaggugcuggccuacgugguccagcucccgcuguacggggugaucgacacgcccugcuggaagcugcacaccagcccccucugcaccaccaacacgaaggagggcuccaacaucugccugacccgcaccgaccggggcugguacugcgacaacgcgggguccgugagcuucuucccccaggccgagaccugcaagguccaguccaaccgcguguucugcgacacgaugaacagccugacccucccguccgaggucaaccugugcaacguggacaucuucaaccccaaguacgacugcaagaucaugaccagcaagaccgacguguccagcuccgucaucacgagccugggcgccaucguguccugcuacgggaagaccaagugcaccgccagcaacaagugccggggcaucaucaagaccuucuccaacggcugcgacuacgugagcaacaagggggucgacacgguguccgugggcaacacccucuacuacgucaacaagcaggaggggcagagccuguacgugaagggcgagcccaucaucaacuucuacgacccccugguguucccgagcgacgaguucgacgccuccaucagccaggucaacgagaagaucaaccagucccucgcguucauccgcaagagcgacgagcugcugcacaacgugaacgccgggaaguccaccaccaacaucaugaucaccacgaucaucaucgugaucaucgucauccuccugagccugaucgccgugggccuccugcuguacugcaaggcccgguccacccccgugacccugagcaaggaccagcucuccggcaucaacaacaucgccuucagcaacugaggacuaguguccaccugucccuccugggcugcuggauugucucguuuuccugccaaauaaacaggaucagcgcuuuacagaucuaaaaaaaaaaaaaaaaaaaaaaaaaaaaaaaaaaaaaaaaaaaaaaaaaaaaaaaaaaaaaaaaugcaucccccccccccccccccccccccccccccccaaaggcucuuuucagagccaccagaauu

SEQ ID NO: 7591 - RNA, 2060 nt, Artificial Sequence
  mRNA product Design b-1 comprising derived and/or modified sequence from HRSV(A2)__F_DSCav1_mut8 (opt2)
gggagacggagacggccugcaggaccugcucucucagcccucagccgaggccuacgccgagccgagugcgcagccgacgaccgggaggagccgcagccuucaacucugagguacugugauccgcgcugcccgccgggccgccccaguccgcugcugcggcaccuccuucccucgcgcccucuucgcucgccagcgccuucccugugagccugcgucaccgcggccgccaagcuuaccauggagcuccucauccucaaggccaacgccaucaccaccauccucaccgccgucaccuucugcuucgccuccggccagaacaucaccgaggaguucuaccaguccaccugcuccgccgucuccaagggcuaccucggcgcccuccgcaccggcugguacaccuccgucaucaccaucgagcucuccaacaucaaggagaucaagugcaacggcaccgacgccaaggucaagcucaucaagcaggagcucgacaaguacaagaacgccgucaccgaccuccagcuccucaugcaguccacccccgccaccggcuccggcuccgccaucgccuccggcgucgccgucugcaagguccuccaccucgagggcgaggucaacaagaucaaguccgcccuccucuccaccaacaaggccgucgucucccucuccggcugcggcgucuccguccucaccuucaagguccucgaccucaagaacuacaucgacaagcagcuccuccccauccucaacaagcaguccugcuccauccccaacaucgagaccgucaucgaguuccagcagaagaacaaccgccuccucgagaucacccgcgaguucuccgucaacgccggcgucaccacccccgucuccaccuacaugcucaccaacuccgagcuccucucccucaucaacgacaugcccaucaccaacgaccagaagaagcucauguccaacaacguccagaucguccgccagcaguccuacuccaucaugugcaucaucaaggaggagguccucgccuacgucguccagcucccccucuacggcgucaucgacacccccugcuggaagcuccacaccuccccccucugcaccaccaacaccaaggagggcuccaacaucugccucacccgcaccgaccgcggcugguacugcgacaacgccggcuccgucuccuucuucccccaggccgagaccugcaagguccaguccaaccgcgucuucugcgacaccaugaacucccucacccuccccuccgaggucaaccucugcaacgucgacaucuucaaccccaaguacgacugcaagaucaugaccuccaagaccgacgucuccuccuccgucaucaccucccucggcgccaucgucuccugcuacggcaagaccaagugcaccgccuccaacaagugccgcggcaucaucaagaccuucuccaacggcugcgacuacgucuccaacaagggcgucgacaccgucuccgucggcaacacccucuacuacgucaacaagcaggagggccagucccucuacgucaagggcgagcccaucaucaacuucuacgacccccucgucuuccccuccgacgaguucgacgccuccaucucccaggucaacgagaagaucaaccagucccucgccuucauccgcaaguccgacgagcuccuccacaacgucaacgccggcaaguccaccaccaacaucaugaucaccaccaucaucaucgucaucaucgucauccuccucucccucaucgccgucggccuccuccucuacugcaaggcccgcuccacccccgucacccucuccaaggaccagcucuccggcaucaacaacaucgccuucuccaacugaggacuaguguccaccugucccuccugggcugcuggauugucucguuuuccugccaaauaaacaggaucagcgcuuuacagaucuaaaaaaaaaaaaaaaaaaaaaaaaaaaaaaaaaaaaaaaaaaaaaaaaaaaaaaaaaaaaaaaaugcaucccccccccccccccccccccccccccccccaaaggcucuuuucagagccaccagaauu

SEQ ID NO: 7592 - RNA, 2060 nt, Artificial Sequence
  mRNA product Design b-1 comprising derived and/or modified sequence from HRSV(A2)__F_DSCav1_mut8 (opt3)
gggagacggagacggccugcaggaccugcucucucagcccucagccgaggccuacgccgagccgagugcgcagccgacgaccgggaggagccgcagccuucaacucugagguacugugauccgcgcugcccgccgggccgccccaguccgcugcugcggcaccuccuucccucgcgcccucuucgcucgccagcgccuucccugugagccugcgucaccgcggccgccaagcuuaccauggagcugcucauccuuaaggccaacgcuauuaccacaauacugacugcagugacguucugcuuugccagcggccagaauaucaccgaagaguucuaccaauccacauguucugcggucucaaaaggguauuugggagcuuuaagaacugguugguacaccaguguuauuacaaucgaacugagcaacauuaaggagaucaaaugcaauggcaccgacgccaaggugaaacuaauaaagcaggaacucgauaaguauaaaaacgcaguaacugaccugcagcuucugaugcaguccacacccgccaccgggucuggaucggcuaucgcaucaggcguggccgucuguaagguguugcaccucgagggugagguuaauaaaauuaagagcgcucugcugaguacgaacaaagccguggucucccucucugggugcggagugagcguauuaacuuuuaagguucuggaucuuaagaauuacaucgacaaacaauugcugccuauucuaaacaagcaguccuguucaaucccaaauauagaaaccgugauugaguuccagcagaaaaacaauaggcuccuggaaaucacacgggaguuuagugucaacgcgggcgugacuaccccggugagcacauauaugcuuaccaauucugagcuguugucccucauuaacgauaugcccaucacgaaugaccaaaagaaacugaugucaaacaacguccagaucguucgccagcagagcuacaguauuaugugcauaaucaaggaagagguguuagcauauguagugcaacugccucucuacggcgucauugauacuccauguuggaaacuucauacaucuccccugugcaccacuaauacaaaggaaggguccaacaucuguuugacccgaacggaccguggaugguacugcgauaaugccgguagcgugucguucuuuccucaggcugagaccuguaagguucagucuaacagaguguucugcgacacaaugaacucccuaacucugccaucagaagucaaucucugcaauguggauauauuuaaccccaaauaugacuguaagauuaugaccaguaaaacagauguaagcuccucuguuaucacuagccugggcgccaucgugucaugcuacgggaagaccaaauguacagcaaguaauaagugcaggggaauuaucaagaccuucuccaacggcugugacuaugucagcaauaaagguguggacacugucucuguggggaacacgcuuuacuauguuaauaagcaagagggacagucacuguacgugaaaggcgagccuauuauaaacuuuuaugauccauugguauucccgagugacgaauuugaugcuagcaucucccaggucaaugagaagauuaaccagucucucgccuucauccggaaaucggacgaacuguuacacaacgugaaugcgggcaagagcacaaccaacaucaugauuacuaccauaaucauuguuaucauugugauccugcuaucccucauagccgucgggcugcuuuuguacugcaaggcacgcucaacacccgugacccugaguaaagaucaacucucuggaaucaauaacauugcuuucagcaauugaggacuaguguccaccugucccuccugggcugcuggauugucucguuuuccugccaaauaaacaggaucagcgcuuuacagaucuaaaaaaaaaaaaaaaaaaaaaaaaaaaaaaaaaaaaaaaaaaaaaaaaaaaaaaaaaaaaaaaaugcaucccccccccccccccccccccccccccccccaaaggcucuuuucagagccaccagaauu

SEQ ID NO: 7593 - RNA, 2060 nt, Artificial Sequence
  mRNA product Design b-1 comprising derived and/or modified sequence from HRSV(A2)__F_DSCav1_mut8 (opt4)
gggagacggagacggccugcaggaccugcucucucagcccucagccgaggccuacgccgagccgagugcgcagccgacgaccgggaggagccgcagccuucaacucugagguacugugauccgcgcugcccgccgggccgccccaguccgcugcugcggcaccuccuucccucgcgcccucuucgcucgccagcgccuucccugugagccugcgucaccgcggccgccaagcuuaccauggagcugcugauccugaaggccaacgccaucaccaccauccugaccgccgugaccuucugcuucgccagcggccagaacaucaccgaggaguucuaccagagcaccugcagcgccgugagcaagggcuaccugggcgcccugagaaccggcugguacaccagcgugaucaccaucgagcugagcaacaucaaggagaucaagugcaacggcaccgacgccaaggugaagcugaucaagcaggagcuggacaaguacaagaacgccgugaccgaccugcagcugcugaugcagagcacccccgccaccggcagcggcagcgccaucgccagcggcguggccgugugcaaggugcugcaccuggagggcgaggugaacaagaucaagagcgcccugcugagcaccaacaaggccguggugagccugagcggcugcggcgugagcgugcugaccuucaaggugcuggaccugaagaacuacaucgacaagcagcugcugcccauccugaacaagcagagcugcagcauccccaacaucgagaccgugaucgaguuccagcagaagaacaacagacugcuggagaucaccagagaguucagcgugaacgccggcgugaccacccccgugagcaccuacaugcugaccaacagcgagcugcugagccugaucaacgacaugcccaucaccaacgaccagaagaagcugaugagcaacaacgugcagaucgugagacagcagagcuacagcaucaugugcaucaucaaggaggaggugcuggccuacguggugcagcugccccuguacggcgugaucgacacccccugcuggaagcugcacaccagcccccugugcaccaccaacaccaaggagggcagcaacaucugccugaccagaaccgacagaggcugguacugcgacaacgccggcagcgugagcuucuucccccaggccgagaccugcaaggugcagagcaacagaguguucugcgacaccaugaacagccugacccugcccagcgaggugaaccugugcaacguggacaucuucaaccccaaguacgacugcaagaucaugaccagcaagaccgacgugagcagcagcgugaucaccagccugggcgccaucgugagcugcuacggcaagaccaagugcaccgccagcaacaagugcagaggcaucaucaagaccuucagcaacggcugcgacuacgugagcaacaagggcguggacaccgugagcgugggcaacacccuguacuacgugaacaagcaggagggccagagccuguacgugaagggcgagcccaucaucaacuucuacgacccccugguguuccccagcgacgaguucgacgccagcaucagccaggugaacgagaagaucaaccagagccuggccuucaucagaaagagcgacgagcugcugcacaacgugaacgccggcaagagcaccaccaacaucaugaucaccaccaucaucaucgugaucaucgugauccugcugagccugaucgccgugggccugcugcuguacugcaaggccagaagcacccccgugacccugagcaaggaccagcugagcggcaucaacaacaucgccuucagcaacugaggacuaguguccaccugucccuccugggcugcuggauugucucguuuuccugccaaauaaacaggaucagcgcuuuacagaucuaaaaaaaaaaaaaaaaaaaaaaaaaaaaaaaaaaaaaaaaaaaaaaaaaaaaaaaaaaaaaaaaugcaucccccccccccccccccccccccccccccccaaaggcucuuuucagagccaccagaauu

SEQ ID NO: 7594 - RNA, 2060 nt, Artificial Sequence
  mRNA product Design b-1 comprising derived and/or modified sequence from HRSV(A2)__F_DSCav1_mut8 (opt5)
gggagacggagacggccugcaggaccugcucucucagcccucagccgaggccuacgccgagccgagugcgcagccgacgaccgggaggagccgcagccuucaacucugagguacugugauccgcgcugcccgccgggccgccccaguccgcugcugcggcaccuccuucccucgcgcccucuucgcucgccagcgccuucccugugagccugcgucaccgcggccgccaagcuuaccauggagcugcucauccugaaggccaacgcuauuaccacaauccuuacggccgugaccuucugcuuugcgagcggccagaauauuacagaagaguucuaccaauccaccuguucugcugucagcaaaggguaucugggagcccucagaacaggcugguacaccuccguuaucacaauugaacugucuaacaucaaggagaucaaaugcaaugggaccgacgccaaggugaaacuuauuaagcaggaacuggauaaguauaaaaacgcugugacggaccuccagcugcugaugcagagcacccccgccacaggauccggcucugcuaucgccagcggggucgcgguguguaagguucuccaccuggagggagaggugaauaaaauuaaguccgcccuucugagcaccaacaaagcugucgugucucucuccggcugcggcguuagcgugcugacauuuaagguccuugaucugaagaauuacaucgacaaacaacuccugccuauucugaacaagcagucuuguuccaucccgaauauugaaaccgugaucgaguuccagcagaaaaacaaucggcuccuggaaaucacgcgcgaguuuagcgugaacgccggggucacaacccccguuucuacauauaugcuuaccaauuccgagcugcucagccugauuaacgauaugccuaucaccaaugaccaaaagaaacuuauguccaacaacgugcagauugugagacagcagucuuacagcaucaugugcauuaucaaggaagagguccuggcuuaugugguucaacucccccuguacggagugaucgauacaccuuguuggaaacugcauacgagcccccucugcaccacaaauaccaaggaaggcagcaacauuugucugacacggaccgaccgcgggugguacugcgauaaugccggaucugucuccuucuuuccucaggcggagacguguaaggugcagagcaacagaguuuucugcgacacaaugaacucucuuacccugccgagcgaagugaaucucugcaaugucgauaucuuuaaccccaaauaugacuguaagauuaugaccuccaaaacagaugugucuagcuccgucaucaccagccugggcgccauugugucuugcuacgggaagacaaaauguacggcuuccaauaagugccggggaaucaucaagaccuucagcaacggcugugacuauguuucuaauaaaggcguggacacagucuccguggggaacacccuuuacuauguuaauaagcaagagggacagagccuguacgugaaaggcgagccuauuaucaacuuuuaugauccccucgucuucccuuccgacgaauuugaugccucuauuagccaggugaaugagaagaucaaccagucccuggcuuucauucgcaaaucugacgaacugcuccacaacgugaaugccgggaaguccacaaccaacaucaugauuacgaccaucaucauuguuaucauugucauccugcuuucccugauugccgugggacuccugcuguacugcaaggcuagaagcacacccgugacccuuucuaaagaucaacucuccggcaucaauaacaucgcguucagcaauugaggacuaguguccaccugucccuccugggcugcuggauugucucguuuuccugccaaauaaacaggaucagcgcuuuacagaucuaaaaaaaaaaaaaaaaaaaaaaaaaaaaaaaaaaaaaaaaaaaaaaaaaaaaaaaaaaaaaaaaugcaucccccccccccccccccccccccccccccccaaaggcucuuuucagagccaccagaauu

SEQ ID NO: 7595 - RNA, 2060 nt, Artificial Sequence
  mRNA product Design b-1 comprising derived and/or modified sequence from HRSV(A2)__F_DSCav1_mut8 (opt6)
gggagacggagacggccugcaggaccugcucucucagcccucagccgaggccuacgccgagccgagugcgcagccgacgaccgggaggagccgcagccuucaacucugagguacugugauccgcgcugcccgccgggccgccccaguccgcugcugcggcaccuccuucccucgcgcccucuucgcucgccagcgccuucccugugagccugcgucaccgcggccgccaagcuuaccauggaacuauuaauauuaaaagcaaacgcaaucacaacuauacuaacagcaguaacauucugcuuugccucaggucaaaacauaacagaggaauuuuaccaauccacaugcucugcuguaagcaaaggauaccucggagcauuaagaacuggaugguacaccucaguaauaacuauagaacuaucaaacauaaaagaaauaaaauguaauggcacagacgcaaaagugaaauuaaucaaacaagaacucgauaaauacaaaaaugccguaaccgaucuccaacuuuuaaugcaaagcacacccgcaacagguuccgggucagcaauagcaagcggaguugcaguaugcaaaguacuacacuuagaaggagaaguaaauaaaaucaaaucagccuuacuaucaacaaauaaagcaguuguaucacucucaggaugcggaguauccguacuaacauuuaaaguacuagaucuaaaaaacuacauagauaaacaacucuuaccaauacuaaauaaacaaucauguuccauacccaacauagaaaccguuaucgaauuucaacaaaaaaacaacagauuacuagaaaucacacgagaauuuucaguaaaugcuggagucacaacaccaguuaguacauacaugcucaccaauucagaacuacuaaguuuaauuaacgauaugccaauaacaaacgaccaaaaaaaacuaaugucaaauaacguacaaauaguaagacaacaaucauacucaaucaugugcauaauaaaagaagaaguacuagccuauguaguccaauuaccacucuacggcguaaucgacaccccaugcuggaaauuacacacaagcccauuaugcaccaccaacacaaaagaagguucaaacauuugcuuaaccagaaccgaucgaggaugguacugcgauaacgcaggaucugucuccuuuuucccacaagccgaaacaugcaaaguucaaucaaaccgaguuuucugugacacuaugaacucacucacacuuccaagcgaaguaaaccuaugcaacguagauauauuuaacccuaaauacgacugcaaaauaaugacaagcaaaacagacguuaguucaucaguaauuacaagucuaggcgcaauagugucaugcuacggaaaaacaaaaugcaccgcauccaauaaaugccgaggaaucauuaaaacauucucaaacggaugcgacuacgucagcaauaaaggaguagacacuguuucuguaggaaacacccuauacuauguaaacaaacaagaaggucaaucacuauacguaaagggagaaccaauuauaaauuuuuacgaccccuuaguauuuccaagugaugaauuugacgcaucuauaagucaaguuaacgaaaaaauuaaccaaucacuugcauuuauaagaaaaucagacgaacuacuccauaauguaaacgcagguaaaucaacaacaaacaucaugaucacaaccauaauaauaguaauaauuguaauauuacuaucacuaauagcaguaggauuacuacucuacugcaaagcuagaucuaccccggucacacucucaaaagaccaauuaucuggaauaaacaauauagcauucagcaacuaaggacuaguguccaccugucccuccugggcugcuggauugucucguuuuccugccaaauaaacaggaucagcgcuuuacagaucuaaaaaaaaaaaaaaaaaaaaaaaaaaaaaaaaaaaaaaaaaaaaaaaaaaaaaaaaaaaaaaaaugcaucccccccccccccccccccccccccccccccaaaggcucuuuucagagccaccagaauu

SEQ ID NO: 7596 - RNA, 2060 nt, Artificial Sequence
  mRNA product Design b-1 comprising derived and/or modified sequence from HRSV(A2)__F_DSCav1_mut8 (opt11)
gggagacggagacggccugcaggaccugcucucucagcccucagccgaggccuacgccgagccgagugcgcagccgacgaccgggaggagccgcagccuucaacucugagguacugugauccgcgcugcccgccgggccgccccaguccgcugcugcggcaccuccuucccucgcgcccucuucgcucgccagcgccuucccugugagccugcgucaccgcggccgccaagcuuaccauggaacuccucauccuuaaagccaacgccauaaccaccauccucaccgccgucaccuucugcuucgcuucuggccaaaacauaaccgaagaguucuaccaauccacgugcucugccgugucaaaaggcuaccucggagcccuccgcacagggugguacacuuccgucaucaccaucgaacucucuaacaucaaagaaaucaagugcaacggcacagacgcgaaagucaagcucaucaaacaagaacuagacaaauacaaaaacgccguaacagaccuccaacuccuaaugcaguccacaccagccacaggcuccggcagcgccaucgccuccggcgucgcugucugcaaaguccuacaccucgaaggcgaagucaacaaaaucaagucagcccuccuuagcaccaacaaagcagucgucucuuuaagcgggugcggagucucuguccuaaccuuuaaaguacucgaccucaaaaacuacaucgacaaacaacuacuaccaauacuaaacaaacagagcugcuccauucccaacaucgaaaccguuaucgaguuccaacaaaagaacaaccgccuccucgaaaucacccgcgaguucuccgucaacgcaggcgucaccaccccagucuccaccuauaugcuaaccaacagcgaacuccucagccucaucaaugacaugccaaucaccaacgaccaaaagaaacucauguccaacaacguacagauaguccgccagcaguccuacagcaucaugugcaucaucaaagaagaagugcucgccuacgugguacaacucccucucuacggagucauugauacacccugcuggaaacuccacacaagcccccucugcacuacaaacaccaaagaaggcucuaacauaugccucacccgcacagaccgugguugguacugcgacaacgccggcuccguauccuucuuuccacaagcugaaaccugcaaaguucaaucaaaccgagucuucugcgacaccaugaacucccucacauugcccagcgaagucaaccucugcaacgucgacaucuucaaccccaaguacgacugcaaaaucaugaccuccaaaaccgacgucagcuccagcgugaucacaagccuaggcgcgaucgucagcugcuacggcaaaaccaaaugcacagccuccaacaaaugccgcggaaucauaaaaacauucaguaacggcugcgacuacguguccaauaaaggagucgacaccguauccgucggaaacacccucuacuacgucaacaaacaagaaggacaaucccucuaugucaaaggcgaacccauuaucaacuucuacgacccccuaguuuuccccuccgacgaguucgacgcaagcauuucccaagucaacgaaaagaucaaucaaucccucgccuucauacgcaaaagcgacgaacuacuacacaacguaaacgccggcaaaagcaccaccaacaucaugaucacaacaaucaucaucgucaucaucgucauccuacucucacucaucgccguuggccuacuacucuacugcaaagcccgcuccacacccgucacccucucaaaagaccaacucuccggcaucaacaacaucgcauucagcaacugaggacuaguguccaccugucccuccugggcugcuggauugucucguuuuccugccaaauaaacaggaucagcgcuuuacagaucuaaaaaaaaaaaaaaaaaaaaaaaaaaaaaaaaaaaaaaaaaaaaaaaaaaaaaaaaaaaaaaaaugcaucccccccccccccccccccccccccccccccaaaggcucuuuucagagccaccagaauu

SEQ ID NO: 7597 - RNA, 1880 nt, Artificial Sequence
  mRNA product Design b-2 comprising derived and/or modified sequence from HRSV(A2)__F_DSCav1_mut8 (opt1)
gggagagccucugcuggaguccggggaguggcguuggcugcuagagcgaagcuuaccauggagcugcucauccugaaggccaacgccaucaccaccauccugacggcggugaccuucugcuucgccagcggccagaacaucaccgaggaguucuaccaguccacgugcagcgccgucuccaagggguaccucggcgcccugcggaccggcugguacaccuccgugaucaccaucgagcugagcaacaucaaggagaucaagugcaacgggaccgacgccaaggugaagcucaucaagcaggagcuggacaaguacaagaacgcggucacggaccugcagcuccugaugcaguccaccccggcaaccggcuccggcuccgccaucgcgagcggcgucgccgugugcaaggugcugcaccucgagggggaggucaacaagaucaagagcgcccugcuguccaccaacaaggccguggugagccucuccggcugcggcgucagcgugcugaccuucaaggugcuggaccucaagaacuacaucgacaagcagcugcugcccauccugaacaagcagagcugcuccauccccaacaucgagacggugaucgaguuccagcagaagaacaaccggcuccuggagaucacccgcgaguucagcgugaacgccggggucaccacccccguguccacguacaugcugaccaacagcgagcuccugucccugaucaacgacaugccgaucaccaacgaccagaagaagcucaugagcaacaacgugcagaucguccggcagcaguccuacagcaucaugugcaucaucaaggaggaggugcuggcguacgugguccagcugccccucuacggcgugaucgacacccccugcuggaagcugcacacgagcccccugugcaccaccaacaccaaggagggguccaacaucugccucacgcgcaccgaccggggcugguacugcgacaacgccggcagcgucuccuucuucccgcaggccgagaccugcaaggugcagagcaaccgcguguucugcgacaccaugaacucccugacgcugcccagcgagguaaaccucugcaacgucgacaucuucaaccccaaguacgacugcaagaucaugaccuccaagaccgacgugagcuccagcgugaucaccucccugggggccaucgucagcugcuacggcaagacgaagugcaccgccagcaacaagugccgggggaucaucaagaccuucuccaacggcugcgacuacgugagcaacaagggcguggacaccguguccgucgggaacacccuguacuacgugaacaagcaggagggccagagccucuacgugaagggggagcccaucaucaacuucuacgacccgcuggucuuccccuccgacgaguucgacgcgagcaucucccaggugaacgagaagaucaaccagagccuggccuucauccgcaaguccgacgagcugcuccacaacgugaacgccggcaagagcacgaccaacaucaugaucaccaccaucaucaucgucaucaucgugauccugcugucccucaucgccguggggcugcugcucuacugcaaggcccggagcacgcccgucacccuguccaaggaccagcugagcggcaucaacaacaucgcguucuccaacugaggacuaguguccaccugucccuccugggcugcuggauugucucguuuuccugccaaauaaacaggaucagcgcuuuacagaucuaaaaaaaaaaaaaaaaaaaaaaaaaaaaaaaaaaaaaaaaaaaaaaaaaaaaaaaaaaaaaaaaugcaucccccccccccccccccccccccccccccccaaaggcucuuuucagagccaccagaauu

SEQ ID NO: 7598 - RNA, 1880 nt, Artificial Sequence
  mRNA product Design b-2 comprising derived and/or modified sequence from HRSV(A2)__F_DSCav1_mut8 (opt1)
gggagagccucugcuggaguccggggaguggcguuggcugcuagagcgaagcuuaccauggagcugcucauccugaaggccaacgccaucaccaccauccugacggcggugaccuucugcuucgccagcggccagaacaucaccgaggaguucuaccaguccacgugcagcgccgucuccaagggguaccucggcgcccugcgcaccgggugguacaccagcgugaucaccaucgagcuguccaacaucaaggagaucaagugcaacggcaccgacgccaaggugaagcucaucaagcaggagcuggacaaguacaagaacgcggucacggaccugcagcuccugaugcagagcacccccgccaccggguccggcagcgccaucgccuccggcguggcggugugcaagguccugcaccucgagggggaggugaacaagaucaagagcgcccugcuguccaccaacaaggccguggucagccucuccggcugcggggugagcgugcugacguucaagguccuggaccucaagaacuacaucgacaagcagcugcugccgauccucaacaagcaguccugcagcauccccaacaucgagaccgugaucgaguuccagcagaagaacaaccggcugcuggagaucacccgcgaguucuccgugaacgccggcgucaccacgcccgugagcaccuacaugcucaccaacuccgagcugcugagccucaucaacgacaugcccaucaccaacgaccagaagaagcugaugagcaacaacgugcagaucguccggcagcaguccuacagcaucaugugcaucaucaaggaggaggugcuggccuacgugguccagcucccgcuguacggggugaucgacacgcccugcuggaagcugcacaccagcccccucugcaccaccaacacgaaggagggcuccaacaucugccugacccgcaccgaccggggcugguacugcgacaacgcgggguccgugagcuucuucccccaggccgagaccugcaagguccaguccaaccgcguguucugcgacacgaugaacagccugacccucccguccgaggucaaccugugcaacguggacaucuucaaccccaaguacgacugcaagaucaugaccagcaagaccgacguguccagcuccgucaucacgagccugggcgccaucguguccugcuacgggaagaccaagugcaccgccagcaacaagugccggggcaucaucaagaccuucuccaacggcugcgacuacgugagcaacaagggggucgacacgguguccgugggcaacacccucuacuacgucaacaagcaggaggggcagagccuguacgugaagggcgagcccaucaucaacuucuacgacccccugguguucccgagcgacgaguucgacgccuccaucagccaggucaacgagaagaucaaccagucccucgcguucauccgcaagagcgacgagcugcugcacaacgugaacgccgggaaguccaccaccaacaucaugaucaccacgaucaucaucgugaucaucgucauccuccugagccugaucgccgugggccuccugcuguacugcaaggcccgguccacccccgugacccugagcaaggaccagcucuccggcaucaacaacaucgccuucagcaacugaggacuaguguccaccugucccuccugggcugcuggauugucucguuuuccugccaaauaaacaggaucagcgcuuuacagaucuaaaaaaaaaaaaaaaaaaaaaaaaaaaaaaaaaaaaaaaaaaaaaaaaaaaaaaaaaaaaaaaaugcaucccccccccccccccccccccccccccccccaaaggcucuuuucagagccaccagaauu

SEQ ID NO: 7599 - RNA, 1880 nt, Artificial Sequence
  mRNA product Design b-2 comprising derived and/or modified sequence from HRSV(A2)__F_DSCav1_mut8 (opt2)
gggagagccucugcuggaguccggggaguggcguuggcugcuagagcgaagcuuaccauggagcuccucauccucaaggccaacgccaucaccaccauccucaccgccgucaccuucugcuucgccuccggccagaacaucaccgaggaguucuaccaguccaccugcuccgccgucuccaagggcuaccucggcgcccuccgcaccggcugguacaccuccgucaucaccaucgagcucuccaacaucaaggagaucaagugcaacggcaccgacgccaaggucaagcucaucaagcaggagcucgacaaguacaagaacgccgucaccgaccuccagcuccucaugcaguccacccccgccaccggcuccggcuccgccaucgccuccggcgucgccgucugcaagguccuccaccucgagggcgaggucaacaagaucaaguccgcccuccucuccaccaacaaggccgucgucucccucuccggcugcggcgucuccguccucaccuucaagguccucgaccucaagaacuacaucgacaagcagcuccuccccauccucaacaagcaguccugcuccauccccaacaucgagaccgucaucgaguuccagcagaagaacaaccgccuccucgagaucacccgcgaguucuccgucaacgccggcgucaccacccccgucuccaccuacaugcucaccaacuccgagcuccucucccucaucaacgacaugcccaucaccaacgaccagaagaagcucauguccaacaacguccagaucguccgccagcaguccuacuccaucaugugcaucaucaaggaggagguccucgccuacgucguccagcucccccucuacggcgucaucgacacccccugcuggaagcuccacaccuccccccucugcaccaccaacaccaaggagggcuccaacaucugccucacccgcaccgaccgcggcugguacugcgacaacgccggcuccgucuccuucuucccccaggccgagaccugcaagguccaguccaaccgcgucuucugcgacaccaugaacucccucacccuccccuccgaggucaaccucugcaacgucgacaucuucaaccccaaguacgacugcaagaucaugaccuccaagaccgacgucuccuccuccgucaucaccucccucggcgccaucgucuccugcuacggcaagaccaagugcaccgccuccaacaagugccgcggcaucaucaagaccuucuccaacggcugcgacuacgucuccaacaagggcgucgacaccgucuccgucggcaacacccucuacuacgucaacaagcaggagggccagucccucuacgucaagggcgagcccaucaucaacuucuacgacccccucgucuuccccuccgacgaguucgacgccuccaucucccaggucaacgagaagaucaaccagucccucgccuucauccgcaaguccgacgagcuccuccacaacgucaacgccggcaaguccaccaccaacaucaugaucaccaccaucaucaucgucaucaucgucauccuccucucccucaucgccgucggccuccuccucuacugcaaggcccgcuccacccccgucacccucuccaaggaccagcucuccggcaucaacaacaucgccuucuccaacugaggacuaguguccaccugucccuccugggcugcuggauugucucguuuuccugccaaauaaacaggaucagcgcuuuacagaucuaaaaaaaaaaaaaaaaaaaaaaaaaaaaaaaaaaaaaaaaaaaaaaaaaaaaaaaaaaaaaaaaugcaucccccccccccccccccccccccccccccccaaaggcucuuuucagagccaccagaauu

SEQ ID NO: 7600 - RNA, 1880 nt, Artificial Sequence
  mRNA product Design b-2 comprising derived and/or modified sequence from HRSV(A2)__F_DSCav1_mut8 (opt3)
gggagagccucugcuggaguccggggaguggcguuggcugcuagagcgaagcuuaccauggagcugcucauccuuaaggccaacgcuauuaccacaauacugacugcagugacguucugcuuugccagcggccagaauaucaccgaagaguucuaccaauccacauguucugcggucucaaaaggguauuugggagcuuuaagaacugguugguacaccaguguuauuacaaucgaacugagcaacauuaaggagaucaaaugcaauggcaccgacgccaaggugaaacuaauaaagcaggaacucgauaaguauaaaaacgcaguaacugaccugcagcuucugaugcaguccacacccgccaccgggucuggaucggcuaucgcaucaggcguggccgucuguaagguguugcaccucgagggugagguuaauaaaauuaagagcgcucugcugaguacgaacaaagccguggucucccucucugggugcggagugagcguauuaacuuuuaagguucuggaucuuaagaauuacaucgacaaacaauugcugccuauucuaaacaagcaguccuguucaaucccaaauauagaaaccgugauugaguuccagcagaaaaacaauaggcuccuggaaaucacacgggaguuuagugucaacgcgggcgugacuaccccggugagcacauauaugcuuaccaauucugagcuguugucccucauuaacgauaugcccaucacgaaugaccaaaagaaacugaugucaaacaacguccagaucguucgccagcagagcuacaguauuaugugcauaaucaaggaagagguguuagcauauguagugcaacugccucucuacggcgucauugauacuccauguuggaaacuucauacaucuccccugugcaccacuaauacaaaggaaggguccaacaucuguuugacccgaacggaccguggaugguacugcgauaaugccgguagcgugucguucuuuccucaggcugagaccuguaagguucagucuaacagaguguucugcgacacaaugaacucccuaacucugccaucagaagucaaucucugcaauguggauauauuuaaccccaaauaugacuguaagauuaugaccaguaaaacagauguaagcuccucuguuaucacuagccugggcgccaucgugucaugcuacgggaagaccaaauguacagcaaguaauaagugcaggggaauuaucaagaccuucuccaacggcugugacuaugucagcaauaaagguguggacacugucucuguggggaacacgcuuuacuauguuaauaagcaagagggacagucacuguacgugaaaggcgagccuauuauaaacuuuuaugauccauugguauucccgagugacgaauuugaugcuagcaucucccaggucaaugagaagauuaaccagucucucgccuucauccggaaaucggacgaacuguuacacaacgugaaugcgggcaagagcacaaccaacaucaugauuacuaccauaaucauuguuaucauugugauccugcuaucccucauagccgucgggcugcuuuuguacugcaaggcacgcucaacacccgugacccugaguaaagaucaacucucuggaaucaauaacauugcuuucagcaauugaggacuaguguccaccugucccuccugggcugcuggauugucucguuuuccugccaaauaaacaggaucagcgcuuuacagaucuaaaaaaaaaaaaaaaaaaaaaaaaaaaaaaaaaaaaaaaaaaaaaaaaaaaaaaaaaaaaaaaaugcaucccccccccccccccccccccccccccccccaaaggcucuuuucagagccaccagaauu

SEQ ID NO: 7601 - RNA, 1880 nt, Artificial Sequence
  mRNA product Design b-2 comprising derived and/or modified sequence from HRSV(A2)__F_DSCav1_mut8 (opt4)
gggagagccucugcuggaguccggggaguggcguuggcugcuagagcgaagcuuaccauggagcugcugauccugaaggccaacgccaucaccaccauccugaccgccgugaccuucugcuucgccagcggccagaacaucaccgaggaguucuaccagagcaccugcagcgccgugagcaagggcuaccugggcgcccugagaaccggcugguacaccagcgugaucaccaucgagcugagcaacaucaaggagaucaagugcaacggcaccgacgccaaggugaagcugaucaagcaggagcuggacaaguacaagaacgccgugaccgaccugcagcugcugaugcagagcacccccgccaccggcagcggcagcgccaucgccagcggcguggccgugugcaaggugcugcaccuggagggcgaggugaacaagaucaagagcgcccugcugagcaccaacaaggccguggugagccugagcggcugcggcgugagcgugcugaccuucaaggugcuggaccugaagaacuacaucgacaagcagcugcugcccauccugaacaagcagagcugcagcauccccaacaucgagaccgugaucgaguuccagcagaagaacaacagacugcuggagaucaccagagaguucagcgugaacgccggcgugaccacccccgugagcaccuacaugcugaccaacagcgagcugcugagccugaucaacgacaugcccaucaccaacgaccagaagaagcugaugagcaacaacgugcagaucgugagacagcagagcuacagcaucaugugcaucaucaaggaggaggugcuggccuacguggugcagcugccccuguacggcgugaucgacacccccugcuggaagcugcacaccagcccccugugcaccaccaacaccaaggagggcagcaacaucugccugaccagaaccgacagaggcugguacugcgacaacgccggcagcgugagcuucuucccccaggccgagaccugcaaggugcagagcaacagaguguucugcgacaccaugaacagccugacccugcccagcgaggugaaccugugcaacguggacaucuucaaccccaaguacgacugcaagaucaugaccagcaagaccgacgugagcagcagcgugaucaccagccugggcgccaucgugagcugcuacggcaagaccaagugcaccgccagcaacaagugcagaggcaucaucaagaccuucagcaacggcugcgacuacgugagcaacaagggcguggacaccgugagcgugggcaacacccuguacuacgugaacaagcaggagggccagagccuguacgugaagggcgagcccaucaucaacuucuacgacccccugguguuccccagcgacgaguucgacgccagcaucagccaggugaacgagaagaucaaccagagccuggccuucaucagaaagagcgacgagcugcugcacaacgugaacgccggcaagagcaccaccaacaucaugaucaccaccaucaucaucgugaucaucgugauccugcugagccugaucgccgugggccugcugcuguacugcaaggccagaagcacccccgugacccugagcaaggaccagcugagcggcaucaacaacaucgccuucagcaacugaggacuaguguccaccugucccuccugggcugcuggauugucucguuuuccugccaaauaaacaggaucagcgcuuuacagaucuaaaaaaaaaaaaaaaaaaaaaaaaaaaaaaaaaaaaaaaaaaaaaaaaaaaaaaaaaaaaaaaaugcaucccccccccccccccccccccccccccccccaaaggcucuuuucagagccaccagaauu

SEQ ID NO: 7602 - RNA, 1880 nt, Artificial Sequence
  mRNA product Design b-2 comprising derived and/or modified sequence from HRSV(A2)__F_DSCav1_mut8 (opt5)
gggagagccucugcuggaguccggggaguggcguuggcugcuagagcgaagcuuaccauggagcugcucauccugaaggccaacgcuauuaccacaauccuuacggccgugaccuucugcuuugcgagcggccagaauauuacagaagaguucuaccaauccaccuguucugcugucagcaaaggguaucugggagcccucagaacaggcugguacaccuccguuaucacaauugaacugucuaacaucaaggagaucaaaugcaaugggaccgacgccaaggugaaacuuauuaagcaggaacuggauaaguauaaaaacgcugugacggaccuccagcugcugaugcagagcacccccgccacaggauccggcucugcuaucgccagcggggucgcgguguguaagguucuccaccuggagggagaggugaauaaaauuaaguccgcccuucugagcaccaacaaagcugucgugucucucuccggcugcggcguuagcgugcugacauuuaagguccuugaucugaagaauuacaucgacaaacaacuccugccuauucugaacaagcagucuuguuccaucccgaauauugaaaccgugaucgaguuccagcagaaaaacaaucggcuccuggaaaucacgcgcgaguuuagcgugaacgccggggucacaacccccguuucuacauauaugcuuaccaauuccgagcugcucagccugauuaacgauaugccuaucaccaaugaccaaaagaaacuuauguccaacaacgugcagauugugagacagcagucuuacagcaucaugugcauuaucaaggaagagguccuggcuuaugugguucaacucccccuguacggagugaucgauacaccuuguuggaaacugcauacgagcccccucugcaccacaaauaccaaggaaggcagcaacauuugucugacacggaccgaccgcgggugguacugcgauaaugccggaucugucuccuucuuuccucaggcggagacguguaaggugcagagcaacagaguuuucugcgacacaaugaacucucuuacccugccgagcgaagugaaucucugcaaugucgauaucuuuaaccccaaauaugacuguaagauuaugaccuccaaaacagaugugucuagcuccgucaucaccagccugggcgccauugugucuugcuacgggaagacaaaauguacggcuuccaauaagugccggggaaucaucaagaccuucagcaacggcugugacuauguuucuaauaaaggcguggacacagucuccguggggaacacccuuuacuauguuaauaagcaagagggacagagccuguacgugaaaggcgagccuauuaucaacuuuuaugauccccucgucuucccuuccgacgaauuugaugccucuauuagccaggugaaugagaagaucaaccagucccuggcuuucauucgcaaaucugacgaacugcuccacaacgugaaugccgggaaguccacaaccaacaucaugauuacgaccaucaucauuguuaucauugucauccugcuuucccugauugccgugggacuccugcuguacugcaaggcuagaagcacacccgugacccuuucuaaagaucaacucuccggcaucaauaacaucgcguucagcaauugaggacuaguguccaccugucccuccugggcugcuggauugucucguuuuccugccaaauaaacaggaucagcgcuuuacagaucuaaaaaaaaaaaaaaaaaaaaaaaaaaaaaaaaaaaaaaaaaaaaaaaaaaaaaaaaaaaaaaaaugcaucccccccccccccccccccccccccccccccaaaggcucuuuucagagccaccagaauu

SEQ ID NO: 7603 - RNA, 1880 nt, Artificial Sequence
  mRNA product Design b-2 comprising derived and/or modified sequence from HRSV(A2)__F_DSCav1_mut8 (opt6)
gggagagccucugcuggaguccggggaguggcguuggcugcuagagcgaagcuuaccauggaacuauuaauauuaaaagcaaacgcaaucacaacuauacuaacagcaguaacauucugcuuugccucaggucaaaacauaacagaggaauuuuaccaauccacaugcucugcuguaagcaaaggauaccucggagcauuaagaacuggaugguacaccucaguaauaacuauagaacuaucaaacauaaaagaaauaaaauguaauggcacagacgcaaaagugaaauuaaucaaacaagaacucgauaaauacaaaaaugccguaaccgaucuccaacuuuuaaugcaaagcacacccgcaacagguuccgggucagcaauagcaagcggaguugcaguaugcaaaguacuacacuuagaaggagaaguaaauaaaaucaaaucagccuuacuaucaacaaauaaagcaguuguaucacucucaggaugcggaguauccguacuaacauuuaaaguacuagaucuaaaaaacuacauagauaaacaacucuuaccaauacuaaauaaacaaucauguuccauacccaacauagaaaccguuaucgaauuucaacaaaaaaacaacagauuacuagaaaucacacgagaauuuucaguaaaugcuggagucacaacaccaguuaguacauacaugcucaccaauucagaacuacuaaguuuaauuaacgauaugccaauaacaaacgaccaaaaaaaacuaaugucaaauaacguacaaauaguaagacaacaaucauacucaaucaugugcauaauaaaagaagaaguacuagccuauguaguccaauuaccacucuacggcguaaucgacaccccaugcuggaaauuacacacaagcccauuaugcaccaccaacacaaaagaagguucaaacauuugcuuaaccagaaccgaucgaggaugguacugcgauaacgcaggaucugucuccuuuuucccacaagccgaaacaugcaaaguucaaucaaaccgaguuuucugugacacuaugaacucacucacacuuccaagcgaaguaaaccuaugcaacguagauauauuuaacccuaaauacgacugcaaaauaaugacaagcaaaacagacguuaguucaucaguaauuacaagucuaggcgcaauagugucaugcuacggaaaaacaaaaugcaccgcauccaauaaaugccgaggaaucauuaaaacauucucaaacggaugcgacuacgucagcaauaaaggaguagacacuguuucuguaggaaacacccuauacuauguaaacaaacaagaaggucaaucacuauacguaaagggagaaccaauuauaaauuuuuacgaccccuuaguauuuccaagugaugaauuugacgcaucuauaagucaaguuaacgaaaaaauuaaccaaucacuugcauuuauaagaaaaucagacgaacuacuccauaauguaaacgcagguaaaucaacaacaaacaucaugaucacaaccauaauaauaguaauaauuguaauauuacuaucacuaauagcaguaggauuacuacucuacugcaaagcuagaucuaccccggucacacucucaaaagaccaauuaucuggaauaaacaauauagcauucagcaacuaaggacuaguguccaccugucccuccugggcugcuggauugucucguuuuccugccaaauaaacaggaucagcgcuuuacagaucuaaaaaaaaaaaaaaaaaaaaaaaaaaaaaaaaaaaaaaaaaaaaaaaaaaaaaaaaaaaaaaaaugcaucccccccccccccccccccccccccccccccaaaggcucuuuucagagccaccagaauu

SEQ ID NO: 7604 - RNA, 1880 nt, Artificial Sequence
  mRNA product Design b-2 comprising derived and/or modified sequence from HRSV(A2)__F_DSCav1_mut8 (opt11)
gggagagccucugcuggaguccggggaguggcguuggcugcuagagcgaagcuuaccauggaacuccucauccuuaaagccaacgccauaaccaccauccucaccgccgucaccuucugcuucgcuucuggccaaaacauaaccgaagaguucuaccaauccacgugcucugccgugucaaaaggcuaccucggagcccuccgcacagggugguacacuuccgucaucaccaucgaacucucuaacaucaaagaaaucaagugcaacggcacagacgcgaaagucaagcucaucaaacaagaacuagacaaauacaaaaacgccguaacagaccuccaacuccuaaugcaguccacaccagccacaggcuccggcagcgccaucgccuccggcgucgcugucugcaaaguccuacaccucgaaggcgaagucaacaaaaucaagucagcccuccuuagcaccaacaaagcagucgucucuuuaagcgggugcggagucucuguccuaaccuuuaaaguacucgaccucaaaaacuacaucgacaaacaacuacuaccaauacuaaacaaacagagcugcuccauucccaacaucgaaaccguuaucgaguuccaacaaaagaacaaccgccuccucgaaaucacccgcgaguucuccgucaacgcaggcgucaccaccccagucuccaccuauaugcuaaccaacagcgaacuccucagccucaucaaugacaugccaaucaccaacgaccaaaagaaacucauguccaacaacguacagauaguccgccagcaguccuacagcaucaugugcaucaucaaagaagaagugcucgccuacgugguacaacucccucucuacggagucauugauacacccugcuggaaacuccacacaagcccccucugcacuacaaacaccaaagaaggcucuaacauaugccucacccgcacagaccgugguugguacugcgacaacgccggcuccguauccuucuuuccacaagcugaaaccugcaaaguucaaucaaaccgagucuucugcgacaccaugaacucccucacauugcccagcgaagucaaccucugcaacgucgacaucuucaaccccaaguacgacugcaaaaucaugaccuccaaaaccgacgucagcuccagcgugaucacaagccuaggcgcgaucgucagcugcuacggcaaaaccaaaugcacagccuccaacaaaugccgcggaaucauaaaaacauucaguaacggcugcgacuacguguccaauaaaggagucgacaccguauccgucggaaacacccucuacuacgucaacaaacaagaaggacaaucccucuaugucaaaggcgaacccauuaucaacuucuacgacccccuaguuuuccccuccgacgaguucgacgcaagcauuucccaagucaacgaaaagaucaaucaaucccucgccuucauacgcaaaagcgacgaacuacuacacaacguaaacgccggcaaaagcaccaccaacaucaugaucacaacaaucaucaucgucaucaucgucauccuacucucacucaucgccguuggccuacuacucuacugcaaagcccgcuccacacccgucacccucucaaaagaccaacucuccggcaucaacaacaucgcauucagcaacugaggacuaguguccaccugucccuccugggcugcuggauugucucguuuuccugccaaauaaacaggaucagcgcuuuacagaucuaaaaaaaaaaaaaaaaaaaaaaaaaaaaaaaaaaaaaaaaaaaaaaaaaaaaaaaaaaaaaaaaugcaucccccccccccccccccccccccccccccccaaaggcucuuuucagagccaccagaauu

SEQ ID NO: 7605 - RNA, 1900 nt, Artificial Sequence
  mRNA product Design b-3 comprising derived and/or modified sequence from HRSV(A2)__F_DSCav1_mut8 (opt1)
gggagagucccgcagucggcguccagcggcucugcuuguucgugugugugucguugcaggccuuauucaagcuuaccauggagcugcucauccugaaggccaacgccaucaccaccauccugacggcggugaccuucugcuucgccagcggccagaacaucaccgaggaguucuaccaguccacgugcagcgccgucuccaagggguaccucggcgcccugcggaccggcugguacaccuccgugaucaccaucgagcugagcaacaucaaggagaucaagugcaacgggaccgacgccaaggugaagcucaucaagcaggagcuggacaaguacaagaacgcggucacggaccugcagcuccugaugcaguccaccccggcaaccggcuccggcuccgccaucgcgagcggcgucgccgugugcaaggugcugcaccucgagggggaggucaacaagaucaagagcgcccugcuguccaccaacaaggccguggugagccucuccggcugcggcgucagcgugcugaccuucaaggugcuggaccucaagaacuacaucgacaagcagcugcugcccauccugaacaagcagagcugcuccauccccaacaucgagacggugaucgaguuccagcagaagaacaaccggcuccuggagaucacccgcgaguucagcgugaacgccggggucaccacccccguguccacguacaugcugaccaacagcgagcuccugucccugaucaacgacaugccgaucaccaacgaccagaagaagcucaugagcaacaacgugcagaucguccggcagcaguccuacagcaucaugugcaucaucaaggaggaggugcuggcguacgugguccagcugccccucuacggcgugaucgacacccccugcuggaagcugcacacgagcccccugugcaccaccaacaccaaggagggguccaacaucugccucacgcgcaccgaccggggcugguacugcgacaacgccggcagcgucuccuucuucccgcaggccgagaccugcaaggugcagagcaaccgcguguucugcgacaccaugaacucccugacgcugcccagcgagguaaaccucugcaacgucgacaucuucaaccccaaguacgacugcaagaucaugaccuccaagaccgacgugagcuccagcgugaucaccucccugggggccaucgucagcugcuacggcaagacgaagugcaccgccagcaacaagugccgggggaucaucaagaccuucuccaacggcugcgacuacgugagcaacaagggcguggacaccguguccgucgggaacacccuguacuacgugaacaagcaggagggccagagccucuacgugaagggggagcccaucaucaacuucuacgacccgcuggucuuccccuccgacgaguucgacgcgagcaucucccaggugaacgagaagaucaaccagagccuggccuucauccgcaaguccgacgagcugcuccacaacgugaacgccggcaagagcacgaccaacaucaugaucaccaccaucaucaucgucaucaucgugauccugcugucccucaucgccguggggcugcugcucuacugcaaggcccggagcacgcccgucacccuguccaaggaccagcugagcggcaucaacaacaucgcguucuccaacugaggacuaguguccaccugucccuccugggcugcuggauugucucguuuuccugccaaauaaacaggaucagcgcuuuacagaucuaaaaaaaaaaaaaaaaaaaaaaaaaaaaaaaaaaaaaaaaaaaaaaaaaaaaaaaaaaaaaaaaugcaucccccccccccccccccccccccccccccccaaaggcucuuuucagagccaccagaauu

SEQ ID NO: 7606 - RNA, 1900 nt, Artificial Sequence
  mRNA product Design b-3 comprising derived and/or modified sequence from HRSV(A2)__F_DSCav1_mut8 (opt1)
gggagagucccgcagucggcguccagcggcucugcuuguucgugugugugucguugcaggccuuauucaagcuuaccauggagcugcucauccugaaggccaacgccaucaccaccauccugacggcggugaccuucugcuucgccagcggccagaacaucaccgaggaguucuaccaguccacgugcagcgccgucuccaagggguaccucggcgcccugcgcaccgggugguacaccagcgugaucaccaucgagcuguccaacaucaaggagaucaagugcaacggcaccgacgccaaggugaagcucaucaagcaggagcuggacaaguacaagaacgcggucacggaccugcagcuccugaugcagagcacccccgccaccggguccggcagcgccaucgccuccggcguggcggugugcaagguccugcaccucgagggggaggugaacaagaucaagagcgcccugcuguccaccaacaaggccguggucagccucuccggcugcggggugagcgugcugacguucaagguccuggaccucaagaacuacaucgacaagcagcugcugccgauccucaacaagcaguccugcagcauccccaacaucgagaccgugaucgaguuccagcagaagaacaaccggcugcuggagaucacccgcgaguucuccgugaacgccggcgucaccacgcccgugagcaccuacaugcucaccaacuccgagcugcugagccucaucaacgacaugcccaucaccaacgaccagaagaagcugaugagcaacaacgugcagaucguccggcagcaguccuacagcaucaugugcaucaucaaggaggaggugcuggccuacgugguccagcucccgcuguacggggugaucgacacgcccugcuggaagcugcacaccagcccccucugcaccaccaacacgaaggagggcuccaacaucugccugacccgcaccgaccggggcugguacugcgacaacgcgggguccgugagcuucuucccccaggccgagaccugcaagguccaguccaaccgcguguucugcgacacgaugaacagccugacccucccguccgaggucaaccugugcaacguggacaucuucaaccccaaguacgacugcaagaucaugaccagcaagaccgacguguccagcuccgucaucacgagccugggcgccaucguguccugcuacgggaagaccaagugcaccgccagcaacaagugccggggcaucaucaagaccuucuccaacggcugcgacuacgugagcaacaagggggucgacacgguguccgugggcaacacccucuacuacgucaacaagcaggaggggcagagccuguacgugaagggcgagcccaucaucaacuucuacgacccccugguguucccgagcgacgaguucgacgccuccaucagccaggucaacgagaagaucaaccagucccucgcguucauccgcaagagcgacgagcugcugcacaacgugaacgccgggaaguccaccaccaacaucaugaucaccacgaucaucaucgugaucaucgucauccuccugagccugaucgccgugggccuccugcuguacugcaaggcccgguccacccccgugacccugagcaaggaccagcucuccggcaucaacaacaucgccuucagcaacugaggacuaguguccaccugucccuccugggcugcuggauugucucguuuuccugccaaauaaacaggaucagcgcuuuacagaucuaaaaaaaaaaaaaaaaaaaaaaaaaaaaaaaaaaaaaaaaaaaaaaaaaaaaaaaaaaaaaaaaugcaucccccccccccccccccccccccccccccccaaaggcucuuuucagagccaccagaauu

SEQ ID NO: 7607 - RNA, 1900 nt, Artificial Sequence
  mRNA product Design b-3 comprising derived and/or modified sequence from HRSV(A2)__F_DSCav1_mut8 (opt2)
gggagagucccgcagucggcguccagcggcucugcuuguucgugugugugucguugcaggccuuauucaagcuuaccauggagcuccucauccucaaggccaacgccaucaccaccauccucaccgccgucaccuucugcuucgccuccggccagaacaucaccgaggaguucuaccaguccaccugcuccgccgucuccaagggcuaccucggcgcccuccgcaccggcugguacaccuccgucaucaccaucgagcucuccaacaucaaggagaucaagugcaacggcaccgacgccaaggucaagcucaucaagcaggagcucgacaaguacaagaacgccgucaccgaccuccagcuccucaugcaguccacccccgccaccggcuccggcuccgccaucgccuccggcgucgccgucugcaagguccuccaccucgagggcgaggucaacaagaucaaguccgcccuccucuccaccaacaaggccgucgucucccucuccggcugcggcgucuccguccucaccuucaagguccucgaccucaagaacuacaucgacaagcagcuccuccccauccucaacaagcaguccugcuccauccccaacaucgagaccgucaucgaguuccagcagaagaacaaccgccuccucgagaucacccgcgaguucuccgucaacgccggcgucaccacccccgucuccaccuacaugcucaccaacuccgagcuccucucccucaucaacgacaugcccaucaccaacgaccagaagaagcucauguccaacaacguccagaucguccgccagcaguccuacuccaucaugugcaucaucaaggaggagguccucgccuacgucguccagcucccccucuacggcgucaucgacacccccugcuggaagcuccacaccuccccccucugcaccaccaacaccaaggagggcuccaacaucugccucacccgcaccgaccgcggcugguacugcgacaacgccggcuccgucuccuucuucccccaggccgagaccugcaagguccaguccaaccgcgucuucugcgacaccaugaacucccucacccuccccuccgaggucaaccucugcaacgucgacaucuucaaccccaaguacgacugcaagaucaugaccuccaagaccgacgucuccuccuccgucaucaccucccucggcgccaucgucuccugcuacggcaagaccaagugcaccgccuccaacaagugccgcggcaucaucaagaccuucuccaacggcugcgacuacgucuccaacaagggcgucgacaccgucuccgucggcaacacccucuacuacgucaacaagcaggagggccagucccucuacgucaagggcgagcccaucaucaacuucuacgacccccucgucuuccccuccgacgaguucgacgccuccaucucccaggucaacgagaagaucaaccagucccucgccuucauccgcaaguccgacgagcuccuccacaacgucaacgccggcaaguccaccaccaacaucaugaucaccaccaucaucaucgucaucaucgucauccuccucucccucaucgccgucggccuccuccucuacugcaaggcccgcuccacccccgucacccucuccaaggaccagcucuccggcaucaacaacaucgccuucuccaacugaggacuaguguccaccugucccuccugggcugcuggauugucucguuuuccugccaaauaaacaggaucagcgcuuuacagaucuaaaaaaaaaaaaaaaaaaaaaaaaaaaaaaaaaaaaaaaaaaaaaaaaaaaaaaaaaaaaaaaaugcaucccccccccccccccccccccccccccccccaaaggcucuuuucagagccaccagaauu

SEQ ID NO: 7608 - RNA, 1900 nt, Artificial Sequence
  mRNA product Design b-3 comprising derived and/or modified sequence from HRSV(A2)__F_DSCav1_mut8 (opt3)
gggagagucccgcagucggcguccagcggcucugcuuguucgugugugugucguugcaggccuuauucaagcuuaccauggagcugcucauccuuaaggccaacgcuauuaccacaauacugacugcagugacguucugcuuugccagcggccagaauaucaccgaagaguucuaccaauccacauguucugcggucucaaaaggguauuugggagcuuuaagaacugguugguacaccaguguuauuacaaucgaacugagcaacauuaaggagaucaaaugcaauggcaccgacgccaaggugaaacuaauaaagcaggaacucgauaaguauaaaaacgcaguaacugaccugcagcuucugaugcaguccacacccgccaccgggucuggaucggcuaucgcaucaggcguggccgucuguaagguguugcaccucgagggugagguuaauaaaauuaagagcgcucugcugaguacgaacaaagccguggucucccucucugggugcggagugagcguauuaacuuuuaagguucuggaucuuaagaauuacaucgacaaacaauugcugccuauucuaaacaagcaguccuguucaaucccaaauauagaaaccgugauugaguuccagcagaaaaacaauaggcuccuggaaaucacacgggaguuuagugucaacgcgggcgugacuaccccggugagcacauauaugcuuaccaauucugagcuguugucccucauuaacgauaugcccaucacgaaugaccaaaagaaacugaugucaaacaacguccagaucguucgccagcagagcuacaguauuaugugcauaaucaaggaagagguguuagcauauguagugcaacugccucucuacggcgucauugauacuccauguuggaaacuucauacaucuccccugugcaccacuaauacaaaggaaggguccaacaucuguuugacccgaacggaccguggaugguacugcgauaaugccgguagcgugucguucuuuccucaggcugagaccuguaagguucagucuaacagaguguucugcgacacaaugaacucccuaacucugccaucagaagucaaucucugcaauguggauauauuuaaccccaaauaugacuguaagauuaugaccaguaaaacagauguaagcuccucuguuaucacuagccugggcgccaucgugucaugcuacgggaagaccaaauguacagcaaguaauaagugcaggggaauuaucaagaccuucuccaacggcugugacuaugucagcaauaaagguguggacacugucucuguggggaacacgcuuuacuauguuaauaagcaagagggacagucacuguacgugaaaggcgagccuauuauaaacuuuuaugauccauugguauucccgagugacgaauuugaugcuagcaucucccaggucaaugagaagauuaaccagucucucgccuucauccggaaaucggacgaacuguuacacaacgugaaugcgggcaagagcacaaccaacaucaugauuacuaccauaaucauuguuaucauugugauccugcuaucccucauagccgucgggcugcuuuuguacugcaaggcacgcucaacacccgugacccugaguaaagaucaacucucuggaaucaauaacauugcuuucagcaauugaggacuaguguccaccugucccuccugggcugcuggauugucucguuuuccugccaaauaaacaggaucagcgcuuuacagaucuaaaaaaaaaaaaaaaaaaaaaaaaaaaaaaaaaaaaaaaaaaaaaaaaaaaaaaaaaaaaaaaaugcaucccccccccccccccccccccccccccccccaaaggcucuuuucagagccaccagaauu

SEQ ID NO: 7609 - RNA, 1900 nt, Artificial Sequence
  mRNA product Design b-3 comprising derived and/or modified sequence from HRSV(A2)__F_DSCav1_mut8 (opt4)
gggagagucccgcagucggcguccagcggcucugcuuguucgugugugugucguugcaggccuuauucaagcuuaccauggagcugcugauccugaaggccaacgccaucaccaccauccugaccgccgugaccuucugcuucgccagcggccagaacaucaccgaggaguucuaccagagcaccugcagcgccgugagcaagggcuaccugggcgcccugagaaccggcugguacaccagcgugaucaccaucgagcugagcaacaucaaggagaucaagugcaacggcaccgacgccaaggugaagcugaucaagcaggagcuggacaaguacaagaacgccgugaccgaccugcagcugcugaugcagagcacccccgccaccggcagcggcagcgccaucgccagcggcguggccgugugcaaggugcugcaccuggagggcgaggugaacaagaucaagagcgcccugcugagcaccaacaaggccguggugagccugagcggcugcggcgugagcgugcugaccuucaaggugcuggaccugaagaacuacaucgacaagcagcugcugcccauccugaacaagcagagcugcagcauccccaacaucgagaccgugaucgaguuccagcagaagaacaacagacugcuggagaucaccagagaguucagcgugaacgccggcgugaccacccccgugagcaccuacaugcugaccaacagcgagcugcugagccugaucaacgacaugcccaucaccaacgaccagaagaagcugaugagcaacaacgugcagaucgugagacagcagagcuacagcaucaugugcaucaucaaggaggaggugcuggccuacguggugcagcugccccuguacggcgugaucgacacccccugcuggaagcugcacaccagcccccugugcaccaccaacaccaaggagggcagcaacaucugccugaccagaaccgacagaggcugguacugcgacaacgccggcagcgugagcuucuucccccaggccgagaccugcaaggugcagagcaacagaguguucugcgacaccaugaacagccugacccugcccagcgaggugaaccugugcaacguggacaucuucaaccccaaguacgacugcaagaucaugaccagcaagaccgacgugagcagcagcgugaucaccagccugggcgccaucgugagcugcuacggcaagaccaagugcaccgccagcaacaagugcagaggcaucaucaagaccuucagcaacggcugcgacuacgugagcaacaagggcguggacaccgugagcgugggcaacacccuguacuacgugaacaagcaggagggccagagccuguacgugaagggcgagcccaucaucaacuucuacgacccccugguguuccccagcgacgaguucgacgccagcaucagccaggugaacgagaagaucaaccagagccuggccuucaucagaaagagcgacgagcugcugcacaacgugaacgccggcaagagcaccaccaacaucaugaucaccaccaucaucaucgugaucaucgugauccugcugagccugaucgccgugggccugcugcuguacugcaaggccagaagcacccccgugacccugagcaaggaccagcugagcggcaucaacaacaucgccuucagcaacugaggacuaguguccaccugucccuccugggcugcuggauugucucguuuuccugccaaauaaacaggaucagcgcuuuacagaucuaaaaaaaaaaaaaaaaaaaaaaaaaaaaaaaaaaaaaaaaaaaaaaaaaaaaaaaaaaaaaaaaugcaucccccccccccccccccccccccccccccccaaaggcucuuuucagagccaccagaauu

SEQ ID NO: 7610 - RNA, 1900 nt, Artificial Sequence
  mRNA product Design b-3 comprising derived and/or modified sequence from HRSV(A2)__F_DSCav1_mut8 (opt5)
gggagagucccgcagucggcguccagcggcucugcuuguucgugugugugucguugcaggccuuauucaagcuuaccauggagcugcucauccugaaggccaacgcuauuaccacaauccuuacggccgugaccuucugcuuugcgagcggccagaauauuacagaagaguucuaccaauccaccuguucugcugucagcaaaggguaucugggagcccucagaacaggcugguacaccuccguuaucacaauugaacugucuaacaucaaggagaucaaaugcaaugggaccgacgccaaggugaaacuuauuaagcaggaacuggauaaguauaaaaacgcugugacggaccuccagcugcugaugcagagcacccccgccacaggauccggcucugcuaucgccagcggggucgcgguguguaagguucuccaccuggagggagaggugaauaaaauuaaguccgcccuucugagcaccaacaaagcugucgugucucucuccggcugcggcguuagcgugcugacauuuaagguccuugaucugaagaauuacaucgacaaacaacuccugccuauucugaacaagcagucuuguuccaucccgaauauugaaaccgugaucgaguuccagcagaaaaacaaucggcuccuggaaaucacgcgcgaguuuagcgugaacgccggggucacaacccccguuucuacauauaugcuuaccaauuccgagcugcucagccugauuaacgauaugccuaucaccaaugaccaaaagaaacuuauguccaacaacgugcagauugugagacagcagucuuacagcaucaugugcauuaucaaggaagagguccuggcuuaugugguucaacucccccuguacggagugaucgauacaccuuguuggaaacugcauacgagcccccucugcaccacaaauaccaaggaaggcagcaacauuugucugacacggaccgaccgcgggugguacugcgauaaugccggaucugucuccuucuuuccucaggcggagacguguaaggugcagagcaacagaguuuucugcgacacaaugaacucucuuacccugccgagcgaagugaaucucugcaaugucgauaucuuuaaccccaaauaugacuguaagauuaugaccuccaaaacagaugugucuagcuccgucaucaccagccugggcgccauugugucuugcuacgggaagacaaaauguacggcuuccaauaagugccggggaaucaucaagaccuucagcaacggcugugacuauguuucuaauaaaggcguggacacagucuccguggggaacacccuuuacuauguuaauaagcaagagggacagagccuguacgugaaaggcgagccuauuaucaacuuuuaugauccccucgucuucccuuccgacgaauuugaugccucuauuagccaggugaaugagaagaucaaccagucccuggcuuucauucgcaaaucugacgaacugcuccacaacgugaaugccgggaaguccacaaccaacaucaugauuacgaccaucaucauuguuaucauugucauccugcuuucccugauugccgugggacuccugcuguacugcaaggcuagaagcacacccgugacccuuucuaaagaucaacucuccggcaucaauaacaucgcguucagcaauugaggacuaguguccaccugucccuccugggcugcuggauugucucguuuuccugccaaauaaacaggaucagcgcuuuacagaucuaaaaaaaaaaaaaaaaaaaaaaaaaaaaaaaaaaaaaaaaaaaaaaaaaaaaaaaaaaaaaaaaugcaucccccccccccccccccccccccccccccccaaaggcucuuuucagagccaccagaauu

SEQ ID NO: 7611 - RNA, 1900 nt, Artificial Sequence
  mRNA product Design b-3 comprising derived and/or modified sequence from HRSV(A2)__F_DSCav1_mut8 (opt6)
gggagagucccgcagucggcguccagcggcucugcuuguucgugugugugucguugcaggccuuauucaagcuuaccauggaacuauuaauauuaaaagcaaacgcaaucacaacuauacuaacagcaguaacauucugcuuugccucaggucaaaacauaacagaggaauuuuaccaauccacaugcucugcuguaagcaaaggauaccucggagcauuaagaacuggaugguacaccucaguaauaacuauagaacuaucaaacauaaaagaaauaaaauguaauggcacagacgcaaaagugaaauuaaucaaacaagaacucgauaaauacaaaaaugccguaaccgaucuccaacuuuuaaugcaaagcacacccgcaacagguuccgggucagcaauagcaagcggaguugcaguaugcaaaguacuacacuuagaaggagaaguaaauaaaaucaaaucagccuuacuaucaacaaauaaagcaguuguaucacucucaggaugcggaguauccguacuaacauuuaaaguacuagaucuaaaaaacuacauagauaaacaacucuuaccaauacuaaauaaacaaucauguuccauacccaacauagaaaccguuaucgaauuucaacaaaaaaacaacagauuacuagaaaucacacgagaauuuucaguaaaugcuggagucacaacaccaguuaguacauacaugcucaccaauucagaacuacuaaguuuaauuaacgauaugccaauaacaaacgaccaaaaaaaacuaaugucaaauaacguacaaauaguaagacaacaaucauacucaaucaugugcauaauaaaagaagaaguacuagccuauguaguccaauuaccacucuacggcguaaucgacaccccaugcuggaaauuacacacaagcccauuaugcaccaccaacacaaaagaagguucaaacauuugcuuaaccagaaccgaucgaggaugguacugcgauaacgcaggaucugucuccuuuuucccacaagccgaaacaugcaaaguucaaucaaaccgaguuuucugugacacuaugaacucacucacacuuccaagcgaaguaaaccuaugcaacguagauauauuuaacccuaaauacgacugcaaaauaaugacaagcaaaacagacguuaguucaucaguaauuacaagucuaggcgcaauagugucaugcuacggaaaaacaaaaugcaccgcauccaauaaaugccgaggaaucauuaaaacauucucaaacggaugcgacuacgucagcaauaaaggaguagacacuguuucuguaggaaacacccuauacuauguaaacaaacaagaaggucaaucacuauacguaaagggagaaccaauuauaaauuuuuacgaccccuuaguauuuccaagugaugaauuugacgcaucuauaagucaaguuaacgaaaaaauuaaccaaucacuugcauuuauaagaaaaucagacgaacuacuccauaauguaaacgcagguaaaucaacaacaaacaucaugaucacaaccauaauaauaguaauaauuguaauauuacuaucacuaauagcaguaggauuacuacucuacugcaaagcuagaucuaccccggucacacucucaaaagaccaauuaucuggaauaaacaauauagcauucagcaacuaaggacuaguguccaccugucccuccugggcugcuggauugucucguuuuccugccaaauaaacaggaucagcgcuuuacagaucuaaaaaaaaaaaaaaaaaaaaaaaaaaaaaaaaaaaaaaaaaaaaaaaaaaaaaaaaaaaaaaaaugcaucccccccccccccccccccccccccccccccaaaggcucuuuucagagccaccagaauu

SEQ ID NO: 7612 - RNA, 1900 nt, Artificial Sequence
  mRNA product Design b-3 comprising derived and/or modified sequence from HRSV(A2)__F_DSCav1_mut8 (opt11)
gggagagucccgcagucggcguccagcggcucugcuuguucgugugugugucguugcaggccuuauucaagcuuaccauggaacuccucauccuuaaagccaacgccauaaccaccauccucaccgccgucaccuucugcuucgcuucuggccaaaacauaaccgaagaguucuaccaauccacgugcucugccgugucaaaaggcuaccucggagcccuccgcacagggugguacacuuccgucaucaccaucgaacucucuaacaucaaagaaaucaagugcaacggcacagacgcgaaagucaagcucaucaaacaagaacuagacaaauacaaaaacgccguaacagaccuccaacuccuaaugcaguccacaccagccacaggcuccggcagcgccaucgccuccggcgucgcugucugcaaaguccuacaccucgaaggcgaagucaacaaaaucaagucagcccuccuuagcaccaacaaagcagucgucucuuuaagcgggugcggagucucuguccuaaccuuuaaaguacucgaccucaaaaacuacaucgacaaacaacuacuaccaauacuaaacaaacagagcugcuccauucccaacaucgaaaccguuaucgaguuccaacaaaagaacaaccgccuccucgaaaucacccgcgaguucuccgucaacgcaggcgucaccaccccagucuccaccuauaugcuaaccaacagcgaacuccucagccucaucaaugacaugccaaucaccaacgaccaaaagaaacucauguccaacaacguacagauaguccgccagcaguccuacagcaucaugugcaucaucaaagaagaagugcucgccuacgugguacaacucccucucuacggagucauugauacacccugcuggaaacuccacacaagcccccucugcacuacaaacaccaaagaaggcucuaacauaugccucacccgcacagaccgugguugguacugcgacaacgccggcuccguauccuucuuuccacaagcugaaaccugcaaaguucaaucaaaccgagucuucugcgacaccaugaacucccucacauugcccagcgaagucaaccucugcaacgucgacaucuucaaccccaaguacgacugcaaaaucaugaccuccaaaaccgacgucagcuccagcgugaucacaagccuaggcgcgaucgucagcugcuacggcaaaaccaaaugcacagccuccaacaaaugccgcggaaucauaaaaacauucaguaacggcugcgacuacguguccaauaaaggagucgacaccguauccgucggaaacacccucuacuacgucaacaaacaagaaggacaaucccucuaugucaaaggcgaacccauuaucaacuucuacgacccccuaguuuuccccuccgacgaguucgacgcaagcauuucccaagucaacgaaaagaucaaucaaucccucgccuucauacgcaaaagcgacgaacuacuacacaacguaaacgccggcaaaagcaccaccaacaucaugaucacaacaaucaucaucgucaucaucgucauccuacucucacucaucgccguuggccuacuacucuacugcaaagcccgcuccacacccgucacccucucaaaagaccaacucuccggcaucaacaacaucgcauucagcaacugaggacuaguguccaccugucccuccugggcugcuggauugucucguuuuccugccaaauaaacaggaucagcgcuuuacagaucuaaaaaaaaaaaaaaaaaaaaaaaaaaaaaaaaaaaaaaaaaaaaaaaaaaaaaaaaaaaaaaaaugcaucccccccccccccccccccccccccccccccaaaggcucuuuucagagccaccagaauu

SEQ ID NO: 7613 - RNA, 1951 nt, Artificial Sequence
  mRNA product Design b-4 comprising derived and/or modified sequence from HRSV(A2)__F_DSCav1_mut8 (opt1)
gggagagucccgcagucggcguccagcggcucugcuuguucgugugugugucguugcaggccuuauucaagcuuaccauggagcugcucauccugaaggccaacgccaucaccaccauccugacggcggugaccuucugcuucgccagcggccagaacaucaccgaggaguucuaccaguccacgugcagcgccgucuccaagggguaccucggcgcccugcggaccggcugguacaccuccgugaucaccaucgagcugagcaacaucaaggagaucaagugcaacgggaccgacgccaaggugaagcucaucaagcaggagcuggacaaguacaagaacgcggucacggaccugcagcuccugaugcaguccaccccggcaaccggcuccggcuccgccaucgcgagcggcgucgccgugugcaaggugcugcaccucgagggggaggucaacaagaucaagagcgcccugcuguccaccaacaaggccguggugagccucuccggcugcggcgucagcgugcugaccuucaaggugcuggaccucaagaacuacaucgacaagcagcugcugcccauccugaacaagcagagcugcuccauccccaacaucgagacggugaucgaguuccagcagaagaacaaccggcuccuggagaucacccgcgaguucagcgugaacgccggggucaccacccccguguccacguacaugcugaccaacagcgagcuccugucccugaucaacgacaugccgaucaccaacgaccagaagaagcucaugagcaacaacgugcagaucguccggcagcaguccuacagcaucaugugcaucaucaaggaggaggugcuggcguacgugguccagcugccccucuacggcgugaucgacacccccugcuggaagcugcacacgagcccccugugcaccaccaacaccaaggagggguccaacaucugccucacgcgcaccgaccggggcugguacugcgacaacgccggcagcgucuccuucuucccgcaggccgagaccugcaaggugcagagcaaccgcguguucugcgacaccaugaacucccugacgcugcccagcgagguaaaccucugcaacgucgacaucuucaaccccaaguacgacugcaagaucaugaccuccaagaccgacgugagcuccagcgugaucaccucccugggggccaucgucagcugcuacggcaagacgaagugcaccgccagcaacaagugccgggggaucaucaagaccuucuccaacggcugcgacuacgugagcaacaagggcguggacaccguguccgucgggaacacccuguacuacgugaacaagcaggagggccagagccucuacgugaagggggagcccaucaucaacuucuacgacccgcuggucuuccccuccgacgaguucgacgcgagcaucucccaggugaacgagaagaucaaccagagccuggccuucauccgcaaguccgacgagcugcuccacaacgugaacgccggcaagagcacgaccaacaucaugaucaccaccaucaucaucgucaucaucgugauccugcugucccucaucgccguggggcugcugcucuacugcaaggcccggagcacgcccgucacccuguccaaggaccagcugagcggcaucaacaacaucgcguucuccaacugaggacuaguaauaaggaaacuguaugaaugucugugggcaggaagugaagagauccuucuguaaagguuuuuggaauuaugucugcugaauaauaaacuuuuuugaaauaauaaaucugguagaaaaaugagaucuaaaaaaaaaaaaaaaaaaaaaaaaaaaaaaaaaaaaaaaaaaaaaaaaaaaaaaaaaaaaaaaaugcaucccccccccccccccccccccccccccccccaaaggcucuuuucagagccaccagaauu

SEQ ID NO: 7614 - RNA, 1951 nt, Artificial Sequence
  mRNA product Design b-4 comprising derived and/or modified sequence from HRSV(A2)__F_DSCav1_mut8 (opt1)
gggagagucccgcagucggcguccagcggcucugcuuguucgugugugugucguugcaggccuuauucaagcuuaccauggagcugcucauccugaaggccaacgccaucaccaccauccugacggcggugaccuucugcuucgccagcggccagaacaucaccgaggaguucuaccaguccacgugcagcgccgucuccaagggguaccucggcgcccugcgcaccgggugguacaccagcgugaucaccaucgagcuguccaacaucaaggagaucaagugcaacggcaccgacgccaaggugaagcucaucaagcaggagcuggacaaguacaagaacgcggucacggaccugcagcuccugaugcagagcacccccgccaccggguccggcagcgccaucgccuccggcguggcggugugcaagguccugcaccucgagggggaggugaacaagaucaagagcgcccugcuguccaccaacaaggccguggucagccucuccggcugcggggugagcgugcugacguucaagguccuggaccucaagaacuacaucgacaagcagcugcugccgauccucaacaagcaguccugcagcauccccaacaucgagaccgugaucgaguuccagcagaagaacaaccggcugcuggagaucacccgcgaguucuccgugaacgccggcgucaccacgcccgugagcaccuacaugcucaccaacuccgagcugcugagccucaucaacgacaugcccaucaccaacgaccagaagaagcugaugagcaacaacgugcagaucguccggcagcaguccuacagcaucaugugcaucaucaaggaggaggugcuggccuacgugguccagcucccgcuguacggggugaucgacacgcccugcuggaagcugcacaccagcccccucugcaccaccaacacgaaggagggcuccaacaucugccugacccgcaccgaccggggcugguacugcgacaacgcgggguccgugagcuucuucccccaggccgagaccugcaagguccaguccaaccgcguguucugcgacacgaugaacagccugacccucccguccgaggucaaccugugcaacguggacaucuucaaccccaaguacgacugcaagaucaugaccagcaagaccgacguguccagcuccgucaucacgagccugggcgccaucguguccugcuacgggaagaccaagugcaccgccagcaacaagugccggggcaucaucaagaccuucuccaacggcugcgacuacgugagcaacaagggggucgacacgguguccgugggcaacacccucuacuacgucaacaagcaggaggggcagagccuguacgugaagggcgagcccaucaucaacuucuacgacccccugguguucccgagcgacgaguucgacgccuccaucagccaggucaacgagaagaucaaccagucccucgcguucauccgcaagagcgacgagcugcugcacaacgugaacgccgggaaguccaccaccaacaucaugaucaccacgaucaucaucgugaucaucgucauccuccugagccugaucgccgugggccuccugcuguacugcaaggcccgguccacccccgugacccugagcaaggaccagcucuccggcaucaacaacaucgccuucagcaacugaggacuaguaauaaggaaacuguaugaaugucugugggcaggaagugaagagauccuucuguaaagguuuuuggaauuaugucugcugaauaauaaacuuuuuugaaauaauaaaucugguagaaaaaugagaucuaaaaaaaaaaaaaaaaaaaaaaaaaaaaaaaaaaaaaaaaaaaaaaaaaaaaaaaaaaaaaaaaugcaucccccccccccccccccccccccccccccccaaaggcucuuuucagagccaccagaauu

SEQ ID NO: 7615 - RNA, 1951 nt, Artificial Sequence
  mRNA product Design b-4 comprising derived and/or modified sequence from HRSV(A2)__F_DSCav1_mut8 (opt2)
gggagagucccgcagucggcguccagcggcucugcuuguucgugugugugucguugcaggccuuauucaagcuuaccauggagcuccucauccucaaggccaacgccaucaccaccauccucaccgccgucaccuucugcuucgccuccggccagaacaucaccgaggaguucuaccaguccaccugcuccgccgucuccaagggcuaccucggcgcccuccgcaccggcugguacaccuccgucaucaccaucgagcucuccaacaucaaggagaucaagugcaacggcaccgacgccaaggucaagcucaucaagcaggagcucgacaaguacaagaacgccgucaccgaccuccagcuccucaugcaguccacccccgccaccggcuccggcuccgccaucgccuccggcgucgccgucugcaagguccuccaccucgagggcgaggucaacaagaucaaguccgcccuccucuccaccaacaaggccgucgucucccucuccggcugcggcgucuccguccucaccuucaagguccucgaccucaagaacuacaucgacaagcagcuccuccccauccucaacaagcaguccugcuccauccccaacaucgagaccgucaucgaguuccagcagaagaacaaccgccuccucgagaucacccgcgaguucuccgucaacgccggcgucaccacccccgucuccaccuacaugcucaccaacuccgagcuccucucccucaucaacgacaugcccaucaccaacgaccagaagaagcucauguccaacaacguccagaucguccgccagcaguccuacuccaucaugugcaucaucaaggaggagguccucgccuacgucguccagcucccccucuacggcgucaucgacacccccugcuggaagcuccacaccuccccccucugcaccaccaacaccaaggagggcuccaacaucugccucacccgcaccgaccgcggcugguacugcgacaacgccggcuccgucuccuucuucccccaggccgagaccugcaagguccaguccaaccgcgucuucugcgacaccaugaacucccucacccuccccuccgaggucaaccucugcaacgucgacaucuucaaccccaaguacgacugcaagaucaugaccuccaagaccgacgucuccuccuccgucaucaccucccucggcgccaucgucuccugcuacggcaagaccaagugcaccgccuccaacaagugccgcggcaucaucaagaccuucuccaacggcugcgacuacgucuccaacaagggcgucgacaccgucuccgucggcaacacccucuacuacgucaacaagcaggagggccagucccucuacgucaagggcgagcccaucaucaacuucuacgacccccucgucuuccccuccgacgaguucgacgccuccaucucccaggucaacgagaagaucaaccagucccucgccuucauccgcaaguccgacgagcuccuccacaacgucaacgccggcaaguccaccaccaacaucaugaucaccaccaucaucaucgucaucaucgucauccuccucucccucaucgccgucggccuccuccucuacugcaaggcccgcuccacccccgucacccucuccaaggaccagcucuccggcaucaacaacaucgccuucuccaacugaggacuaguaauaaggaaacuguaugaaugucugugggcaggaagugaagagauccuucuguaaagguuuuuggaauuaugucugcugaauaauaaacuuuuuugaaauaauaaaucugguagaaaaaugagaucuaaaaaaaaaaaaaaaaaaaaaaaaaaaaaaaaaaaaaaaaaaaaaaaaaaaaaaaaaaaaaaaaugcaucccccccccccccccccccccccccccccccaaaggcucuuuucagagccaccagaauu

SEQ ID NO: 7616 - RNA, 1951 nt, Artificial Sequence
  mRNA product Design b-4 comprising derived and/or modified sequence from HRSV(A2)__F_DSCav1_mut8 (opt3)
gggagagucccgcagucggcguccagcggcucugcuuguucgugugugugucguugcaggccuuauucaagcuuaccauggagcugcucauccuuaaggccaacgcuauuaccacaauacugacugcagugacguucugcuuugccagcggccagaauaucaccgaagaguucuaccaauccacauguucugcggucucaaaaggguauuugggagcuuuaagaacugguugguacaccaguguuauuacaaucgaacugagcaacauuaaggagaucaaaugcaauggcaccgacgccaaggugaaacuaauaaagcaggaacucgauaaguauaaaaacgcaguaacugaccugcagcuucugaugcaguccacacccgccaccgggucuggaucggcuaucgcaucaggcguggccgucuguaagguguugcaccucgagggugagguuaauaaaauuaagagcgcucugcugaguacgaacaaagccguggucucccucucugggugcggagugagcguauuaacuuuuaagguucuggaucuuaagaauuacaucgacaaacaauugcugccuauucuaaacaagcaguccuguucaaucccaaauauagaaaccgugauugaguuccagcagaaaaacaauaggcuccuggaaaucacacgggaguuuagugucaacgcgggcgugacuaccccggugagcacauauaugcuuaccaauucugagcuguugucccucauuaacgauaugcccaucacgaaugaccaaaagaaacugaugucaaacaacguccagaucguucgccagcagagcuacaguauuaugugcauaaucaaggaagagguguuagcauauguagugcaacugccucucuacggcgucauugauacuccauguuggaaacuucauacaucuccccugugcaccacuaauacaaaggaaggguccaacaucuguuugacccgaacggaccguggaugguacugcgauaaugccgguagcgugucguucuuuccucaggcugagaccuguaagguucagucuaacagaguguucugcgacacaaugaacucccuaacucugccaucagaagucaaucucugcaauguggauauauuuaaccccaaauaugacuguaagauuaugaccaguaaaacagauguaagcuccucuguuaucacuagccugggcgccaucgugucaugcuacgggaagaccaaauguacagcaaguaauaagugcaggggaauuaucaagaccuucuccaacggcugugacuaugucagcaauaaagguguggacacugucucuguggggaacacgcuuuacuauguuaauaagcaagagggacagucacuguacgugaaaggcgagccuauuauaaacuuuuaugauccauugguauucccgagugacgaauuugaugcuagcaucucccaggucaaugagaagauuaaccagucucucgccuucauccggaaaucggacgaacuguuacacaacgugaaugcgggcaagagcacaaccaacaucaugauuacuaccauaaucauuguuaucauugugauccugcuaucccucauagccgucgggcugcuuuuguacugcaaggcacgcucaacacccgugacccugaguaaagaucaacucucuggaaucaauaacauugcuuucagcaauugaggacuaguaauaaggaaacuguaugaaugucugugggcaggaagugaagagauccuucuguaaagguuuuuggaauuaugucugcugaauaauaaacuuuuuugaaauaauaaaucugguagaaaaaugagaucuaaaaaaaaaaaaaaaaaaaaaaaaaaaaaaaaaaaaaaaaaaaaaaaaaaaaaaaaaaaaaaaaugcaucccccccccccccccccccccccccccccccaaaggcucuuuucagagccaccagaauu

SEQ ID NO: 7617 - RNA, 1951 nt, Artificial Sequence
  mRNA product Design b-4 comprising derived and/or modified sequence from HRSV(A2)__F_DSCav1_mut8 (opt4)
gggagagucccgcagucggcguccagcggcucugcuuguucgugugugugucguugcaggccuuauucaagcuuaccauggagcugcugauccugaaggccaacgccaucaccaccauccugaccgccgugaccuucugcuucgccagcggccagaacaucaccgaggaguucuaccagagcaccugcagcgccgugagcaagggcuaccugggcgcccugagaaccggcugguacaccagcgugaucaccaucgagcugagcaacaucaaggagaucaagugcaacggcaccgacgccaaggugaagcugaucaagcaggagcuggacaaguacaagaacgccgugaccgaccugcagcugcugaugcagagcacccccgccaccggcagcggcagcgccaucgccagcggcguggccgugugcaaggugcugcaccuggagggcgaggugaacaagaucaagagcgcccugcugagcaccaacaaggccguggugagccugagcggcugcggcgugagcgugcugaccuucaaggugcuggaccugaagaacuacaucgacaagcagcugcugcccauccugaacaagcagagcugcagcauccccaacaucgagaccgugaucgaguuccagcagaagaacaacagacugcuggagaucaccagagaguucagcgugaacgccggcgugaccacccccgugagcaccuacaugcugaccaacagcgagcugcugagccugaucaacgacaugcccaucaccaacgaccagaagaagcugaugagcaacaacgugcagaucgugagacagcagagcuacagcaucaugugcaucaucaaggaggaggugcuggccuacguggugcagcugccccuguacggcgugaucgacacccccugcuggaagcugcacaccagcccccugugcaccaccaacaccaaggagggcagcaacaucugccugaccagaaccgacagaggcugguacugcgacaacgccggcagcgugagcuucuucccccaggccgagaccugcaaggugcagagcaacagaguguucugcgacaccaugaacagccugacccugcccagcgaggugaaccugugcaacguggacaucuucaaccccaaguacgacugcaagaucaugaccagcaagaccgacgugagcagcagcgugaucaccagccugggcgccaucgugagcugcuacggcaagaccaagugcaccgccagcaacaagugcagaggcaucaucaagaccuucagcaacggcugcgacuacgugagcaacaagggcguggacaccgugagcgugggcaacacccuguacuacgugaacaagcaggagggccagagccuguacgugaagggcgagcccaucaucaacuucuacgacccccugguguuccccagcgacgaguucgacgccagcaucagccaggugaacgagaagaucaaccagagccuggccuucaucagaaagagcgacgagcugcugcacaacgugaacgccggcaagagcaccaccaacaucaugaucaccaccaucaucaucgugaucaucgugauccugcugagccugaucgccgugggccugcugcuguacugcaaggccagaagcacccccgugacccugagcaaggaccagcugagcggcaucaacaacaucgccuucagcaacugaggacuaguaauaaggaaacuguaugaaugucugugggcaggaagugaagagauccuucuguaaagguuuuuggaauuaugucugcugaauaauaaacuuuuuugaaauaauaaaucugguagaaaaaugagaucuaaaaaaaaaaaaaaaaaaaaaaaaaaaaaaaaaaaaaaaaaaaaaaaaaaaaaaaaaaaaaaaaugcaucccccccccccccccccccccccccccccccaaaggcucuuuucagagccaccagaauu

SEQ ID NO: 7618 - RNA, 1951 nt, Artificial Sequence
  mRNA product Design b-4 comprising derived and/or modified sequence from HRSV(A2)__F_DSCav1_mut8 (opt5)
gggagagucccgcagucggcguccagcggcucugcuuguucgugugugugucguugcaggccuuauucaagcuuaccauggagcugcucauccugaaggccaacgcuauuaccacaauccuuacggccgugaccuucugcuuugcgagcggccagaauauuacagaagaguucuaccaauccaccuguucugcugucagcaaaggguaucugggagcccucagaacaggcugguacaccuccguuaucacaauugaacugucuaacaucaaggagaucaaaugcaaugggaccgacgccaaggugaaacuuauuaagcaggaacuggauaaguauaaaaacgcugugacggaccuccagcugcugaugcagagcacccccgccacaggauccggcucugcuaucgccagcggggucgcgguguguaagguucuccaccuggagggagaggugaauaaaauuaaguccgcccuucugagcaccaacaaagcugucgugucucucuccggcugcggcguuagcgugcugacauuuaagguccuugaucugaagaauuacaucgacaaacaacuccugccuauucugaacaagcagucuuguuccaucccgaauauugaaaccgugaucgaguuccagcagaaaaacaaucggcuccuggaaaucacgcgcgaguuuagcgugaacgccggggucacaacccccguuucuacauauaugcuuaccaauuccgagcugcucagccugauuaacgauaugccuaucaccaaugaccaaaagaaacuuauguccaacaacgugcagauugugagacagcagucuuacagcaucaugugcauuaucaaggaagagguccuggcuuaugugguucaacucccccuguacggagugaucgauacaccuuguuggaaacugcauacgagcccccucugcaccacaaauaccaaggaaggcagcaacauuugucugacacggaccgaccgcgggugguacugcgauaaugccggaucugucuccuucuuuccucaggcggagacguguaaggugcagagcaacagaguuuucugcgacacaaugaacucucuuacccugccgagcgaagugaaucucugcaaugucgauaucuuuaaccccaaauaugacuguaagauuaugaccuccaaaacagaugugucuagcuccgucaucaccagccugggcgccauugugucuugcuacgggaagacaaaauguacggcuuccaauaagugccggggaaucaucaagaccuucagcaacggcugugacuauguuucuaauaaaggcguggacacagucuccguggggaacacccuuuacuauguuaauaagcaagagggacagagccuguacgugaaaggcgagccuauuaucaacuuuuaugauccccucgucuucccuuccgacgaauuugaugccucuauuagccaggugaaugagaagaucaaccagucccuggcuuucauucgcaaaucugacgaacugcuccacaacgugaaugccgggaaguccacaaccaacaucaugauuacgaccaucaucauuguuaucauugucauccugcuuucccugauugccgugggacuccugcuguacugcaaggcuagaagcacacccgugacccuuucuaaagaucaacucuccggcaucaauaacaucgcguucagcaauugaggacuaguaauaaggaaacuguaugaaugucugugggcaggaagugaagagauccuucuguaaagguuuuuggaauuaugucugcugaauaauaaacuuuuuugaaauaauaaaucugguagaaaaaugagaucuaaaaaaaaaaaaaaaaaaaaaaaaaaaaaaaaaaaaaaaaaaaaaaaaaaaaaaaaaaaaaaaaugcaucccccccccccccccccccccccccccccccaaaggcucuuuucagagccaccagaauu

SEQ ID NO: 7619 - RNA, 1951 nt, Artificial Sequence
  mRNA product Design b-4 comprising derived and/or modified sequence from HRSV(A2)__F_DSCav1_mut8 (opt6)
gggagagucccgcagucggcguccagcggcucugcuuguucgugugugugucguugcaggccuuauucaagcuuaccauggaacuauuaauauuaaaagcaaacgcaaucacaacuauacuaacagcaguaacauucugcuuugccucaggucaaaacauaacagaggaauuuuaccaauccacaugcucugcuguaagcaaaggauaccucggagcauuaagaacuggaugguacaccucaguaauaacuauagaacuaucaaacauaaaagaaauaaaauguaauggcacagacgcaaaagugaaauuaaucaaacaagaacucgauaaauacaaaaaugccguaaccgaucuccaacuuuuaaugcaaagcacacccgcaacagguuccgggucagcaauagcaagcggaguugcaguaugcaaaguacuacacuuagaaggagaaguaaauaaaaucaaaucagccuuacuaucaacaaauaaagcaguuguaucacucucaggaugcggaguauccguacuaacauuuaaaguacuagaucuaaaaaacuacauagauaaacaacucuuaccaauacuaaauaaacaaucauguuccauacccaacauagaaaccguuaucgaauuucaacaaaaaaacaacagauuacuagaaaucacacgagaauuuucaguaaaugcuggagucacaacaccaguuaguacauacaugcucaccaauucagaacuacuaaguuuaauuaacgauaugccaauaacaaacgaccaaaaaaaacuaaugucaaauaacguacaaauaguaagacaacaaucauacucaaucaugugcauaauaaaagaagaaguacuagccuauguaguccaauuaccacucuacggcguaaucgacaccccaugcuggaaauuacacacaagcccauuaugcaccaccaacacaaaagaagguucaaacauuugcuuaaccagaaccgaucgaggaugguacugcgauaacgcaggaucugucuccuuuuucccacaagccgaaacaugcaaaguucaaucaaaccgaguuuucugugacacuaugaacucacucacacuuccaagcgaaguaaaccuaugcaacguagauauauuuaacccuaaauacgacugcaaaauaaugacaagcaaaacagacguuaguucaucaguaauuacaagucuaggcgcaauagugucaugcuacggaaaaacaaaaugcaccgcauccaauaaaugccgaggaaucauuaaaacauucucaaacggaugcgacuacgucagcaauaaaggaguagacacuguuucuguaggaaacacccuauacuauguaaacaaacaagaaggucaaucacuauacguaaagggagaaccaauuauaaauuuuuacgaccccuuaguauuuccaagugaugaauuugacgcaucuauaagucaaguuaacgaaaaaauuaaccaaucacuugcauuuauaagaaaaucagacgaacuacuccauaauguaaacgcagguaaaucaacaacaaacaucaugaucacaaccauaauaauaguaauaauuguaauauuacuaucacuaauagcaguaggauuacuacucuacugcaaagcuagaucuaccccggucacacucucaaaagaccaauuaucuggaauaaacaauauagcauucagcaacuaaggacuaguaauaaggaaacuguaugaaugucugugggcaggaagugaagagauccuucuguaaagguuuuuggaauuaugucugcugaauaauaaacuuuuuugaaauaauaaaucugguagaaaaaugagaucuaaaaaaaaaaaaaaaaaaaaaaaaaaaaaaaaaaaaaaaaaaaaaaaaaaaaaaaaaaaaaaaaugcaucccccccccccccccccccccccccccccccaaaggcucuuuucagagccaccagaauu

SEQ ID NO: 7620 - RNA, 1951 nt, Artificial Sequence
  mRNA product Design b-4 comprising derived and/or modified sequence from HRSV(A2)__F_DSCav1_mut8 (opt11)
gggagagucccgcagucggcguccagcggcucugcuuguucgugugugugucguugcaggccuuauucaagcuuaccauggaacuccucauccuuaaagccaacgccauaaccaccauccucaccgccgucaccuucugcuucgcuucuggccaaaacauaaccgaagaguucuaccaauccacgugcucugccgugucaaaaggcuaccucggagcccuccgcacagggugguacacuuccgucaucaccaucgaacucucuaacaucaaagaaaucaagugcaacggcacagacgcgaaagucaagcucaucaaacaagaacuagacaaauacaaaaacgccguaacagaccuccaacuccuaaugcaguccacaccagccacaggcuccggcagcgccaucgccuccggcgucgcugucugcaaaguccuacaccucgaaggcgaagucaacaaaaucaagucagcccuccuuagcaccaacaaagcagucgucucuuuaagcgggugcggagucucuguccuaaccuuuaaaguacucgaccucaaaaacuacaucgacaaacaacuacuaccaauacuaaacaaacagagcugcuccauucccaacaucgaaaccguuaucgaguuccaacaaaagaacaaccgccuccucgaaaucacccgcgaguucuccgucaacgcaggcgucaccaccccagucuccaccuauaugcuaaccaacagcgaacuccucagccucaucaaugacaugccaaucaccaacgaccaaaagaaacucauguccaacaacguacagauaguccgccagcaguccuacagcaucaugugcaucaucaaagaagaagugcucgccuacgugguacaacucccucucuacggagucauugauacacccugcuggaaacuccacacaagcccccucugcacuacaaacaccaaagaaggcucuaacauaugccucacccgcacagaccgugguugguacugcgacaacgccggcuccguauccuucuuuccacaagcugaaaccugcaaaguucaaucaaaccgagucuucugcgacaccaugaacucccucacauugcccagcgaagucaaccucugcaacgucgacaucuucaaccccaaguacgacugcaaaaucaugaccuccaaaaccgacgucagcuccagcgugaucacaagccuaggcgcgaucgucagcugcuacggcaaaaccaaaugcacagccuccaacaaaugccgcggaaucauaaaaacauucaguaacggcugcgacuacguguccaauaaaggagucgacaccguauccgucggaaacacccucuacuacgucaacaaacaagaaggacaaucccucuaugucaaaggcgaacccauuaucaacuucuacgacccccuaguuuuccccuccgacgaguucgacgcaagcauuucccaagucaacgaaaagaucaaucaaucccucgccuucauacgcaaaagcgacgaacuacuacacaacguaaacgccggcaaaagcaccaccaacaucaugaucacaacaaucaucaucgucaucaucgucauccuacucucacucaucgccguuggccuacuacucuacugcaaagcccgcuccacacccgucacccucucaaaagaccaacucuccggcaucaacaacaucgcauucagcaacugaggacuaguaauaaggaaacuguaugaaugucugugggcaggaagugaagagauccuucuguaaagguuuuuggaauuaugucugcugaauaauaaacuuuuuugaaauaauaaaucugguagaaaaaugagaucuaaaaaaaaaaaaaaaaaaaaaaaaaaaaaaaaaaaaaaaaaaaaaaaaaaaaaaaaaaaaaaaaugcaucccccccccccccccccccccccccccccccaaaggcucuuuucagagccaccagaauu

SEQ ID NO: 7621 - RNA, 2013 nt, Artificial Sequence
  mRNA product Design b-5 comprising derived and/or modified sequence from HRSV(A2)__F_DSCav1_mut8 (opt1)
gggagacuccugucgggcggaaguaggaggaguagaguuuaaaaacaguacucuuuuuccgguucgggacguaguugaagcaacgacaagccggauaaccgcucuugagacaggaagcuuaccauggagcugcucauccugaaggccaacgccaucaccaccauccugacggcggugaccuucugcuucgccagcggccagaacaucaccgaggaguucuaccaguccacgugcagcgccgucuccaagggguaccucggcgcccugcggaccggcugguacaccuccgugaucaccaucgagcugagcaacaucaaggagaucaagugcaacgggaccgacgccaaggugaagcucaucaagcaggagcuggacaaguacaagaacgcggucacggaccugcagcuccugaugcaguccaccccggcaaccggcuccggcuccgccaucgcgagcggcgucgccgugugcaaggugcugcaccucgagggggaggucaacaagaucaagagcgcccugcuguccaccaacaaggccguggugagccucuccggcugcggcgucagcgugcugaccuucaaggugcuggaccucaagaacuacaucgacaagcagcugcugcccauccugaacaagcagagcugcuccauccccaacaucgagacggugaucgaguuccagcagaagaacaaccggcuccuggagaucacccgcgaguucagcgugaacgccggggucaccacccccguguccacguacaugcugaccaacagcgagcuccugucccugaucaacgacaugccgaucaccaacgaccagaagaagcucaugagcaacaacgugcagaucguccggcagcaguccuacagcaucaugugcaucaucaaggaggaggugcuggcguacgugguccagcugccccucuacggcgugaucgacacccccugcuggaagcugcacacgagcccccugugcaccaccaacaccaaggagggguccaacaucugccucacgcgcaccgaccggggcugguacugcgacaacgccggcagcgucuccuucuucccgcaggccgagaccugcaaggugcagagcaaccgcguguucugcgacaccaugaacucccugacgcugcccagcgagguaaaccucugcaacgucgacaucuucaaccccaaguacgacugcaagaucaugaccuccaagaccgacgugagcuccagcgugaucaccucccugggggccaucgucagcugcuacggcaagacgaagugcaccgccagcaacaagugccgggggaucaucaagaccuucuccaacggcugcgacuacgugagcaacaagggcguggacaccguguccgucgggaacacccuguacuacgugaacaagcaggagggccagagccucuacgugaagggggagcccaucaucaacuucuacgacccgcuggucuuccccuccgacgaguucgacgcgagcaucucccaggugaacgagaagaucaaccagagccuggccuucauccgcaaguccgacgagcugcuccacaacgugaacgccggcaagagcacgaccaacaucaugaucaccaccaucaucaucgucaucaucgugauccugcugucccucaucgccguggggcugcugcucuacugcaaggcccggagcacgcccgucacccuguccaaggaccagcugagcggcaucaacaacaucgcguucuccaacugaggacuaguacuggcugcaucucccuuuccucuguccuccauccuucucccaggauggugaagggggaccugguacccagugauccccaccccaggauccuaaaucaugacuuaccugcuaauaaaaacucauuggaaaagugagaagaucuaaaaaaaaaaaaaaaaaaaaaaaaaaaaaaaaaaaaaaaaaaaaaaaaaaaaaaaaaaaaaaaaugcaucccccccccccccccccccccccccccccccaaaggcucuuuucagagccaccagaauu

SEQ ID NO: 7622 - RNA, 2013 nt, Artificial Sequence
  mRNA product Design b-5 comprising derived and/or modified sequence from HRSV(A2)__F_DSCav1_mut8 (opt1)
gggagacuccugucgggcggaaguaggaggaguagaguuuaaaaacaguacucuuuuuccgguucgggacguaguugaagcaacgacaagccggauaaccgcucuugagacaggaagcuuaccauggagcugcucauccugaaggccaacgccaucaccaccauccugacggcggugaccuucugcuucgccagcggccagaacaucaccgaggaguucuaccaguccacgugcagcgccgucuccaagggguaccucggcgcccugcgcaccgggugguacaccagcgugaucaccaucgagcuguccaacaucaaggagaucaagugcaacggcaccgacgccaaggugaagcucaucaagcaggagcuggacaaguacaagaacgcggucacggaccugcagcuccugaugcagagcacccccgccaccggguccggcagcgccaucgccuccggcguggcggugugcaagguccugcaccucgagggggaggugaacaagaucaagagcgcccugcuguccaccaacaaggccguggucagccucuccggcugcggggugagcgugcugacguucaagguccuggaccucaagaacuacaucgacaagcagcugcugccgauccucaacaagcaguccugcagcauccccaacaucgagaccgugaucgaguuccagcagaagaacaaccggcugcuggagaucacccgcgaguucuccgugaacgccggcgucaccacgcccgugagcaccuacaugcucaccaacuccgagcugcugagccucaucaacgacaugcccaucaccaacgaccagaagaagcugaugagcaacaacgugcagaucguccggcagcaguccuacagcaucaugugcaucaucaaggaggaggugcuggccuacgugguccagcucccgcuguacggggugaucgacacgcccugcuggaagcugcacaccagcccccucugcaccaccaacacgaaggagggcuccaacaucugccugacccgcaccgaccggggcugguacugcgacaacgcgggguccgugagcuucuucccccaggccgagaccugcaagguccaguccaaccgcguguucugcgacacgaugaacagccugacccucccguccgaggucaaccugugcaacguggacaucuucaaccccaaguacgacugcaagaucaugaccagcaagaccgacguguccagcuccgucaucacgagccugggcgccaucguguccugcuacgggaagaccaagugcaccgccagcaacaagugccggggcaucaucaagaccuucuccaacggcugcgacuacgugagcaacaagggggucgacacgguguccgugggcaacacccucuacuacgucaacaagcaggaggggcagagccuguacgugaagggcgagcccaucaucaacuucuacgacccccugguguucccgagcgacgaguucgacgccuccaucagccaggucaacgagaagaucaaccagucccucgcguucauccgcaagagcgacgagcugcugcacaacgugaacgccgggaaguccaccaccaacaucaugaucaccacgaucaucaucgugaucaucgucauccuccugagccugaucgccgugggccuccugcuguacugcaaggcccgguccacccccgugacccugagcaaggaccagcucuccggcaucaacaacaucgccuucagcaacugaggacuaguacuggcugcaucucccuuuccucuguccuccauccuucucccaggauggugaagggggaccugguacccagugauccccaccccaggauccuaaaucaugacuuaccugcuaauaaaaacucauuggaaaagugagaagaucuaaaaaaaaaaaaaaaaaaaaaaaaaaaaaaaaaaaaaaaaaaaaaaaaaaaaaaaaaaaaaaaaugcaucccccccccccccccccccccccccccccccaaaggcucuuuucagagccaccagaauu

SEQ ID NO: 7623 - RNA, 2013 nt, Artificial Sequence
  mRNA product Design b-5 comprising derived and/or modified sequence from HRSV(A2)__F_DSCav1_mut8 (opt2)
gggagacuccugucgggcggaaguaggaggaguagaguuuaaaaacaguacucuuuuuccgguucgggacguaguugaagcaacgacaagccggauaaccgcucuugagacaggaagcuuaccauggagcuccucauccucaaggccaacgccaucaccaccauccucaccgccgucaccuucugcuucgccuccggccagaacaucaccgaggaguucuaccaguccaccugcuccgccgucuccaagggcuaccucggcgcccuccgcaccggcugguacaccuccgucaucaccaucgagcucuccaacaucaaggagaucaagugcaacggcaccgacgccaaggucaagcucaucaagcaggagcucgacaaguacaagaacgccgucaccgaccuccagcuccucaugcaguccacccccgccaccggcuccggcuccgccaucgccuccggcgucgccgucugcaagguccuccaccucgagggcgaggucaacaagaucaaguccgcccuccucuccaccaacaaggccgucgucucccucuccggcugcggcgucuccguccucaccuucaagguccucgaccucaagaacuacaucgacaagcagcuccuccccauccucaacaagcaguccugcuccauccccaacaucgagaccgucaucgaguuccagcagaagaacaaccgccuccucgagaucacccgcgaguucuccgucaacgccggcgucaccacccccgucuccaccuacaugcucaccaacuccgagcuccucucccucaucaacgacaugcccaucaccaacgaccagaagaagcucauguccaacaacguccagaucguccgccagcaguccuacuccaucaugugcaucaucaaggaggagguccucgccuacgucguccagcucccccucuacggcgucaucgacacccccugcuggaagcuccacaccuccccccucugcaccaccaacaccaaggagggcuccaacaucugccucacccgcaccgaccgcggcugguacugcgacaacgccggcuccgucuccuucuucccccaggccgagaccugcaagguccaguccaaccgcgucuucugcgacaccaugaacucccucacccuccccuccgaggucaaccucugcaacgucgacaucuucaaccccaaguacgacugcaagaucaugaccuccaagaccgacgucuccuccuccgucaucaccucccucggcgccaucgucuccugcuacggcaagaccaagugcaccgccuccaacaagugccgcggcaucaucaagaccuucuccaacggcugcgacuacgucuccaacaagggcgucgacaccgucuccgucggcaacacccucuacuacgucaacaagcaggagggccagucccucuacgucaagggcgagcccaucaucaacuucuacgacccccucgucuuccccuccgacgaguucgacgccuccaucucccaggucaacgagaagaucaaccagucccucgccuucauccgcaaguccgacgagcuccuccacaacgucaacgccggcaaguccaccaccaacaucaugaucaccaccaucaucaucgucaucaucgucauccuccucucccucaucgccgucggccuccuccucuacugcaaggcccgcuccacccccgucacccucuccaaggaccagcucuccggcaucaacaacaucgccuucuccaacugaggacuaguacuggcugcaucucccuuuccucuguccuccauccuucucccaggauggugaagggggaccugguacccagugauccccaccccaggauccuaaaucaugacuuaccugcuaauaaaaacucauuggaaaagugagaagaucuaaaaaaaaaaaaaaaaaaaaaaaaaaaaaaaaaaaaaaaaaaaaaaaaaaaaaaaaaaaaaaaaugcaucccccccccccccccccccccccccccccccaaaggcucuuuucagagccaccagaauu

SEQ ID NO: 7624 - RNA, 2013 nt, Artificial Sequence
  mRNA product Design b-5 comprising derived and/or modified sequence from HRSV(A2)__F_DSCav1_mut8 (opt3)
gggagacuccugucgggcggaaguaggaggaguagaguuuaaaaacaguacucuuuuuccgguucgggacguaguugaagcaacgacaagccggauaaccgcucuugagacaggaagcuuaccauggagcugcucauccuuaaggccaacgcuauuaccacaauacugacugcagugacguucugcuuugccagcggccagaauaucaccgaagaguucuaccaauccacauguucugcggucucaaaaggguauuugggagcuuuaagaacugguugguacaccaguguuauuacaaucgaacugagcaacauuaaggagaucaaaugcaauggcaccgacgccaaggugaaacuaauaaagcaggaacucgauaaguauaaaaacgcaguaacugaccugcagcuucugaugcaguccacacccgccaccgggucuggaucggcuaucgcaucaggcguggccgucuguaagguguugcaccucgagggugagguuaauaaaauuaagagcgcucugcugaguacgaacaaagccguggucucccucucugggugcggagugagcguauuaacuuuuaagguucuggaucuuaagaauuacaucgacaaacaauugcugccuauucuaaacaagcaguccuguucaaucccaaauauagaaaccgugauugaguuccagcagaaaaacaauaggcuccuggaaaucacacgggaguuuagugucaacgcgggcgugacuaccccggugagcacauauaugcuuaccaauucugagcuguugucccucauuaacgauaugcccaucacgaaugaccaaaagaaacugaugucaaacaacguccagaucguucgccagcagagcuacaguauuaugugcauaaucaaggaagagguguuagcauauguagugcaacugccucucuacggcgucauugauacuccauguuggaaacuucauacaucuccccugugcaccacuaauacaaaggaaggguccaacaucuguuugacccgaacggaccguggaugguacugcgauaaugccgguagcgugucguucuuuccucaggcugagaccuguaagguucagucuaacagaguguucugcgacacaaugaacucccuaacucugccaucagaagucaaucucugcaauguggauauauuuaaccccaaauaugacuguaagauuaugaccaguaaaacagauguaagcuccucuguuaucacuagccugggcgccaucgugucaugcuacgggaagaccaaauguacagcaaguaauaagugcaggggaauuaucaagaccuucuccaacggcugugacuaugucagcaauaaagguguggacacugucucuguggggaacacgcuuuacuauguuaauaagcaagagggacagucacuguacgugaaaggcgagccuauuauaaacuuuuaugauccauugguauucccgagugacgaauuugaugcuagcaucucccaggucaaugagaagauuaaccagucucucgccuucauccggaaaucggacgaacuguuacacaacgugaaugcgggcaagagcacaaccaacaucaugauuacuaccauaaucauuguuaucauugugauccugcuaucccucauagccgucgggcugcuuuuguacugcaaggcacgcucaacacccgugacccugaguaaagaucaacucucuggaaucaauaacauugcuuucagcaauugaggacuaguacuggcugcaucucccuuuccucuguccuccauccuucucccaggauggugaagggggaccugguacccagugauccccaccccaggauccuaaaucaugacuuaccugcuaauaaaaacucauuggaaaagugagaagaucuaaaaaaaaaaaaaaaaaaaaaaaaaaaaaaaaaaaaaaaaaaaaaaaaaaaaaaaaaaaaaaaaugcaucccccccccccccccccccccccccccccccaaaggcucuuuucagagccaccagaauu

SEQ ID NO: 7625 - RNA, 2013 nt, Artificial Sequence
  mRNA product Design b-5 comprising derived and/or modified sequence from HRSV(A2)__F_DSCav1_mut8 (opt4)
gggagacuccugucgggcggaaguaggaggaguagaguuuaaaaacaguacucuuuuuccgguucgggacguaguugaagcaacgacaagccggauaaccgcucuugagacaggaagcuuaccauggagcugcugauccugaaggccaacgccaucaccaccauccugaccgccgugaccuucugcuucgccagcggccagaacaucaccgaggaguucuaccagagcaccugcagcgccgugagcaagggcuaccugggcgcccugagaaccggcugguacaccagcgugaucaccaucgagcugagcaacaucaaggagaucaagugcaacggcaccgacgccaaggugaagcugaucaagcaggagcuggacaaguacaagaacgccgugaccgaccugcagcugcugaugcagagcacccccgccaccggcagcggcagcgccaucgccagcggcguggccgugugcaaggugcugcaccuggagggcgaggugaacaagaucaagagcgcccugcugagcaccaacaaggccguggugagccugagcggcugcggcgugagcgugcugaccuucaaggugcuggaccugaagaacuacaucgacaagcagcugcugcccauccugaacaagcagagcugcagcauccccaacaucgagaccgugaucgaguuccagcagaagaacaacagacugcuggagaucaccagagaguucagcgugaacgccggcgugaccacccccgugagcaccuacaugcugaccaacagcgagcugcugagccugaucaacgacaugcccaucaccaacgaccagaagaagcugaugagcaacaacgugcagaucgugagacagcagagcuacagcaucaugugcaucaucaaggaggaggugcuggccuacguggugcagcugccccuguacggcgugaucgacacccccugcuggaagcugcacaccagcccccugugcaccaccaacaccaaggagggcagcaacaucugccugaccagaaccgacagaggcugguacugcgacaacgccggcagcgugagcuucuucccccaggccgagaccugcaaggugcagagcaacagaguguucugcgacaccaugaacagccugacccugcccagcgaggugaaccugugcaacguggacaucuucaaccccaaguacgacugcaagaucaugaccagcaagaccgacgugagcagcagcgugaucaccagccugggcgccaucgugagcugcuacggcaagaccaagugcaccgccagcaacaagugcagaggcaucaucaagaccuucagcaacggcugcgacuacgugagcaacaagggcguggacaccgugagcgugggcaacacccuguacuacgugaacaagcaggagggccagagccuguacgugaagggcgagcccaucaucaacuucuacgacccccugguguuccccagcgacgaguucgacgccagcaucagccaggugaacgagaagaucaaccagagccuggccuucaucagaaagagcgacgagcugcugcacaacgugaacgccggcaagagcaccaccaacaucaugaucaccaccaucaucaucgugaucaucgugauccugcugagccugaucgccgugggccugcugcuguacugcaaggccagaagcacccccgugacccugagcaaggaccagcugagcggcaucaacaacaucgccuucagcaacugaggacuaguacuggcugcaucucccuuuccucuguccuccauccuucucccaggauggugaagggggaccugguacccagugauccccaccccaggauccuaaaucaugacuuaccugcuaauaaaaacucauuggaaaagugagaagaucuaaaaaaaaaaaaaaaaaaaaaaaaaaaaaaaaaaaaaaaaaaaaaaaaaaaaaaaaaaaaaaaaugcaucccccccccccccccccccccccccccccccaaaggcucuuuucagagccaccagaauu

SEQ ID NO: 7626 - RNA, 2013 nt, Artificial Sequence
  mRNA product Design b-5 comprising derived and/or modified sequence from HRSV(A2)__F_DSCav1_mut8 (opt5)
gggagacuccugucgggcggaaguaggaggaguagaguuuaaaaacaguacucuuuuuccgguucgggacguaguugaagcaacgacaagccggauaaccgcucuugagacaggaagcuuaccauggagcugcucauccugaaggccaacgcuauuaccacaauccuuacggccgugaccuucugcuuugcgagcggccagaauauuacagaagaguucuaccaauccaccuguucugcugucagcaaaggguaucugggagcccucagaacaggcugguacaccuccguuaucacaauugaacugucuaacaucaaggagaucaaaugcaaugggaccgacgccaaggugaaacuuauuaagcaggaacuggauaaguauaaaaacgcugugacggaccuccagcugcugaugcagagcacccccgccacaggauccggcucugcuaucgccagcggggucgcgguguguaagguucuccaccuggagggagaggugaauaaaauuaaguccgcccuucugagcaccaacaaagcugucgugucucucuccggcugcggcguuagcgugcugacauuuaagguccuugaucugaagaauuacaucgacaaacaacuccugccuauucugaacaagcagucuuguuccaucccgaauauugaaaccgugaucgaguuccagcagaaaaacaaucggcuccuggaaaucacgcgcgaguuuagcgugaacgccggggucacaacccccguuucuacauauaugcuuaccaauuccgagcugcucagccugauuaacgauaugccuaucaccaaugaccaaaagaaacuuauguccaacaacgugcagauugugagacagcagucuuacagcaucaugugcauuaucaaggaagagguccuggcuuaugugguucaacucccccuguacggagugaucgauacaccuuguuggaaacugcauacgagcccccucugcaccacaaauaccaaggaaggcagcaacauuugucugacacggaccgaccgcgggugguacugcgauaaugccggaucugucuccuucuuuccucaggcggagacguguaaggugcagagcaacagaguuuucugcgacacaaugaacucucuuacccugccgagcgaagugaaucucugcaaugucgauaucuuuaaccccaaauaugacuguaagauuaugaccuccaaaacagaugugucuagcuccgucaucaccagccugggcgccauugugucuugcuacgggaagacaaaauguacggcuuccaauaagugccggggaaucaucaagaccuucagcaacggcugugacuauguuucuaauaaaggcguggacacagucuccguggggaacacccuuuacuauguuaauaagcaagagggacagagccuguacgugaaaggcgagccuauuaucaacuuuuaugauccccucgucuucccuuccgacgaauuugaugccucuauuagccaggugaaugagaagaucaaccagucccuggcuuucauucgcaaaucugacgaacugcuccacaacgugaaugccgggaaguccacaaccaacaucaugauuacgaccaucaucauuguuaucauugucauccugcuuucccugauugccgugggacuccugcuguacugcaaggcuagaagcacacccgugacccuuucuaaagaucaacucuccggcaucaauaacaucgcguucagcaauugaggacuaguacuggcugcaucucccuuuccucuguccuccauccuucucccaggauggugaagggggaccugguacccagugauccccaccccaggauccuaaaucaugacuuaccugcuaauaaaaacucauuggaaaagugagaagaucuaaaaaaaaaaaaaaaaaaaaaaaaaaaaaaaaaaaaaaaaaaaaaaaaaaaaaaaaaaaaaaaaugcaucccccccccccccccccccccccccccccccaaaggcucuuuucagagccaccagaauu

SEQ ID NO: 7627 - RNA, 2013 nt, Artificial Sequence
  mRNA product Design b-5 comprising derived and/or modified sequence from HRSV(A2)__F_DSCav1_mut8 (opt6)
gggagacuccugucgggcggaaguaggaggaguagaguuuaaaaacaguacucuuuuuccgguucgggacguaguugaagcaacgacaagccggauaaccgcucuugagacaggaagcuuaccauggaacuauuaauauuaaaagcaaacgcaaucacaacuauacuaacagcaguaacauucugcuuugccucaggucaaaacauaacagaggaauuuuaccaauccacaugcucugcuguaagcaaaggauaccucggagcauuaagaacuggaugguacaccucaguaauaacuauagaacuaucaaacauaaaagaaauaaaauguaauggcacagacgcaaaagugaaauuaaucaaacaagaacucgauaaauacaaaaaugccguaaccgaucuccaacuuuuaaugcaaagcacacccgcaacagguuccgggucagcaauagcaagcggaguugcaguaugcaaaguacuacacuuagaaggagaaguaaauaaaaucaaaucagccuuacuaucaacaaauaaagcaguuguaucacucucaggaugcggaguauccguacuaacauuuaaaguacuagaucuaaaaaacuacauagauaaacaacucuuaccaauacuaaauaaacaaucauguuccauacccaacauagaaaccguuaucgaauuucaacaaaaaaacaacagauuacuagaaaucacacgagaauuuucaguaaaugcuggagucacaacaccaguuaguacauacaugcucaccaauucagaacuacuaaguuuaauuaacgauaugccaauaacaaacgaccaaaaaaaacuaaugucaaauaacguacaaauaguaagacaacaaucauacucaaucaugugcauaauaaaagaagaaguacuagccuauguaguccaauuaccacucuacggcguaaucgacaccccaugcuggaaauuacacacaagcccauuaugcaccaccaacacaaaagaagguucaaacauuugcuuaaccagaaccgaucgaggaugguacugcgauaacgcaggaucugucuccuuuuucccacaagccgaaacaugcaaaguucaaucaaaccgaguuuucugugacacuaugaacucacucacacuuccaagcgaaguaaaccuaugcaacguagauauauuuaacccuaaauacgacugcaaaauaaugacaagcaaaacagacguuaguucaucaguaauuacaagucuaggcgcaauagugucaugcuacggaaaaacaaaaugcaccgcauccaauaaaugccgaggaaucauuaaaacauucucaaacggaugcgacuacgucagcaauaaaggaguagacacuguuucuguaggaaacacccuauacuauguaaacaaacaagaaggucaaucacuauacguaaagggagaaccaauuauaaauuuuuacgaccccuuaguauuuccaagugaugaauuugacgcaucuauaagucaaguuaacgaaaaaauuaaccaaucacuugcauuuauaagaaaaucagacgaacuacuccauaauguaaacgcagguaaaucaacaacaaacaucaugaucacaaccauaauaauaguaauaauuguaauauuacuaucacuaauagcaguaggauuacuacucuacugcaaagcuagaucuaccccggucacacucucaaaagaccaauuaucuggaauaaacaauauagcauucagcaacuaaggacuaguacuggcugcaucucccuuuccucuguccuccauccuucucccaggauggugaagggggaccugguacccagugauccccaccccaggauccuaaaucaugacuuaccugcuaauaaaaacucauuggaaaagugagaagaucuaaaaaaaaaaaaaaaaaaaaaaaaaaaaaaaaaaaaaaaaaaaaaaaaaaaaaaaaaaaaaaaaugcaucccccccccccccccccccccccccccccccaaaggcucuuuucagagccaccagaauu

SEQ ID NO: 7628 - RNA, 2013 nt, Artificial Sequence
  mRNA product Design b-5 comprising derived and/or modified sequence from HRSV(A2)__F_DSCav1_mut8 (opt11)
gggagacuccugucgggcggaaguaggaggaguagaguuuaaaaacaguacucuuuuuccgguucgggacguaguugaagcaacgacaagccggauaaccgcucuugagacaggaagcuuaccauggaacuccucauccuuaaagccaacgccauaaccaccauccucaccgccgucaccuucugcuucgcuucuggccaaaacauaaccgaagaguucuaccaauccacgugcucugccgugucaaaaggcuaccucggagcccuccgcacagggugguacacuuccgucaucaccaucgaacucucuaacaucaaagaaaucaagugcaacggcacagacgcgaaagucaagcucaucaaacaagaacuagacaaauacaaaaacgccguaacagaccuccaacuccuaaugcaguccacaccagccacaggcuccggcagcgccaucgccuccggcgucgcugucugcaaaguccuacaccucgaaggcgaagucaacaaaaucaagucagcccuccuuagcaccaacaaagcagucgucucuuuaagcgggugcggagucucuguccuaaccuuuaaaguacucgaccucaaaaacuacaucgacaaacaacuacuaccaauacuaaacaaacagagcugcuccauucccaacaucgaaaccguuaucgaguuccaacaaaagaacaaccgccuccucgaaaucacccgcgaguucuccgucaacgcaggcgucaccaccccagucuccaccuauaugcuaaccaacagcgaacuccucagccucaucaaugacaugccaaucaccaacgaccaaaagaaacucauguccaacaacguacagauaguccgccagcaguccuacagcaucaugugcaucaucaaagaagaagugcucgccuacgugguacaacucccucucuacggagucauugauacacccugcuggaaacuccacacaagcccccucugcacuacaaacaccaaagaaggcucuaacauaugccucacccgcacagaccgugguugguacugcgacaacgccggcuccguauccuucuuuccacaagcugaaaccugcaaaguucaaucaaaccgagucuucugcgacaccaugaacucccucacauugcccagcgaagucaaccucugcaacgucgacaucuucaaccccaaguacgacugcaaaaucaugaccuccaaaaccgacgucagcuccagcgugaucacaagccuaggcgcgaucgucagcugcuacggcaaaaccaaaugcacagccuccaacaaaugccgcggaaucauaaaaacauucaguaacggcugcgacuacguguccaauaaaggagucgacaccguauccgucggaaacacccucuacuacgucaacaaacaagaaggacaaucccucuaugucaaaggcgaacccauuaucaacuucuacgacccccuaguuuuccccuccgacgaguucgacgcaagcauuucccaagucaacgaaaagaucaaucaaucccucgccuucauacgcaaaagcgacgaacuacuacacaacguaaacgccggcaaaagcaccaccaacaucaugaucacaacaaucaucaucgucaucaucgucauccuacucucacucaucgccguuggccuacuacucuacugcaaagcccgcuccacacccgucacccucucaaaagaccaacucuccggcaucaacaacaucgcauucagcaacugaggacuaguacuggcugcaucucccuuuccucuguccuccauccuucucccaggauggugaagggggaccugguacccagugauccccaccccaggauccuaaaucaugacuuaccugcuaauaaaaacucauuggaaaagugagaagaucuaaaaaaaaaaaaaaaaaaaaaaaaaaaaaaaaaaaaaaaaaaaaaaaaaaaaaaaaaaaaaaaaugcaucccccccccccccccccccccccccccccccaaaggcucuuuucagagccaccagaauu

SEQ ID NO: 7629 - RNA, 1919 nt, Artificial Sequence
  mRNA product Design c-1 comprising derived and/or modified sequence from HRSV(A2)__F_DSCav1_mut8 (opt1)
gggagaguccgcucagccagguugcagaagcggcuuagcguguguccuaaucuucucucugcguguagguaggccugugccgcaaacaagcuuaccauggagcugcucauccugaaggccaacgccaucaccaccauccugacggcggugaccuucugcuucgccagcggccagaacaucaccgaggaguucuaccaguccacgugcagcgccgucuccaagggguaccucggcgcccugcggaccggcugguacaccuccgugaucaccaucgagcugagcaacaucaaggagaucaagugcaacgggaccgacgccaaggugaagcucaucaagcaggagcuggacaaguacaagaacgcggucacggaccugcagcuccugaugcaguccaccccggcaaccggcuccggcuccgccaucgcgagcggcgucgccgugugcaaggugcugcaccucgagggggaggucaacaagaucaagagcgcccugcuguccaccaacaaggccguggugagccucuccggcugcggcgucagcgugcugaccuucaaggugcuggaccucaagaacuacaucgacaagcagcugcugcccauccugaacaagcagagcugcuccauccccaacaucgagacggugaucgaguuccagcagaagaacaaccggcuccuggagaucacccgcgaguucagcgugaacgccggggucaccacccccguguccacguacaugcugaccaacagcgagcuccugucccugaucaacgacaugccgaucaccaacgaccagaagaagcucaugagcaacaacgugcagaucguccggcagcaguccuacagcaucaugugcaucaucaaggaggaggugcuggcguacgugguccagcugccccucuacggcgugaucgacacccccugcuggaagcugcacacgagcccccugugcaccaccaacaccaaggagggguccaacaucugccucacgcgcaccgaccggggcugguacugcgacaacgccggcagcgucuccuucuucccgcaggccgagaccugcaaggugcagagcaaccgcguguucugcgacaccaugaacucccugacgcugcccagcgagguaaaccucugcaacgucgacaucuucaaccccaaguacgacugcaagaucaugaccuccaagaccgacgugagcuccagcgugaucaccucccugggggccaucgucagcugcuacggcaagacgaagugcaccgccagcaacaagugccgggggaucaucaagaccuucuccaacggcugcgacuacgugagcaacaagggcguggacaccguguccgucgggaacacccuguacuacgugaacaagcaggagggccagagccucuacgugaagggggagcccaucaucaacuucuacgacccgcuggucuuccccuccgacgaguucgacgcgagcaucucccaggugaacgagaagaucaaccagagccuggccuucauccgcaaguccgacgagcugcuccacaacgugaacgccggcaagagcacgaccaacaucaugaucaccaccaucaucaucgucaucaucgugauccugcugucccucaucgccguggggcugcugcucuacugcaaggcccggagcacgcccgucacccuguccaaggaccagcugagcggcaucaacaacaucgcguucuccaacugaggacuaguguccaccugucccuccugggcugcuggauugucucguuuuccugccaaauaaacaggaucagcgcuuuacagaucuaaaaaaaaaaaaaaaaaaaaaaaaaaaaaaaaaaaaaaaaaaaaaaaaaaaaaaaaaaaaaaaaugcaucccccccccccccccccccccccccccccccaaaggcucuuuucagagccaccagaauu

SEQ ID NO: 7630 - RNA, 1919 nt, Artificial Sequence
  mRNA product Design c-1 comprising derived and/or modified sequence from HRSV(A2)__F_DSCav1_mut8 (opt1)
gggagaguccgcucagccagguugcagaagcggcuuagcguguguccuaaucuucucucugcguguagguaggccugugccgcaaacaagcuuaccauggagcugcucauccugaaggccaacgccaucaccaccauccugacggcggugaccuucugcuucgccagcggccagaacaucaccgaggaguucuaccaguccacgugcagcgccgucuccaagggguaccucggcgcccugcgcaccgggugguacaccagcgugaucaccaucgagcuguccaacaucaaggagaucaagugcaacggcaccgacgccaaggugaagcucaucaagcaggagcuggacaaguacaagaacgcggucacggaccugcagcuccugaugcagagcacccccgccaccggguccggcagcgccaucgccuccggcguggcggugugcaagguccugcaccucgagggggaggugaacaagaucaagagcgcccugcuguccaccaacaaggccguggucagccucuccggcugcggggugagcgugcugacguucaagguccuggaccucaagaacuacaucgacaagcagcugcugccgauccucaacaagcaguccugcagcauccccaacaucgagaccgugaucgaguuccagcagaagaacaaccggcugcuggagaucacccgcgaguucuccgugaacgccggcgucaccacgcccgugagcaccuacaugcucaccaacuccgagcugcugagccucaucaacgacaugcccaucaccaacgaccagaagaagcugaugagcaacaacgugcagaucguccggcagcaguccuacagcaucaugugcaucaucaaggaggaggugcuggccuacgugguccagcucccgcuguacggggugaucgacacgcccugcuggaagcugcacaccagcccccucugcaccaccaacacgaaggagggcuccaacaucugccugacccgcaccgaccggggcugguacugcgacaacgcgggguccgugagcuucuucccccaggccgagaccugcaagguccaguccaaccgcguguucugcgacacgaugaacagccugacccucccguccgaggucaaccugugcaacguggacaucuucaaccccaaguacgacugcaagaucaugaccagcaagaccgacguguccagcuccgucaucacgagccugggcgccaucguguccugcuacgggaagaccaagugcaccgccagcaacaagugccggggcaucaucaagaccuucuccaacggcugcgacuacgugagcaacaagggggucgacacgguguccgugggcaacacccucuacuacgucaacaagcaggaggggcagagccuguacgugaagggcgagcccaucaucaacuucuacgacccccugguguucccgagcgacgaguucgacgccuccaucagccaggucaacgagaagaucaaccagucccucgcguucauccgcaagagcgacgagcugcugcacaacgugaacgccgggaaguccaccaccaacaucaugaucaccacgaucaucaucgugaucaucgucauccuccugagccugaucgccgugggccuccugcuguacugcaaggcccgguccacccccgugacccugagcaaggaccagcucuccggcaucaacaacaucgccuucagcaacugaggacuaguguccaccugucccuccugggcugcuggauugucucguuuuccugccaaauaaacaggaucagcgcuuuacagaucuaaaaaaaaaaaaaaaaaaaaaaaaaaaaaaaaaaaaaaaaaaaaaaaaaaaaaaaaaaaaaaaaugcaucccccccccccccccccccccccccccccccaaaggcucuuuucagagccaccagaauu

SEQ ID NO: 7631 - RNA, 1919 nt, Artificial Sequence
  mRNA product Design c-1 comprising derived and/or modified sequence from HRSV(A2)__F_DSCav1_mut8 (opt2)
gggagaguccgcucagccagguugcagaagcggcuuagcguguguccuaaucuucucucugcguguagguaggccugugccgcaaacaagcuuaccauggagcuccucauccucaaggccaacgccaucaccaccauccucaccgccgucaccuucugcuucgccuccggccagaacaucaccgaggaguucuaccaguccaccugcuccgccgucuccaagggcuaccucggcgcccuccgcaccggcugguacaccuccgucaucaccaucgagcucuccaacaucaaggagaucaagugcaacggcaccgacgccaaggucaagcucaucaagcaggagcucgacaaguacaagaacgccgucaccgaccuccagcuccucaugcaguccacccccgccaccggcuccggcuccgccaucgccuccggcgucgccgucugcaagguccuccaccucgagggcgaggucaacaagaucaaguccgcccuccucuccaccaacaaggccgucgucucccucuccggcugcggcgucuccguccucaccuucaagguccucgaccucaagaacuacaucgacaagcagcuccuccccauccucaacaagcaguccugcuccauccccaacaucgagaccgucaucgaguuccagcagaagaacaaccgccuccucgagaucacccgcgaguucuccgucaacgccggcgucaccacccccgucuccaccuacaugcucaccaacuccgagcuccucucccucaucaacgacaugcccaucaccaacgaccagaagaagcucauguccaacaacguccagaucguccgccagcaguccuacuccaucaugugcaucaucaaggaggagguccucgccuacgucguccagcucccccucuacggcgucaucgacacccccugcuggaagcuccacaccuccccccucugcaccaccaacaccaaggagggcuccaacaucugccucacccgcaccgaccgcggcugguacugcgacaacgccggcuccgucuccuucuucccccaggccgagaccugcaagguccaguccaaccgcgucuucugcgacaccaugaacucccucacccuccccuccgaggucaaccucugcaacgucgacaucuucaaccccaaguacgacugcaagaucaugaccuccaagaccgacgucuccuccuccgucaucaccucccucggcgccaucgucuccugcuacggcaagaccaagugcaccgccuccaacaagugccgcggcaucaucaagaccuucuccaacggcugcgacuacgucuccaacaagggcgucgacaccgucuccgucggcaacacccucuacuacgucaacaagcaggagggccagucccucuacgucaagggcgagcccaucaucaacuucuacgacccccucgucuuccccuccgacgaguucgacgccuccaucucccaggucaacgagaagaucaaccagucccucgccuucauccgcaaguccgacgagcuccuccacaacgucaacgccggcaaguccaccaccaacaucaugaucaccaccaucaucaucgucaucaucgucauccuccucucccucaucgccgucggccuccuccucuacugcaaggcccgcuccacccccgucacccucuccaaggaccagcucuccggcaucaacaacaucgccuucuccaacugaggacuaguguccaccugucccuccugggcugcuggauugucucguuuuccugccaaauaaacaggaucagcgcuuuacagaucuaaaaaaaaaaaaaaaaaaaaaaaaaaaaaaaaaaaaaaaaaaaaaaaaaaaaaaaaaaaaaaaaugcaucccccccccccccccccccccccccccccccaaaggcucuuuucagagccaccagaauu

SEQ ID NO: 7632 - RNA, 1919 nt, Artificial Sequence
  mRNA product Design c-1 comprising derived and/or modified sequence from HRSV(A2)__F_DSCav1_mut8 (opt3)
gggagaguccgcucagccagguugcagaagcggcuuagcguguguccuaaucuucucucugcguguagguaggccugugccgcaaacaagcuuaccauggagcugcucauccuuaaggccaacgcuauuaccacaauacugacugcagugacguucugcuuugccagcggccagaauaucaccgaagaguucuaccaauccacauguucugcggucucaaaaggguauuugggagcuuuaagaacugguugguacaccaguguuauuacaaucgaacugagcaacauuaaggagaucaaaugcaauggcaccgacgccaaggugaaacuaauaaagcaggaacucgauaaguauaaaaacgcaguaacugaccugcagcuucugaugcaguccacacccgccaccgggucuggaucggcuaucgcaucaggcguggccgucuguaagguguugcaccucgagggugagguuaauaaaauuaagagcgcucugcugaguacgaacaaagccguggucucccucucugggugcggagugagcguauuaacuuuuaagguucuggaucuuaagaauuacaucgacaaacaauugcugccuauucuaaacaagcaguccuguucaaucccaaauauagaaaccgugauugaguuccagcagaaaaacaauaggcuccuggaaaucacacgggaguuuagugucaacgcgggcgugacuaccccggugagcacauauaugcuuaccaauucugagcuguugucccucauuaacgauaugcccaucacgaaugaccaaaagaaacugaugucaaacaacguccagaucguucgccagcagagcuacaguauuaugugcauaaucaaggaagagguguuagcauauguagugcaacugccucucuacggcgucauugauacuccauguuggaaacuucauacaucuccccugugcaccacuaauacaaaggaaggguccaacaucuguuugacccgaacggaccguggaugguacugcgauaaugccgguagcgugucguucuuuccucaggcugagaccuguaagguucagucuaacagaguguucugcgacacaaugaacucccuaacucugccaucagaagucaaucucugcaauguggauauauuuaaccccaaauaugacuguaagauuaugaccaguaaaacagauguaagcuccucuguuaucacuagccugggcgccaucgugucaugcuacgggaagaccaaauguacagcaaguaauaagugcaggggaauuaucaagaccuucuccaacggcugugacuaugucagcaauaaagguguggacacugucucuguggggaacacgcuuuacuauguuaauaagcaagagggacagucacuguacgugaaaggcgagccuauuauaaacuuuuaugauccauugguauucccgagugacgaauuugaugcuagcaucucccaggucaaugagaagauuaaccagucucucgccuucauccggaaaucggacgaacuguuacacaacgugaaugcgggcaagagcacaaccaacaucaugauuacuaccauaaucauuguuaucauugugauccugcuaucccucauagccgucgggcugcuuuuguacugcaaggcacgcucaacacccgugacccugaguaaagaucaacucucuggaaucaauaacauugcuuucagcaauugaggacuaguguccaccugucccuccugggcugcuggauugucucguuuuccugccaaauaaacaggaucagcgcuuuacagaucuaaaaaaaaaaaaaaaaaaaaaaaaaaaaaaaaaaaaaaaaaaaaaaaaaaaaaaaaaaaaaaaaugcaucccccccccccccccccccccccccccccccaaaggcucuuuucagagccaccagaauu

SEQ ID NO: 7633 - RNA, 1919 nt, Artificial Sequence
  mRNA product Design c-1 comprising derived and/or modified sequence from HRSV(A2)__F_DSCav1_mut8 (opt4)
gggagaguccgcucagccagguugcagaagcggcuuagcguguguccuaaucuucucucugcguguagguaggccugugccgcaaacaagcuuaccauggagcugcugauccugaaggccaacgccaucaccaccauccugaccgccgugaccuucugcuucgccagcggccagaacaucaccgaggaguucuaccagagcaccugcagcgccgugagcaagggcuaccugggcgcccugagaaccggcugguacaccagcgugaucaccaucgagcugagcaacaucaaggagaucaagugcaacggcaccgacgccaaggugaagcugaucaagcaggagcuggacaaguacaagaacgccgugaccgaccugcagcugcugaugcagagcacccccgccaccggcagcggcagcgccaucgccagcggcguggccgugugcaaggugcugcaccuggagggcgaggugaacaagaucaagagcgcccugcugagcaccaacaaggccguggugagccugagcggcugcggcgugagcgugcugaccuucaaggugcuggaccugaagaacuacaucgacaagcagcugcugcccauccugaacaagcagagcugcagcauccccaacaucgagaccgugaucgaguuccagcagaagaacaacagacugcuggagaucaccagagaguucagcgugaacgccggcgugaccacccccgugagcaccuacaugcugaccaacagcgagcugcugagccugaucaacgacaugcccaucaccaacgaccagaagaagcugaugagcaacaacgugcagaucgugagacagcagagcuacagcaucaugugcaucaucaaggaggaggugcuggccuacguggugcagcugccccuguacggcgugaucgacacccccugcuggaagcugcacaccagcccccugugcaccaccaacaccaaggagggcagcaacaucugccugaccagaaccgacagaggcugguacugcgacaacgccggcagcgugagcuucuucccccaggccgagaccugcaaggugcagagcaacagaguguucugcgacaccaugaacagccugacccugcccagcgaggugaaccugugcaacguggacaucuucaaccccaaguacgacugcaagaucaugaccagcaagaccgacgugagcagcagcgugaucaccagccugggcgccaucgugagcugcuacggcaagaccaagugcaccgccagcaacaagugcagaggcaucaucaagaccuucagcaacggcugcgacuacgugagcaacaagggcguggacaccgugagcgugggcaacacccuguacuacgugaacaagcaggagggccagagccuguacgugaagggcgagcccaucaucaacuucuacgacccccugguguuccccagcgacgaguucgacgccagcaucagccaggugaacgagaagaucaaccagagccuggccuucaucagaaagagcgacgagcugcugcacaacgugaacgccggcaagagcaccaccaacaucaugaucaccaccaucaucaucgugaucaucgugauccugcugagccugaucgccgugggccugcugcuguacugcaaggccagaagcacccccgugacccugagcaaggaccagcugagcggcaucaacaacaucgccuucagcaacugaggacuaguguccaccugucccuccugggcugcuggauugucucguuuuccugccaaauaaacaggaucagcgcuuuacagaucuaaaaaaaaaaaaaaaaaaaaaaaaaaaaaaaaaaaaaaaaaaaaaaaaaaaaaaaaaaaaaaaaugcaucccccccccccccccccccccccccccccccaaaggcucuuuucagagccaccagaauu

SEQ ID NO: 7634 - RNA, 1919 nt, Artificial Sequence
  mRNA product Design c-1 comprising derived and/or modified sequence from HRSV(A2)__F_DSCav1_mut8 (opt5)
gggagaguccgcucagccagguugcagaagcggcuuagcguguguccuaaucuucucucugcguguagguaggccugugccgcaaacaagcuuaccauggagcugcucauccugaaggccaacgcuauuaccacaauccuuacggccgugaccuucugcuuugcgagcggccagaauauuacagaagaguucuaccaauccaccuguucugcugucagcaaaggguaucugggagcccucagaacaggcugguacaccuccguuaucacaauugaacugucuaacaucaaggagaucaaaugcaaugggaccgacgccaaggugaaacuuauuaagcaggaacuggauaaguauaaaaacgcugugacggaccuccagcugcugaugcagagcacccccgccacaggauccggcucugcuaucgccagcggggucgcgguguguaagguucuccaccuggagggagaggugaauaaaauuaaguccgcccuucugagcaccaacaaagcugucgugucucucuccggcugcggcguuagcgugcugacauuuaagguccuugaucugaagaauuacaucgacaaacaacuccugccuauucugaacaagcagucuuguuccaucccgaauauugaaaccgugaucgaguuccagcagaaaaacaaucggcuccuggaaaucacgcgcgaguuuagcgugaacgccggggucacaacccccguuucuacauauaugcuuaccaauuccgagcugcucagccugauuaacgauaugccuaucaccaaugaccaaaagaaacuuauguccaacaacgugcagauugugagacagcagucuuacagcaucaugugcauuaucaaggaagagguccuggcuuaugugguucaacucccccuguacggagugaucgauacaccuuguuggaaacugcauacgagcccccucugcaccacaaauaccaaggaaggcagcaacauuugucugacacggaccgaccgcgggugguacugcgauaaugccggaucugucuccuucuuuccucaggcggagacguguaaggugcagagcaacagaguuuucugcgacacaaugaacucucuuacccugccgagcgaagugaaucucugcaaugucgauaucuuuaaccccaaauaugacuguaagauuaugaccuccaaaacagaugugucuagcuccgucaucaccagccugggcgccauugugucuugcuacgggaagacaaaauguacggcuuccaauaagugccggggaaucaucaagaccuucagcaacggcugugacuauguuucuaauaaaggcguggacacagucuccguggggaacacccuuuacuauguuaauaagcaagagggacagagccuguacgugaaaggcgagccuauuaucaacuuuuaugauccccucgucuucccuuccgacgaauuugaugccucuauuagccaggugaaugagaagaucaaccagucccuggcuuucauucgcaaaucugacgaacugcuccacaacgugaaugccgggaaguccacaaccaacaucaugauuacgaccaucaucauuguuaucauugucauccugcuuucccugauugccgugggacuccugcuguacugcaaggcuagaagcacacccgugacccuuucuaaagaucaacucuccggcaucaauaacaucgcguucagcaauugaggacuaguguccaccugucccuccugggcugcuggauugucucguuuuccugccaaauaaacaggaucagcgcuuuacagaucuaaaaaaaaaaaaaaaaaaaaaaaaaaaaaaaaaaaaaaaaaaaaaaaaaaaaaaaaaaaaaaaaugcaucccccccccccccccccccccccccccccccaaaggcucuuuucagagccaccagaauu

SEQ ID NO: 7635 - RNA, 1919 nt, Artificial Sequence
  mRNA product Design c-1 comprising derived and/or modified sequence from HRSV(A2)__F_DSCav1_mut8 (opt6)
gggagaguccgcucagccagguugcagaagcggcuuagcguguguccuaaucuucucucugcguguagguaggccugugccgcaaacaagcuuaccauggaacuauuaauauuaaaagcaaacgcaaucacaacuauacuaacagcaguaacauucugcuuugccucaggucaaaacauaacagaggaauuuuaccaauccacaugcucugcuguaagcaaaggauaccucggagcauuaagaacuggaugguacaccucaguaauaacuauagaacuaucaaacauaaaagaaauaaaauguaauggcacagacgcaaaagugaaauuaaucaaacaagaacucgauaaauacaaaaaugccguaaccgaucuccaacuuuuaaugcaaagcacacccgcaacagguuccgggucagcaauagcaagcggaguugcaguaugcaaaguacuacacuuagaaggagaaguaaauaaaaucaaaucagccuuacuaucaacaaauaaagcaguuguaucacucucaggaugcggaguauccguacuaacauuuaaaguacuagaucuaaaaaacuacauagauaaacaacucuuaccaauacuaaauaaacaaucauguuccauacccaacauagaaaccguuaucgaauuucaacaaaaaaacaacagauuacuagaaaucacacgagaauuuucaguaaaugcuggagucacaacaccaguuaguacauacaugcucaccaauucagaacuacuaaguuuaauuaacgauaugccaauaacaaacgaccaaaaaaaacuaaugucaaauaacguacaaauaguaagacaacaaucauacucaaucaugugcauaauaaaagaagaaguacuagccuauguaguccaauuaccacucuacggcguaaucgacaccccaugcuggaaauuacacacaagcccauuaugcaccaccaacacaaaagaagguucaaacauuugcuuaaccagaaccgaucgaggaugguacugcgauaacgcaggaucugucuccuuuuucccacaagccgaaacaugcaaaguucaaucaaaccgaguuuucugugacacuaugaacucacucacacuuccaagcgaaguaaaccuaugcaacguagauauauuuaacccuaaauacgacugcaaaauaaugacaagcaaaacagacguuaguucaucaguaauuacaagucuaggcgcaauagugucaugcuacggaaaaacaaaaugcaccgcauccaauaaaugccgaggaaucauuaaaacauucucaaacggaugcgacuacgucagcaauaaaggaguagacacuguuucuguaggaaacacccuauacuauguaaacaaacaagaaggucaaucacuauacguaaagggagaaccaauuauaaauuuuuacgaccccuuaguauuuccaagugaugaauuugacgcaucuauaagucaaguuaacgaaaaaauuaaccaaucacuugcauuuauaagaaaaucagacgaacuacuccauaauguaaacgcagguaaaucaacaacaaacaucaugaucacaaccauaauaauaguaauaauuguaauauuacuaucacuaauagcaguaggauuacuacucuacugcaaagcuagaucuaccccggucacacucucaaaagaccaauuaucuggaauaaacaauauagcauucagcaacuaaggacuaguguccaccugucccuccugggcugcuggauugucucguuuuccugccaaauaaacaggaucagcgcuuuacagaucuaaaaaaaaaaaaaaaaaaaaaaaaaaaaaaaaaaaaaaaaaaaaaaaaaaaaaaaaaaaaaaaaugcaucccccccccccccccccccccccccccccccaaaggcucuuuucagagccaccagaauu

SEQ ID NO: 7636 - RNA, 1919 nt, Artificial Sequence
  mRNA product Design c-1 comprising derived and/or modified sequence from HRSV(A2)__F_DSCav1_mut8 (opt11)
gggagaguccgcucagccagguugcagaagcggcuuagcguguguccuaaucuucucucugcguguagguaggccugugccgcaaacaagcuuaccauggaacuccucauccuuaaagccaacgccauaaccaccauccucaccgccgucaccuucugcuucgcuucuggccaaaacauaaccgaagaguucuaccaauccacgugcucugccgugucaaaaggcuaccucggagcccuccgcacagggugguacacuuccgucaucaccaucgaacucucuaacaucaaagaaaucaagugcaacggcacagacgcgaaagucaagcucaucaaacaagaacuagacaaauacaaaaacgccguaacagaccuccaacuccuaaugcaguccacaccagccacaggcuccggcagcgccaucgccuccggcgucgcugucugcaaaguccuacaccucgaaggcgaagucaacaaaaucaagucagcccuccuuagcaccaacaaagcagucgucucuuuaagcgggugcggagucucuguccuaaccuuuaaaguacucgaccucaaaaacuacaucgacaaacaacuacuaccaauacuaaacaaacagagcugcuccauucccaacaucgaaaccguuaucgaguuccaacaaaagaacaaccgccuccucgaaaucacccgcgaguucuccgucaacgcaggcgucaccaccccagucuccaccuauaugcuaaccaacagcgaacuccucagccucaucaaugacaugccaaucaccaacgaccaaaagaaacucauguccaacaacguacagauaguccgccagcaguccuacagcaucaugugcaucaucaaagaagaagugcucgccuacgugguacaacucccucucuacggagucauugauacacccugcuggaaacuccacacaagcccccucugcacuacaaacaccaaagaaggcucuaacauaugccucacccgcacagaccgugguugguacugcgacaacgccggcuccguauccuucuuuccacaagcugaaaccugcaaaguucaaucaaaccgagucuucugcgacaccaugaacucccucacauugcccagcgaagucaaccucugcaacgucgacaucuucaaccccaaguacgacugcaaaaucaugaccuccaaaaccgacgucagcuccagcgugaucacaagccuaggcgcgaucgucagcugcuacggcaaaaccaaaugcacagccuccaacaaaugccgcggaaucauaaaaacauucaguaacggcugcgacuacguguccaauaaaggagucgacaccguauccgucggaaacacccucuacuacgucaacaaacaagaaggacaaucccucuaugucaaaggcgaacccauuaucaacuucuacgacccccuaguuuuccccuccgacgaguucgacgcaagcauuucccaagucaacgaaaagaucaaucaaucccucgccuucauacgcaaaagcgacgaacuacuacacaacguaaacgccggcaaaagcaccaccaacaucaugaucacaacaaucaucaucgucaucaucgucauccuacucucacucaucgccguuggccuacuacucuacugcaaagcccgcuccacacccgucacccucucaaaagaccaacucuccggcaucaacaacaucgcauucagcaacugaggacuaguguccaccugucccuccugggcugcuggauugucucguuuuccugccaaauaaacaggaucagcgcuuuacagaucuaaaaaaaaaaaaaaaaaaaaaaaaaaaaaaaaaaaaaaaaaaaaaaaaaaaaaaaaaaaaaaaaugcaucccccccccccccccccccccccccccccccaaaggcucuuuucagagccaccagaauu

SEQ ID NO: 7637 - RNA, 2009 nt, Artificial Sequence
  mRNA product Design c-2 comprising derived and/or modified sequence from HRSV(A2)__F_DSCav1_mut8 (opt1)
gggagacuccugucgggcggaaguaggaggaguagaguuuaaaaacaguacucuuuuuccgguucgggacguaguugaagcaacgacaagccggauaaccgcucuugagacaggaagcuuaccauggagcugcucauccugaaggccaacgccaucaccaccauccugacggcggugaccuucugcuucgccagcggccagaacaucaccgaggaguucuaccaguccacgugcagcgccgucuccaagggguaccucggcgcccugcggaccggcugguacaccuccgugaucaccaucgagcugagcaacaucaaggagaucaagugcaacgggaccgacgccaaggugaagcucaucaagcaggagcuggacaaguacaagaacgcggucacggaccugcagcuccugaugcaguccaccccggcaaccggcuccggcuccgccaucgcgagcggcgucgccgugugcaaggugcugcaccucgagggggaggucaacaagaucaagagcgcccugcuguccaccaacaaggccguggugagccucuccggcugcggcgucagcgugcugaccuucaaggugcuggaccucaagaacuacaucgacaagcagcugcugcccauccugaacaagcagagcugcuccauccccaacaucgagacggugaucgaguuccagcagaagaacaaccggcuccuggagaucacccgcgaguucagcgugaacgccggggucaccacccccguguccacguacaugcugaccaacagcgagcuccugucccugaucaacgacaugccgaucaccaacgaccagaagaagcucaugagcaacaacgugcagaucguccggcagcaguccuacagcaucaugugcaucaucaaggaggaggugcuggcguacgugguccagcugccccucuacggcgugaucgacacccccugcuggaagcugcacacgagcccccugugcaccaccaacaccaaggagggguccaacaucugccucacgcgcaccgaccggggcugguacugcgacaacgccggcagcgucuccuucuucccgcaggccgagaccugcaaggugcagagcaaccgcguguucugcgacaccaugaacucccugacgcugcccagcgagguaaaccucugcaacgucgacaucuucaaccccaaguacgacugcaagaucaugaccuccaagaccgacgugagcuccagcgugaucaccucccugggggccaucgucagcugcuacggcaagacgaagugcaccgccagcaacaagugccgggggaucaucaagaccuucuccaacggcugcgacuacgugagcaacaagggcguggacaccguguccgucgggaacacccuguacuacgugaacaagcaggagggccagagccucuacgugaagggggagcccaucaucaacuucuacgacccgcuggucuuccccuccgacgaguucgacgcgagcaucucccaggugaacgagaagaucaaccagagccuggccuucauccgcaaguccgacgagcugcuccacaacgugaacgccggcaagagcacgaccaacaucaugaucaccaccaucaucaucgucaucaucgugauccugcugucccucaucgccguggggcugcugcucuacugcaaggcccggagcacgcccgucacccuguccaaggaccagcugagcggcaucaacaacaucgcguucuccaacugaggacuaguggaagcauuuuccuggcugauuaaaagaaauuacucagcuauggucaucuguuccuguuagaaggcuaugcagcauauuauauacuaugcgcauguuaugaaaugcauaauaaaaaauuuuaaaaaaucuaaaagaucuaaaaaaaaaaaaaaaaaaaaaaaaaaaaaaaaaaaaaaaaaaaaaaaaaaaaaaaaaaaaaaaaugcaucccccccccccccccccccccccccccccccaaaggcucuuuucagagccaccagaauu

SEQ ID NO: 7638 - RNA, 2009 nt, Artificial Sequence
  mRNA product Design c-2 comprising derived and/or modified sequence from HRSV(A2)__F_DSCav1_mut8 (opt1)
gggagacuccugucgggcggaaguaggaggaguagaguuuaaaaacaguacucuuuuuccgguucgggacguaguugaagcaacgacaagccggauaaccgcucuugagacaggaagcuuaccauggagcugcucauccugaaggccaacgccaucaccaccauccugacggcggugaccuucugcuucgccagcggccagaacaucaccgaggaguucuaccaguccacgugcagcgccgucuccaagggguaccucggcgcccugcgcaccgggugguacaccagcgugaucaccaucgagcuguccaacaucaaggagaucaagugcaacggcaccgacgccaaggugaagcucaucaagcaggagcuggacaaguacaagaacgcggucacggaccugcagcuccugaugcagagcacccccgccaccggguccggcagcgccaucgccuccggcguggcggugugcaagguccugcaccucgagggggaggugaacaagaucaagagcgcccugcuguccaccaacaaggccguggucagccucuccggcugcggggugagcgugcugacguucaagguccuggaccucaagaacuacaucgacaagcagcugcugccgauccucaacaagcaguccugcagcauccccaacaucgagaccgugaucgaguuccagcagaagaacaaccggcugcuggagaucacccgcgaguucuccgugaacgccggcgucaccacgcccgugagcaccuacaugcucaccaacuccgagcugcugagccucaucaacgacaugcccaucaccaacgaccagaagaagcugaugagcaacaacgugcagaucguccggcagcaguccuacagcaucaugugcaucaucaaggaggaggugcuggccuacgugguccagcucccgcuguacggggugaucgacacgcccugcuggaagcugcacaccagcccccucugcaccaccaacacgaaggagggcuccaacaucugccugacccgcaccgaccggggcugguacugcgacaacgcgggguccgugagcuucuucccccaggccgagaccugcaagguccaguccaaccgcguguucugcgacacgaugaacagccugacccucccguccgaggucaaccugugcaacguggacaucuucaaccccaaguacgacugcaagaucaugaccagcaagaccgacguguccagcuccgucaucacgagccugggcgccaucguguccugcuacgggaagaccaagugcaccgccagcaacaagugccggggcaucaucaagaccuucuccaacggcugcgacuacgugagcaacaagggggucgacacgguguccgugggcaacacccucuacuacgucaacaagcaggaggggcagagccuguacgugaagggcgagcccaucaucaacuucuacgacccccugguguucccgagcgacgaguucgacgccuccaucagccaggucaacgagaagaucaaccagucccucgcguucauccgcaagagcgacgagcugcugcacaacgugaacgccgggaaguccaccaccaacaucaugaucaccacgaucaucaucgugaucaucgucauccuccugagccugaucgccgugggccuccugcuguacugcaaggcccgguccacccccgugacccugagcaaggaccagcucuccggcaucaacaacaucgccuucagcaacugaggacuaguggaagcauuuuccuggcugauuaaaagaaauuacucagcuauggucaucuguuccuguuagaaggcuaugcagcauauuauauacuaugcgcauguuaugaaaugcauaauaaaaaauuuuaaaaaaucuaaaagaucuaaaaaaaaaaaaaaaaaaaaaaaaaaaaaaaaaaaaaaaaaaaaaaaaaaaaaaaaaaaaaaaaugcaucccccccccccccccccccccccccccccccaaaggcucuuuucagagccaccagaauu

SEQ ID NO: 7639 - RNA, 2009 nt, Artificial Sequence
  mRNA product Design c-2 comprising derived and/or modified sequence from HRSV(A2)__F_DSCav1_mut8 (opt2)
gggagacuccugucgggcggaaguaggaggaguagaguuuaaaaacaguacucuuuuuccgguucgggacguaguugaagcaacgacaagccggauaaccgcucuugagacaggaagcuuaccauggagcuccucauccucaaggccaacgccaucaccaccauccucaccgccgucaccuucugcuucgccuccggccagaacaucaccgaggaguucuaccaguccaccugcuccgccgucuccaagggcuaccucggcgcccuccgcaccggcugguacaccuccgucaucaccaucgagcucuccaacaucaaggagaucaagugcaacggcaccgacgccaaggucaagcucaucaagcaggagcucgacaaguacaagaacgccgucaccgaccuccagcuccucaugcaguccacccccgccaccggcuccggcuccgccaucgccuccggcgucgccgucugcaagguccuccaccucgagggcgaggucaacaagaucaaguccgcccuccucuccaccaacaaggccgucgucucccucuccggcugcggcgucuccguccucaccuucaagguccucgaccucaagaacuacaucgacaagcagcuccuccccauccucaacaagcaguccugcuccauccccaacaucgagaccgucaucgaguuccagcagaagaacaaccgccuccucgagaucacccgcgaguucuccgucaacgccggcgucaccacccccgucuccaccuacaugcucaccaacuccgagcuccucucccucaucaacgacaugcccaucaccaacgaccagaagaagcucauguccaacaacguccagaucguccgccagcaguccuacuccaucaugugcaucaucaaggaggagguccucgccuacgucguccagcucccccucuacggcgucaucgacacccccugcuggaagcuccacaccuccccccucugcaccaccaacaccaaggagggcuccaacaucugccucacccgcaccgaccgcggcugguacugcgacaacgccggcuccgucuccuucuucccccaggccgagaccugcaagguccaguccaaccgcgucuucugcgacaccaugaacucccucacccuccccuccgaggucaaccucugcaacgucgacaucuucaaccccaaguacgacugcaagaucaugaccuccaagaccgacgucuccuccuccgucaucaccucccucggcgccaucgucuccugcuacggcaagaccaagugcaccgccuccaacaagugccgcggcaucaucaagaccuucuccaacggcugcgacuacgucuccaacaagggcgucgacaccgucuccgucggcaacacccucuacuacgucaacaagcaggagggccagucccucuacgucaagggcgagcccaucaucaacuucuacgacccccucgucuuccccuccgacgaguucgacgccuccaucucccaggucaacgagaagaucaaccagucccucgccuucauccgcaaguccgacgagcuccuccacaacgucaacgccggcaaguccaccaccaacaucaugaucaccaccaucaucaucgucaucaucgucauccuccucucccucaucgccgucggccuccuccucuacugcaaggcccgcuccacccccgucacccucuccaaggaccagcucuccggcaucaacaacaucgccuucuccaacugaggacuaguggaagcauuuuccuggcugauuaaaagaaauuacucagcuauggucaucuguuccuguuagaaggcuaugcagcauauuauauacuaugcgcauguuaugaaaugcauaauaaaaaauuuuaaaaaaucuaaaagaucuaaaaaaaaaaaaaaaaaaaaaaaaaaaaaaaaaaaaaaaaaaaaaaaaaaaaaaaaaaaaaaaaugcaucccccccccccccccccccccccccccccccaaaggcucuuuucagagccaccagaauu

SEQ ID NO: 7640 - RNA, 2009 nt, Artificial Sequence
  mRNA product Design c-2 comprising derived and/or modified sequence from HRSV(A2)__F_DSCav1_mut8 (opt3)
gggagacuccugucgggcggaaguaggaggaguagaguuuaaaaacaguacucuuuuuccgguucgggacguaguugaagcaacgacaagccggauaaccgcucuugagacaggaagcuuaccauggagcugcucauccuuaaggccaacgcuauuaccacaauacugacugcagugacguucugcuuugccagcggccagaauaucaccgaagaguucuaccaauccacauguucugcggucucaaaaggguauuugggagcuuuaagaacugguugguacaccaguguuauuacaaucgaacugagcaacauuaaggagaucaaaugcaauggcaccgacgccaaggugaaacuaauaaagcaggaacucgauaaguauaaaaacgcaguaacugaccugcagcuucugaugcaguccacacccgccaccgggucuggaucggcuaucgcaucaggcguggccgucuguaagguguugcaccucgagggugagguuaauaaaauuaagagcgcucugcugaguacgaacaaagccguggucucccucucugggugcggagugagcguauuaacuuuuaagguucuggaucuuaagaauuacaucgacaaacaauugcugccuauucuaaacaagcaguccuguucaaucccaaauauagaaaccgugauugaguuccagcagaaaaacaauaggcuccuggaaaucacacgggaguuuagugucaacgcgggcgugacuaccccggugagcacauauaugcuuaccaauucugagcuguugucccucauuaacgauaugcccaucacgaaugaccaaaagaaacugaugucaaacaacguccagaucguucgccagcagagcuacaguauuaugugcauaaucaaggaagagguguuagcauauguagugcaacugccucucuacggcgucauugauacuccauguuggaaacuucauacaucuccccugugcaccacuaauacaaaggaaggguccaacaucuguuugacccgaacggaccguggaugguacugcgauaaugccgguagcgugucguucuuuccucaggcugagaccuguaagguucagucuaacagaguguucugcgacacaaugaacucccuaacucugccaucagaagucaaucucugcaauguggauauauuuaaccccaaauaugacuguaagauuaugaccaguaaaacagauguaagcuccucuguuaucacuagccugggcgccaucgugucaugcuacgggaagaccaaauguacagcaaguaauaagugcaggggaauuaucaagaccuucuccaacggcugugacuaugucagcaauaaagguguggacacugucucuguggggaacacgcuuuacuauguuaauaagcaagagggacagucacuguacgugaaaggcgagccuauuauaaacuuuuaugauccauugguauucccgagugacgaauuugaugcuagcaucucccaggucaaugagaagauuaaccagucucucgccuucauccggaaaucggacgaacuguuacacaacgugaaugcgggcaagagcacaaccaacaucaugauuacuaccauaaucauuguuaucauugugauccugcuaucccucauagccgucgggcugcuuuuguacugcaaggcacgcucaacacccgugacccugaguaaagaucaacucucuggaaucaauaacauugcuuucagcaauugaggacuaguggaagcauuuuccuggcugauuaaaagaaauuacucagcuauggucaucuguuccuguuagaaggcuaugcagcauauuauauacuaugcgcauguuaugaaaugcauaauaaaaaauuuuaaaaaaucuaaaagaucuaaaaaaaaaaaaaaaaaaaaaaaaaaaaaaaaaaaaaaaaaaaaaaaaaaaaaaaaaaaaaaaaugcaucccccccccccccccccccccccccccccccaaaggcucuuuucagagccaccagaauu

SEQ ID NO: 7641 - RNA, 2009 nt, Artificial Sequence
  mRNA product Design c-2 comprising derived and/or modified sequence from HRSV(A2)__F_DSCav1_mut8 (opt4)
gggagacuccugucgggcggaaguaggaggaguagaguuuaaaaacaguacucuuuuuccgguucgggacguaguugaagcaacgacaagccggauaaccgcucuugagacaggaagcuuaccauggagcugcugauccugaaggccaacgccaucaccaccauccugaccgccgugaccuucugcuucgccagcggccagaacaucaccgaggaguucuaccagagcaccugcagcgccgugagcaagggcuaccugggcgcccugagaaccggcugguacaccagcgugaucaccaucgagcugagcaacaucaaggagaucaagugcaacggcaccgacgccaaggugaagcugaucaagcaggagcuggacaaguacaagaacgccgugaccgaccugcagcugcugaugcagagcacccccgccaccggcagcggcagcgccaucgccagcggcguggccgugugcaaggugcugcaccuggagggcgaggugaacaagaucaagagcgcccugcugagcaccaacaaggccguggugagccugagcggcugcggcgugagcgugcugaccuucaaggugcuggaccugaagaacuacaucgacaagcagcugcugcccauccugaacaagcagagcugcagcauccccaacaucgagaccgugaucgaguuccagcagaagaacaacagacugcuggagaucaccagagaguucagcgugaacgccggcgugaccacccccgugagcaccuacaugcugaccaacagcgagcugcugagccugaucaacgacaugcccaucaccaacgaccagaagaagcugaugagcaacaacgugcagaucgugagacagcagagcuacagcaucaugugcaucaucaaggaggaggugcuggccuacguggugcagcugccccuguacggcgugaucgacacccccugcuggaagcugcacaccagcccccugugcaccaccaacaccaaggagggcagcaacaucugccugaccagaaccgacagaggcugguacugcgacaacgccggcagcgugagcuucuucccccaggccgagaccugcaaggugcagagcaacagaguguucugcgacaccaugaacagccugacccugcccagcgaggugaaccugugcaacguggacaucuucaaccccaaguacgacugcaagaucaugaccagcaagaccgacgugagcagcagcgugaucaccagccugggcgccaucgugagcugcuacggcaagaccaagugcaccgccagcaacaagugcagaggcaucaucaagaccuucagcaacggcugcgacuacgugagcaacaagggcguggacaccgugagcgugggcaacacccuguacuacgugaacaagcaggagggccagagccuguacgugaagggcgagcccaucaucaacuucuacgacccccugguguuccccagcgacgaguucgacgccagcaucagccaggugaacgagaagaucaaccagagccuggccuucaucagaaagagcgacgagcugcugcacaacgugaacgccggcaagagcaccaccaacaucaugaucaccaccaucaucaucgugaucaucgugauccugcugagccugaucgccgugggccugcugcuguacugcaaggccagaagcacccccgugacccugagcaaggaccagcugagcggcaucaacaacaucgccuucagcaacugaggacuaguggaagcauuuuccuggcugauuaaaagaaauuacucagcuauggucaucuguuccuguuagaaggcuaugcagcauauuauauacuaugcgcauguuaugaaaugcauaauaaaaaauuuuaaaaaaucuaaaagaucuaaaaaaaaaaaaaaaaaaaaaaaaaaaaaaaaaaaaaaaaaaaaaaaaaaaaaaaaaaaaaaaaugcaucccccccccccccccccccccccccccccccaaaggcucuuuucagagccaccagaauu

SEQ ID NO: 7642 - RNA, 2009 nt, Artificial Sequence
  mRNA product Design c-2 comprising derived and/or modified sequence from HRSV(A2)__F_DSCav1_mut8 (opt5)
gggagacuccugucgggcggaaguaggaggaguagaguuuaaaaacaguacucuuuuuccgguucgggacguaguugaagcaacgacaagccggauaaccgcucuugagacaggaagcuuaccauggagcugcucauccugaaggccaacgcuauuaccacaauccuuacggccgugaccuucugcuuugcgagcggccagaauauuacagaagaguucuaccaauccaccuguucugcugucagcaaaggguaucugggagcccucagaacaggcugguacaccuccguuaucacaauugaacugucuaacaucaaggagaucaaaugcaaugggaccgacgccaaggugaaacuuauuaagcaggaacuggauaaguauaaaaacgcugugacggaccuccagcugcugaugcagagcacccccgccacaggauccggcucugcuaucgccagcggggucgcgguguguaagguucuccaccuggagggagaggugaauaaaauuaaguccgcccuucugagcaccaacaaagcugucgugucucucuccggcugcggcguuagcgugcugacauuuaagguccuugaucugaagaauuacaucgacaaacaacuccugccuauucugaacaagcagucuuguuccaucccgaauauugaaaccgugaucgaguuccagcagaaaaacaaucggcuccuggaaaucacgcgcgaguuuagcgugaacgccggggucacaacccccguuucuacauauaugcuuaccaauuccgagcugcucagccugauuaacgauaugccuaucaccaaugaccaaaagaaacuuauguccaacaacgugcagauugugagacagcagucuuacagcaucaugugcauuaucaaggaagagguccuggcuuaugugguucaacucccccuguacggagugaucgauacaccuuguuggaaacugcauacgagcccccucugcaccacaaauaccaaggaaggcagcaacauuugucugacacggaccgaccgcgggugguacugcgauaaugccggaucugucuccuucuuuccucaggcggagacguguaaggugcagagcaacagaguuuucugcgacacaaugaacucucuuacccugccgagcgaagugaaucucugcaaugucgauaucuuuaaccccaaauaugacuguaagauuaugaccuccaaaacagaugugucuagcuccgucaucaccagccugggcgccauugugucuugcuacgggaagacaaaauguacggcuuccaauaagugccggggaaucaucaagaccuucagcaacggcugugacuauguuucuaauaaaggcguggacacagucuccguggggaacacccuuuacuauguuaauaagcaagagggacagagccuguacgugaaaggcgagccuauuaucaacuuuuaugauccccucgucuucccuuccgacgaauuugaugccucuauuagccaggugaaugagaagaucaaccagucccuggcuuucauucgcaaaucugacgaacugcuccacaacgugaaugccgggaaguccacaaccaacaucaugauuacgaccaucaucauuguuaucauugucauccugcuuucccugauugccgugggacuccugcuguacugcaaggcuagaagcacacccgugacccuuucuaaagaucaacucuccggcaucaauaacaucgcguucagcaauugaggacuaguggaagcauuuuccuggcugauuaaaagaaauuacucagcuauggucaucuguuccuguuagaaggcuaugcagcauauuauauacuaugcgcauguuaugaaaugcauaauaaaaaauuuuaaaaaaucuaaaagaucuaaaaaaaaaaaaaaaaaaaaaaaaaaaaaaaaaaaaaaaaaaaaaaaaaaaaaaaaaaaaaaaaugcaucccccccccccccccccccccccccccccccaaaggcucuuuucagagccaccagaauu

SEQ ID NO: 7643 - RNA, 2009 nt, Artificial Sequence
  mRNA product Design c-2 comprising derived and/or modified sequence from HRSV(A2)__F_DSCav1_mut8 (opt6)
gggagacuccugucgggcggaaguaggaggaguagaguuuaaaaacaguacucuuuuuccgguucgggacguaguugaagcaacgacaagccggauaaccgcucuugagacaggaagcuuaccauggaacuauuaauauuaaaagcaaacgcaaucacaacuauacuaacagcaguaacauucugcuuugccucaggucaaaacauaacagaggaauuuuaccaauccacaugcucugcuguaagcaaaggauaccucggagcauuaagaacuggaugguacaccucaguaauaacuauagaacuaucaaacauaaaagaaauaaaauguaauggcacagacgcaaaagugaaauuaaucaaacaagaacucgauaaauacaaaaaugccguaaccgaucuccaacuuuuaaugcaaagcacacccgcaacagguuccgggucagcaauagcaagcggaguugcaguaugcaaaguacuacacuuagaaggagaaguaaauaaaaucaaaucagccuuacuaucaacaaauaaagcaguuguaucacucucaggaugcggaguauccguacuaacauuuaaaguacuagaucuaaaaaacuacauagauaaacaacucuuaccaauacuaaauaaacaaucauguuccauacccaacauagaaaccguuaucgaauuucaacaaaaaaacaacagauuacuagaaaucacacgagaauuuucaguaaaugcuggagucacaacaccaguuaguacauacaugcucaccaauucagaacuacuaaguuuaauuaacgauaugccaauaacaaacgaccaaaaaaaacuaaugucaaauaacguacaaauaguaagacaacaaucauacucaaucaugugcauaauaaaagaagaaguacuagccuauguaguccaauuaccacucuacggcguaaucgacaccccaugcuggaaauuacacacaagcccauuaugcaccaccaacacaaaagaagguucaaacauuugcuuaaccagaaccgaucgaggaugguacugcgauaacgcaggaucugucuccuuuuucccacaagccgaaacaugcaaaguucaaucaaaccgaguuuucugugacacuaugaacucacucacacuuccaagcgaaguaaaccuaugcaacguagauauauuuaacccuaaauacgacugcaaaauaaugacaagcaaaacagacguuaguucaucaguaauuacaagucuaggcgcaauagugucaugcuacggaaaaacaaaaugcaccgcauccaauaaaugccgaggaaucauuaaaacauucucaaacggaugcgacuacgucagcaauaaaggaguagacacuguuucuguaggaaacacccuauacuauguaaacaaacaagaaggucaaucacuauacguaaagggagaaccaauuauaaauuuuuacgaccccuuaguauuuccaagugaugaauuugacgcaucuauaagucaaguuaacgaaaaaauuaaccaaucacuugcauuuauaagaaaaucagacgaacuacuccauaauguaaacgcagguaaaucaacaacaaacaucaugaucacaaccauaauaauaguaauaauuguaauauuacuaucacuaauagcaguaggauuacuacucuacugcaaagcuagaucuaccccggucacacucucaaaagaccaauuaucuggaauaaacaauauagcauucagcaacuaaggacuaguggaagcauuuuccuggcugauuaaaagaaauuacucagcuauggucaucuguuccuguuagaaggcuaugcagcauauuauauacuaugcgcauguuaugaaaugcauaauaaaaaauuuuaaaaaaucuaaaagaucuaaaaaaaaaaaaaaaaaaaaaaaaaaaaaaaaaaaaaaaaaaaaaaaaaaaaaaaaaaaaaaaaugcaucccccccccccccccccccccccccccccccaaaggcucuuuucagagccaccagaauu

SEQ ID NO: 7644 - RNA, 2009 nt, Artificial Sequence
  mRNA product Design c-2 comprising derived and/or modified sequence from HRSV(A2)__F_DSCav1_mut8 (opt11)
gggagacuccugucgggcggaaguaggaggaguagaguuuaaaaacaguacucuuuuuccgguucgggacguaguugaagcaacgacaagccggauaaccgcucuugagacaggaagcuuaccauggaacuccucauccuuaaagccaacgccauaaccaccauccucaccgccgucaccuucugcuucgcuucuggccaaaacauaaccgaagaguucuaccaauccacgugcucugccgugucaaaaggcuaccucggagcccuccgcacagggugguacacuuccgucaucaccaucgaacucucuaacaucaaagaaaucaagugcaacggcacagacgcgaaagucaagcucaucaaacaagaacuagacaaauacaaaaacgccguaacagaccuccaacuccuaaugcaguccacaccagccacaggcuccggcagcgccaucgccuccggcgucgcugucugcaaaguccuacaccucgaaggcgaagucaacaaaaucaagucagcccuccuuagcaccaacaaagcagucgucucuuuaagcgggugcggagucucuguccuaaccuuuaaaguacucgaccucaaaaacuacaucgacaaacaacuacuaccaauacuaaacaaacagagcugcuccauucccaacaucgaaaccguuaucgaguuccaacaaaagaacaaccgccuccucgaaaucacccgcgaguucuccgucaacgcaggcgucaccaccccagucuccaccuauaugcuaaccaacagcgaacuccucagccucaucaaugacaugccaaucaccaacgaccaaaagaaacucauguccaacaacguacagauaguccgccagcaguccuacagcaucaugugcaucaucaaagaagaagugcucgccuacgugguacaacucccucucuacggagucauugauacacccugcuggaaacuccacacaagcccccucugcacuacaaacaccaaagaaggcucuaacauaugccucacccgcacagaccgugguugguacugcgacaacgccggcuccguauccuucuuuccacaagcugaaaccugcaaaguucaaucaaaccgagucuucugcgacaccaugaacucccucacauugcccagcgaagucaaccucugcaacgucgacaucuucaaccccaaguacgacugcaaaaucaugaccuccaaaaccgacgucagcuccagcgugaucacaagccuaggcgcgaucgucagcugcuacggcaaaaccaaaugcacagccuccaacaaaugccgcggaaucauaaaaacauucaguaacggcugcgacuacguguccaauaaaggagucgacaccguauccgucggaaacacccucuacuacgucaacaaacaagaaggacaaucccucuaugucaaaggcgaacccauuaucaacuucuacgacccccuaguuuuccccuccgacgaguucgacgcaagcauuucccaagucaacgaaaagaucaaucaaucccucgccuucauacgcaaaagcgacgaacuacuacacaacguaaacgccggcaaaagcaccaccaacaucaugaucacaacaaucaucaucgucaucaucgucauccuacucucacucaucgccguuggccuacuacucuacugcaaagcccgcuccacacccgucacccucucaaaagaccaacucuccggcaucaacaacaucgcauucagcaacugaggacuaguggaagcauuuuccuggcugauuaaaagaaauuacucagcuauggucaucuguuccuguuagaaggcuaugcagcauauuauauacuaugcgcauguuaugaaaugcauaauaaaaaauuuuaaaaaaucuaaaagaucuaaaaaaaaaaaaaaaaaaaaaaaaaaaaaaaaaaaaaaaaaaaaaaaaaaaaaaaaaaaaaaaaugcaucccccccccccccccccccccccccccccccaaaggcucuuuucagagccaccagaauu

SEQ ID NO: 7645 - RNA, 1986 nt, Artificial Sequence
  mRNA product Design c-3 comprising derived and/or modified sequence from HRSV(A2)__F_DSCav1_mut8 (opt1)
gggagaguccgcucagccagguugcagaagcggcuuagcguguguccuaaucuucucucugcguguagguaggccugugccgcaaacaagcuuaccauggagcugcucauccugaaggccaacgccaucaccaccauccugacggcggugaccuucugcuucgccagcggccagaacaucaccgaggaguucuaccaguccacgugcagcgccgucuccaagggguaccucggcgcccugcggaccggcugguacaccuccgugaucaccaucgagcugagcaacaucaaggagaucaagugcaacgggaccgacgccaaggugaagcucaucaagcaggagcuggacaaguacaagaacgcggucacggaccugcagcuccugaugcaguccaccccggcaaccggcuccggcuccgccaucgcgagcggcgucgccgugugcaaggugcugcaccucgagggggaggucaacaagaucaagagcgcccugcuguccaccaacaaggccguggugagccucuccggcugcggcgucagcgugcugaccuucaaggugcuggaccucaagaacuacaucgacaagcagcugcugcccauccugaacaagcagagcugcuccauccccaacaucgagacggugaucgaguuccagcagaagaacaaccggcuccuggagaucacccgcgaguucagcgugaacgccggggucaccacccccguguccacguacaugcugaccaacagcgagcuccugucccugaucaacgacaugccgaucaccaacgaccagaagaagcucaugagcaacaacgugcagaucguccggcagcaguccuacagcaucaugugcaucaucaaggaggaggugcuggcguacgugguccagcugccccucuacggcgugaucgacacccccugcuggaagcugcacacgagcccccugugcaccaccaacaccaaggagggguccaacaucugccucacgcgcaccgaccggggcugguacugcgacaacgccggcagcgucuccuucuucccgcaggccgagaccugcaaggugcagagcaaccgcguguucugcgacaccaugaacucccugacgcugcccagcgagguaaaccucugcaacgucgacaucuucaaccccaaguacgacugcaagaucaugaccuccaagaccgacgugagcuccagcgugaucaccucccugggggccaucgucagcugcuacggcaagacgaagugcaccgccagcaacaagugccgggggaucaucaagaccuucuccaacggcugcgacuacgugagcaacaagggcguggacaccguguccgucgggaacacccuguacuacgugaacaagcaggagggccagagccucuacgugaagggggagcccaucaucaacuucuacgacccgcuggucuuccccuccgacgaguucgacgcgagcaucucccaggugaacgagaagaucaaccagagccuggccuucauccgcaaguccgacgagcugcuccacaacgugaacgccggcaagagcacgaccaacaucaugaucaccaccaucaucaucgucaucaucgugauccugcugucccucaucgccguggggcugcugcucuacugcaaggcccggagcacgcccgucacccuguccaaggaccagcugagcggcaucaacaacaucgcguucuccaacugaggacuaguacuggcugcaucucccuuuccucuguccuccauccuucucccaggauggugaagggggaccugguacccagugauccccaccccaggauccuaaaucaugacuuaccugcuaauaaaaacucauuggaaaagugagaagaucuaaaaaaaaaaaaaaaaaaaaaaaaaaaaaaaaaaaaaaaaaaaaaaaaaaaaaaaaaaaaaaaaugcaucccccccccccccccccccccccccccccccaaaggcucuuuucagagccaccagaauu

SEQ ID NO: 7646 - RNA, 1986 nt, Artificial Sequence
  mRNA product Design c-3 comprising derived and/or modified sequence from HRSV(A2)__F_DSCav1_mut8 (opt1)
gggagaguccgcucagccagguugcagaagcggcuuagcguguguccuaaucuucucucugcguguagguaggccugugccgcaaacaagcuuaccauggagcugcucauccugaaggccaacgccaucaccaccauccugacggcggugaccuucugcuucgccagcggccagaacaucaccgaggaguucuaccaguccacgugcagcgccgucuccaagggguaccucggcgcccugcgcaccgggugguacaccagcgugaucaccaucgagcuguccaacaucaaggagaucaagugcaacggcaccgacgccaaggugaagcucaucaagcaggagcuggacaaguacaagaacgcggucacggaccugcagcuccugaugcagagcacccccgccaccggguccggcagcgccaucgccuccggcguggcggugugcaagguccugcaccucgagggggaggugaacaagaucaagagcgcccugcuguccaccaacaaggccguggucagccucuccggcugcggggugagcgugcugacguucaagguccuggaccucaagaacuacaucgacaagcagcugcugccgauccucaacaagcaguccugcagcauccccaacaucgagaccgugaucgaguuccagcagaagaacaaccggcugcuggagaucacccgcgaguucuccgugaacgccggcgucaccacgcccgugagcaccuacaugcucaccaacuccgagcugcugagccucaucaacgacaugcccaucaccaacgaccagaagaagcugaugagcaacaacgugcagaucguccggcagcaguccuacagcaucaugugcaucaucaaggaggaggugcuggccuacgugguccagcucccgcuguacggggugaucgacacgcccugcuggaagcugcacaccagcccccucugcaccaccaacacgaaggagggcuccaacaucugccugacccgcaccgaccggggcugguacugcgacaacgcgggguccgugagcuucuucccccaggccgagaccugcaagguccaguccaaccgcguguucugcgacacgaugaacagccugacccucccguccgaggucaaccugugcaacguggacaucuucaaccccaaguacgacugcaagaucaugaccagcaagaccgacguguccagcuccgucaucacgagccugggcgccaucguguccugcuacgggaagaccaagugcaccgccagcaacaagugccggggcaucaucaagaccuucuccaacggcugcgacuacgugagcaacaagggggucgacacgguguccgugggcaacacccucuacuacgucaacaagcaggaggggcagagccuguacgugaagggcgagcccaucaucaacuucuacgacccccugguguucccgagcgacgaguucgacgccuccaucagccaggucaacgagaagaucaaccagucccucgcguucauccgcaagagcgacgagcugcugcacaacgugaacgccgggaaguccaccaccaacaucaugaucaccacgaucaucaucgugaucaucgucauccuccugagccugaucgccgugggccuccugcuguacugcaaggcccgguccacccccgugacccugagcaaggaccagcucuccggcaucaacaacaucgccuucagcaacugaggacuaguacuggcugcaucucccuuuccucuguccuccauccuucucccaggauggugaagggggaccugguacccagugauccccaccccaggauccuaaaucaugacuuaccugcuaauaaaaacucauuggaaaagugagaagaucuaaaaaaaaaaaaaaaaaaaaaaaaaaaaaaaaaaaaaaaaaaaaaaaaaaaaaaaaaaaaaaaaugcaucccccccccccccccccccccccccccccccaaaggcucuuuucagagccaccagaauu

SEQ ID NO: 7647 - RNA, 1986 nt, Artificial Sequence
  mRNA product Design c-3 comprising derived and/or modified sequence from HRSV(A2)__F_DSCav1_mut8 (opt2)
gggagaguccgcucagccagguugcagaagcggcuuagcguguguccuaaucuucucucugcguguagguaggccugugccgcaaacaagcuuaccauggagcuccucauccucaaggccaacgccaucaccaccauccucaccgccgucaccuucugcuucgccuccggccagaacaucaccgaggaguucuaccaguccaccugcuccgccgucuccaagggcuaccucggcgcccuccgcaccggcugguacaccuccgucaucaccaucgagcucuccaacaucaaggagaucaagugcaacggcaccgacgccaaggucaagcucaucaagcaggagcucgacaaguacaagaacgccgucaccgaccuccagcuccucaugcaguccacccccgccaccggcuccggcuccgccaucgccuccggcgucgccgucugcaagguccuccaccucgagggcgaggucaacaagaucaaguccgcccuccucuccaccaacaaggccgucgucucccucuccggcugcggcgucuccguccucaccuucaagguccucgaccucaagaacuacaucgacaagcagcuccuccccauccucaacaagcaguccugcuccauccccaacaucgagaccgucaucgaguuccagcagaagaacaaccgccuccucgagaucacccgcgaguucuccgucaacgccggcgucaccacccccgucuccaccuacaugcucaccaacuccgagcuccucucccucaucaacgacaugcccaucaccaacgaccagaagaagcucauguccaacaacguccagaucguccgccagcaguccuacuccaucaugugcaucaucaaggaggagguccucgccuacgucguccagcucccccucuacggcgucaucgacacccccugcuggaagcuccacaccuccccccucugcaccaccaacaccaaggagggcuccaacaucugccucacccgcaccgaccgcggcugguacugcgacaacgccggcuccgucuccuucuucccccaggccgagaccugcaagguccaguccaaccgcgucuucugcgacaccaugaacucccucacccuccccuccgaggucaaccucugcaacgucgacaucuucaaccccaaguacgacugcaagaucaugaccuccaagaccgacgucuccuccuccgucaucaccucccucggcgccaucgucuccugcuacggcaagaccaagugcaccgccuccaacaagugccgcggcaucaucaagaccuucuccaacggcugcgacuacgucuccaacaagggcgucgacaccgucuccgucggcaacacccucuacuacgucaacaagcaggagggccagucccucuacgucaagggcgagcccaucaucaacuucuacgacccccucgucuuccccuccgacgaguucgacgccuccaucucccaggucaacgagaagaucaaccagucccucgccuucauccgcaaguccgacgagcuccuccacaacgucaacgccggcaaguccaccaccaacaucaugaucaccaccaucaucaucgucaucaucgucauccuccucucccucaucgccgucggccuccuccucuacugcaaggcccgcuccacccccgucacccucuccaaggaccagcucuccggcaucaacaacaucgccuucuccaacugaggacuaguacuggcugcaucucccuuuccucuguccuccauccuucucccaggauggugaagggggaccugguacccagugauccccaccccaggauccuaaaucaugacuuaccugcuaauaaaaacucauuggaaaagugagaagaucuaaaaaaaaaaaaaaaaaaaaaaaaaaaaaaaaaaaaaaaaaaaaaaaaaaaaaaaaaaaaaaaaugcaucccccccccccccccccccccccccccccccaaaggcucuuuucagagccaccagaauu

SEQ ID NO: 7648 - RNA, 1986 nt, Artificial Sequence
  mRNA product Design c-3 comprising derived and/or modified sequence from HRSV(A2)__F_DSCav1_mut8 (opt3)
gggagaguccgcucagccagguugcagaagcggcuuagcguguguccuaaucuucucucugcguguagguaggccugugccgcaaacaagcuuaccauggagcugcucauccuuaaggccaacgcuauuaccacaauacugacugcagugacguucugcuuugccagcggccagaauaucaccgaagaguucuaccaauccacauguucugcggucucaaaaggguauuugggagcuuuaagaacugguugguacaccaguguuauuacaaucgaacugagcaacauuaaggagaucaaaugcaauggcaccgacgccaaggugaaacuaauaaagcaggaacucgauaaguauaaaaacgcaguaacugaccugcagcuucugaugcaguccacacccgccaccgggucuggaucggcuaucgcaucaggcguggccgucuguaagguguugcaccucgagggugagguuaauaaaauuaagagcgcucugcugaguacgaacaaagccguggucucccucucugggugcggagugagcguauuaacuuuuaagguucuggaucuuaagaauuacaucgacaaacaauugcugccuauucuaaacaagcaguccuguucaaucccaaauauagaaaccgugauugaguuccagcagaaaaacaauaggcuccuggaaaucacacgggaguuuagugucaacgcgggcgugacuaccccggugagcacauauaugcuuaccaauucugagcuguugucccucauuaacgauaugcccaucacgaaugaccaaaagaaacugaugucaaacaacguccagaucguucgccagcagagcuacaguauuaugugcauaaucaaggaagagguguuagcauauguagugcaacugccucucuacggcgucauugauacuccauguuggaaacuucauacaucuccccugugcaccacuaauacaaaggaaggguccaacaucuguuugacccgaacggaccguggaugguacugcgauaaugccgguagcgugucguucuuuccucaggcugagaccuguaagguucagucuaacagaguguucugcgacacaaugaacucccuaacucugccaucagaagucaaucucugcaauguggauauauuuaaccccaaauaugacuguaagauuaugaccaguaaaacagauguaagcuccucuguuaucacuagccugggcgccaucgugucaugcuacgggaagaccaaauguacagcaaguaauaagugcaggggaauuaucaagaccuucuccaacggcugugacuaugucagcaauaaagguguggacacugucucuguggggaacacgcuuuacuauguuaauaagcaagagggacagucacuguacgugaaaggcgagccuauuauaaacuuuuaugauccauugguauucccgagugacgaauuugaugcuagcaucucccaggucaaugagaagauuaaccagucucucgccuucauccggaaaucggacgaacuguuacacaacgugaaugcgggcaagagcacaaccaacaucaugauuacuaccauaaucauuguuaucauugugauccugcuaucccucauagccgucgggcugcuuuuguacugcaaggcacgcucaacacccgugacccugaguaaagaucaacucucuggaaucaauaacauugcuuucagcaauugaggacuaguacuggcugcaucucccuuuccucuguccuccauccuucucccaggauggugaagggggaccugguacccagugauccccaccccaggauccuaaaucaugacuuaccugcuaauaaaaacucauuggaaaagugagaagaucuaaaaaaaaaaaaaaaaaaaaaaaaaaaaaaaaaaaaaaaaaaaaaaaaaaaaaaaaaaaaaaaaugcaucccccccccccccccccccccccccccccccaaaggcucuuuucagagccaccagaauu

SEQ ID NO: 7649 - RNA, 1986 nt, Artificial Sequence
  mRNA product Design c-3 comprising derived and/or modified sequence from HRSV(A2)__F_DSCav1_mut8 (opt4)
gggagaguccgcucagccagguugcagaagcggcuuagcguguguccuaaucuucucucugcguguagguaggccugugccgcaaacaagcuuaccauggagcugcugauccugaaggccaacgccaucaccaccauccugaccgccgugaccuucugcuucgccagcggccagaacaucaccgaggaguucuaccagagcaccugcagcgccgugagcaagggcuaccugggcgcccugagaaccggcugguacaccagcgugaucaccaucgagcugagcaacaucaaggagaucaagugcaacggcaccgacgccaaggugaagcugaucaagcaggagcuggacaaguacaagaacgccgugaccgaccugcagcugcugaugcagagcacccccgccaccggcagcggcagcgccaucgccagcggcguggccgugugcaaggugcugcaccuggagggcgaggugaacaagaucaagagcgcccugcugagcaccaacaaggccguggugagccugagcggcugcggcgugagcgugcugaccuucaaggugcuggaccugaagaacuacaucgacaagcagcugcugcccauccugaacaagcagagcugcagcauccccaacaucgagaccgugaucgaguuccagcagaagaacaacagacugcuggagaucaccagagaguucagcgugaacgccggcgugaccacccccgugagcaccuacaugcugaccaacagcgagcugcugagccugaucaacgacaugcccaucaccaacgaccagaagaagcugaugagcaacaacgugcagaucgugagacagcagagcuacagcaucaugugcaucaucaaggaggaggugcuggccuacguggugcagcugccccuguacggcgugaucgacacccccugcuggaagcugcacaccagcccccugugcaccaccaacaccaaggagggcagcaacaucugccugaccagaaccgacagaggcugguacugcgacaacgccggcagcgugagcuucuucccccaggccgagaccugcaaggugcagagcaacagaguguucugcgacaccaugaacagccugacccugcccagcgaggugaaccugugcaacguggacaucuucaaccccaaguacgacugcaagaucaugaccagcaagaccgacgugagcagcagcgugaucaccagccugggcgccaucgugagcugcuacggcaagaccaagugcaccgccagcaacaagugcagaggcaucaucaagaccuucagcaacggcugcgacuacgugagcaacaagggcguggacaccgugagcgugggcaacacccuguacuacgugaacaagcaggagggccagagccuguacgugaagggcgagcccaucaucaacuucuacgacccccugguguuccccagcgacgaguucgacgccagcaucagccaggugaacgagaagaucaaccagagccuggccuucaucagaaagagcgacgagcugcugcacaacgugaacgccggcaagagcaccaccaacaucaugaucaccaccaucaucaucgugaucaucgugauccugcugagccugaucgccgugggccugcugcuguacugcaaggccagaagcacccccgugacccugagcaaggaccagcugagcggcaucaacaacaucgccuucagcaacugaggacuaguacuggcugcaucucccuuuccucuguccuccauccuucucccaggauggugaagggggaccugguacccagugauccccaccccaggauccuaaaucaugacuuaccugcuaauaaaaacucauuggaaaagugagaagaucuaaaaaaaaaaaaaaaaaaaaaaaaaaaaaaaaaaaaaaaaaaaaaaaaaaaaaaaaaaaaaaaaugcaucccccccccccccccccccccccccccccccaaaggcucuuuucagagccaccagaauu

SEQ ID NO: 7650 - RNA, 1986 nt, Artificial Sequence
  mRNA product Design c-3 comprising derived and/or modified sequence from HRSV(A2)__F_DSCav1_mut8 (opt5)
gggagaguccgcucagccagguugcagaagcggcuuagcguguguccuaaucuucucucugcguguagguaggccugugccgcaaacaagcuuaccauggagcugcucauccugaaggccaacgcuauuaccacaauccuuacggccgugaccuucugcuuugcgagcggccagaauauuacagaagaguucuaccaauccaccuguucugcugucagcaaaggguaucugggagcccucagaacaggcugguacaccuccguuaucacaauugaacugucuaacaucaaggagaucaaaugcaaugggaccgacgccaaggugaaacuuauuaagcaggaacuggauaaguauaaaaacgcugugacggaccuccagcugcugaugcagagcacccccgccacaggauccggcucugcuaucgccagcggggucgcgguguguaagguucuccaccuggagggagaggugaauaaaauuaaguccgcccuucugagcaccaacaaagcugucgugucucucuccggcugcggcguuagcgugcugacauuuaagguccuugaucugaagaauuacaucgacaaacaacuccugccuauucugaacaagcagucuuguuccaucccgaauauugaaaccgugaucgaguuccagcagaaaaacaaucggcuccuggaaaucacgcgcgaguuuagcgugaacgccggggucacaacccccguuucuacauauaugcuuaccaauuccgagcugcucagccugauuaacgauaugccuaucaccaaugaccaaaagaaacuuauguccaacaacgugcagauugugagacagcagucuuacagcaucaugugcauuaucaaggaagagguccuggcuuaugugguucaacucccccuguacggagugaucgauacaccuuguuggaaacugcauacgagcccccucugcaccacaaauaccaaggaaggcagcaacauuugucugacacggaccgaccgcgggugguacugcgauaaugccggaucugucuccuucuuuccucaggcggagacguguaaggugcagagcaacagaguuuucugcgacacaaugaacucucuuacccugccgagcgaagugaaucucugcaaugucgauaucuuuaaccccaaauaugacuguaagauuaugaccuccaaaacagaugugucuagcuccgucaucaccagccugggcgccauugugucuugcuacgggaagacaaaauguacggcuuccaauaagugccggggaaucaucaagaccuucagcaacggcugugacuauguuucuaauaaaggcguggacacagucuccguggggaacacccuuuacuauguuaauaagcaagagggacagagccuguacgugaaaggcgagccuauuaucaacuuuuaugauccccucgucuucccuuccgacgaauuugaugccucuauuagccaggugaaugagaagaucaaccagucccuggcuuucauucgcaaaucugacgaacugcuccacaacgugaaugccgggaaguccacaaccaacaucaugauuacgaccaucaucauuguuaucauugucauccugcuuucccugauugccgugggacuccugcuguacugcaaggcuagaagcacacccgugacccuuucuaaagaucaacucuccggcaucaauaacaucgcguucagcaauugaggacuaguacuggcugcaucucccuuuccucuguccuccauccuucucccaggauggugaagggggaccugguacccagugauccccaccccaggauccuaaaucaugacuuaccugcuaauaaaaacucauuggaaaagugagaagaucuaaaaaaaaaaaaaaaaaaaaaaaaaaaaaaaaaaaaaaaaaaaaaaaaaaaaaaaaaaaaaaaaugcaucccccccccccccccccccccccccccccccaaaggcucuuuucagagccaccagaauu

SEQ ID NO: 7651 - RNA, 1986 nt, Artificial Sequence
  mRNA product Design c-3 comprising derived and/or modified sequence from HRSV(A2)__F_DSCav1_mut8 (opt6)
gggagaguccgcucagccagguugcagaagcggcuuagcguguguccuaaucuucucucugcguguagguaggccugugccgcaaacaagcuuaccauggaacuauuaauauuaaaagcaaacgcaaucacaacuauacuaacagcaguaacauucugcuuugccucaggucaaaacauaacagaggaauuuuaccaauccacaugcucugcuguaagcaaaggauaccucggagcauuaagaacuggaugguacaccucaguaauaacuauagaacuaucaaacauaaaagaaauaaaauguaauggcacagacgcaaaagugaaauuaaucaaacaagaacucgauaaauacaaaaaugccguaaccgaucuccaacuuuuaaugcaaagcacacccgcaacagguuccgggucagcaauagcaagcggaguugcaguaugcaaaguacuacacuuagaaggagaaguaaauaaaaucaaaucagccuuacuaucaacaaauaaagcaguuguaucacucucaggaugcggaguauccguacuaacauuuaaaguacuagaucuaaaaaacuacauagauaaacaacucuuaccaauacuaaauaaacaaucauguuccauacccaacauagaaaccguuaucgaauuucaacaaaaaaacaacagauuacuagaaaucacacgagaauuuucaguaaaugcuggagucacaacaccaguuaguacauacaugcucaccaauucagaacuacuaaguuuaauuaacgauaugccaauaacaaacgaccaaaaaaaacuaaugucaaauaacguacaaauaguaagacaacaaucauacucaaucaugugcauaauaaaagaagaaguacuagccuauguaguccaauuaccacucuacggcguaaucgacaccccaugcuggaaauuacacacaagcccauuaugcaccaccaacacaaaagaagguucaaacauuugcuuaaccagaaccgaucgaggaugguacugcgauaacgcaggaucugucuccuuuuucccacaagccgaaacaugcaaaguucaaucaaaccgaguuuucugugacacuaugaacucacucacacuuccaagcgaaguaaaccuaugcaacguagauauauuuaacccuaaauacgacugcaaaauaaugacaagcaaaacagacguuaguucaucaguaauuacaagucuaggcgcaauagugucaugcuacggaaaaacaaaaugcaccgcauccaauaaaugccgaggaaucauuaaaacauucucaaacggaugcgacuacgucagcaauaaaggaguagacacuguuucuguaggaaacacccuauacuauguaaacaaacaagaaggucaaucacuauacguaaagggagaaccaauuauaaauuuuuacgaccccuuaguauuuccaagugaugaauuugacgcaucuauaagucaaguuaacgaaaaaauuaaccaaucacuugcauuuauaagaaaaucagacgaacuacuccauaauguaaacgcagguaaaucaacaacaaacaucaugaucacaaccauaauaauaguaauaauuguaauauuacuaucacuaauagcaguaggauuacuacucuacugcaaagcuagaucuaccccggucacacucucaaaagaccaauuaucuggaauaaacaauauagcauucagcaacuaaggacuaguacuggcugcaucucccuuuccucuguccuccauccuucucccaggauggugaagggggaccugguacccagugauccccaccccaggauccuaaaucaugacuuaccugcuaauaaaaacucauuggaaaagugagaagaucuaaaaaaaaaaaaaaaaaaaaaaaaaaaaaaaaaaaaaaaaaaaaaaaaaaaaaaaaaaaaaaaaugcaucccccccccccccccccccccccccccccccaaaggcucuuuucagagccaccagaauu

SEQ ID NO: 7652 - RNA, 1986 nt, Artificial Sequence
  mRNA product Design c-3 comprising derived and/or modified sequence from HRSV(A2)__F_DSCav1_mut8 (opt11)
gggagaguccgcucagccagguugcagaagcggcuuagcguguguccuaaucuucucucugcguguagguaggccugugccgcaaacaagcuuaccauggaacuccucauccuuaaagccaacgccauaaccaccauccucaccgccgucaccuucugcuucgcuucuggccaaaacauaaccgaagaguucuaccaauccacgugcucugccgugucaaaaggcuaccucggagcccuccgcacagggugguacacuuccgucaucaccaucgaacucucuaacaucaaagaaaucaagugcaacggcacagacgcgaaagucaagcucaucaaacaagaacuagacaaauacaaaaacgccguaacagaccuccaacuccuaaugcaguccacaccagccacaggcuccggcagcgccaucgccuccggcgucgcugucugcaaaguccuacaccucgaaggcgaagucaacaaaaucaagucagcccuccuuagcaccaacaaagcagucgucucuuuaagcgggugcggagucucuguccuaaccuuuaaaguacucgaccucaaaaacuacaucgacaaacaacuacuaccaauacuaaacaaacagagcugcuccauucccaacaucgaaaccguuaucgaguuccaacaaaagaacaaccgccuccucgaaaucacccgcgaguucuccgucaacgcaggcgucaccaccccagucuccaccuauaugcuaaccaacagcgaacuccucagccucaucaaugacaugccaaucaccaacgaccaaaagaaacucauguccaacaacguacagauaguccgccagcaguccuacagcaucaugugcaucaucaaagaagaagugcucgccuacgugguacaacucccucucuacggagucauugauacacccugcuggaaacuccacacaagcccccucugcacuacaaacaccaaagaaggcucuaacauaugccucacccgcacagaccgugguugguacugcgacaacgccggcuccguauccuucuuuccacaagcugaaaccugcaaaguucaaucaaaccgagucuucugcgacaccaugaacucccucacauugcccagcgaagucaaccucugcaacgucgacaucuucaaccccaaguacgacugcaaaaucaugaccuccaaaaccgacgucagcuccagcgugaucacaagccuaggcgcgaucgucagcugcuacggcaaaaccaaaugcacagccuccaacaaaugccgcggaaucauaaaaacauucaguaacggcugcgacuacguguccaauaaaggagucgacaccguauccgucggaaacacccucuacuacgucaacaaacaagaaggacaaucccucuaugucaaaggcgaacccauuaucaacuucuacgacccccuaguuuuccccuccgacgaguucgacgcaagcauuucccaagucaacgaaaagaucaaucaaucccucgccuucauacgcaaaagcgacgaacuacuacacaacguaaacgccggcaaaagcaccaccaacaucaugaucacaacaaucaucaucgucaucaucgucauccuacucucacucaucgccguuggccuacuacucuacugcaaagcccgcuccacacccgucacccucucaaaagaccaacucuccggcaucaacaacaucgcauucagcaacugaggacuaguacuggcugcaucucccuuuccucuguccuccauccuucucccaggauggugaagggggaccugguacccagugauccccaccccaggauccuaaaucaugacuuaccugcuaauaaaaacucauuggaaaagugagaagaucuaaaaaaaaaaaaaaaaaaaaaaaaaaaaaaaaaaaaaaaaaaaaaaaaaaaaaaaaaaaaaaaaugcaucccccccccccccccccccccccccccccccaaaggcucuuuucagagccaccagaauu

SEQ ID NO: 7653 - RNA, 1982 nt, Artificial Sequence
  mRNA product Design c-4 comprising derived and/or modified sequence from HRSV(A2)__F_DSCav1_mut8 (opt1)
gggagaguccgcucagccagguugcagaagcggcuuagcguguguccuaaucuucucucugcguguagguaggccugugccgcaaacaagcuuaccauggagcugcucauccugaaggccaacgccaucaccaccauccugacggcggugaccuucugcuucgccagcggccagaacaucaccgaggaguucuaccaguccacgugcagcgccgucuccaagggguaccucggcgcccugcggaccggcugguacaccuccgugaucaccaucgagcugagcaacaucaaggagaucaagugcaacgggaccgacgccaaggugaagcucaucaagcaggagcuggacaaguacaagaacgcggucacggaccugcagcuccugaugcaguccaccccggcaaccggcuccggcuccgccaucgcgagcggcgucgccgugugcaaggugcugcaccucgagggggaggucaacaagaucaagagcgcccugcuguccaccaacaaggccguggugagccucuccggcugcggcgucagcgugcugaccuucaaggugcuggaccucaagaacuacaucgacaagcagcugcugcccauccugaacaagcagagcugcuccauccccaacaucgagacggugaucgaguuccagcagaagaacaaccggcuccuggagaucacccgcgaguucagcgugaacgccggggucaccacccccguguccacguacaugcugaccaacagcgagcuccugucccugaucaacgacaugccgaucaccaacgaccagaagaagcucaugagcaacaacgugcagaucguccggcagcaguccuacagcaucaugugcaucaucaaggaggaggugcuggcguacgugguccagcugccccucuacggcgugaucgacacccccugcuggaagcugcacacgagcccccugugcaccaccaacaccaaggagggguccaacaucugccucacgcgcaccgaccggggcugguacugcgacaacgccggcagcgucuccuucuucccgcaggccgagaccugcaaggugcagagcaaccgcguguucugcgacaccaugaacucccugacgcugcccagcgagguaaaccucugcaacgucgacaucuucaaccccaaguacgacugcaagaucaugaccuccaagaccgacgugagcuccagcgugaucaccucccugggggccaucgucagcugcuacggcaagacgaagugcaccgccagcaacaagugccgggggaucaucaagaccuucuccaacggcugcgacuacgugagcaacaagggcguggacaccguguccgucgggaacacccuguacuacgugaacaagcaggagggccagagccucuacgugaagggggagcccaucaucaacuucuacgacccgcuggucuuccccuccgacgaguucgacgcgagcaucucccaggugaacgagaagaucaaccagagccuggccuucauccgcaaguccgacgagcugcuccacaacgugaacgccggcaagagcacgaccaacaucaugaucaccaccaucaucaucgucaucaucgugauccugcugucccucaucgccguggggcugcugcucuacugcaaggcccggagcacgcccgucacccuguccaaggaccagcugagcggcaucaacaacaucgcguucuccaacugaggacuaguggaagcauuuuccuggcugauuaaaagaaauuacucagcuauggucaucuguuccuguuagaaggcuaugcagcauauuauauacuaugcgcauguuaugaaaugcauaauaaaaaauuuuaaaaaaucuaaaagaucuaaaaaaaaaaaaaaaaaaaaaaaaaaaaaaaaaaaaaaaaaaaaaaaaaaaaaaaaaaaaaaaaugcaucccccccccccccccccccccccccccccccaaaggcucuuuucagagccaccagaauu

SEQ ID NO: 7654 - RNA, 1982 nt, Artificial Sequence
  mRNA product Design c-4 comprising derived and/or modified sequence from HRSV(A2)__F_DSCav1_mut8 (opt1)
gggagaguccgcucagccagguugcagaagcggcuuagcguguguccuaaucuucucucugcguguagguaggccugugccgcaaacaagcuuaccauggagcugcucauccugaaggccaacgccaucaccaccauccugacggcggugaccuucugcuucgccagcggccagaacaucaccgaggaguucuaccaguccacgugcagcgccgucuccaagggguaccucggcgcccugcgcaccgggugguacaccagcgugaucaccaucgagcuguccaacaucaaggagaucaagugcaacggcaccgacgccaaggugaagcucaucaagcaggagcuggacaaguacaagaacgcggucacggaccugcagcuccugaugcagagcacccccgccaccggguccggcagcgccaucgccuccggcguggcggugugcaagguccugcaccucgagggggaggugaacaagaucaagagcgcccugcuguccaccaacaaggccguggucagccucuccggcugcggggugagcgugcugacguucaagguccuggaccucaagaacuacaucgacaagcagcugcugccgauccucaacaagcaguccugcagcauccccaacaucgagaccgugaucgaguuccagcagaagaacaaccggcugcuggagaucacccgcgaguucuccgugaacgccggcgucaccacgcccgugagcaccuacaugcucaccaacuccgagcugcugagccucaucaacgacaugcccaucaccaacgaccagaagaagcugaugagcaacaacgugcagaucguccggcagcaguccuacagcaucaugugcaucaucaaggaggaggugcuggccuacgugguccagcucccgcuguacggggugaucgacacgcccugcuggaagcugcacaccagcccccucugcaccaccaacacgaaggagggcuccaacaucugccugacccgcaccgaccggggcugguacugcgacaacgcgggguccgugagcuucuucccccaggccgagaccugcaagguccaguccaaccgcguguucugcgacacgaugaacagccugacccucccguccgaggucaaccugugcaacguggacaucuucaaccccaaguacgacugcaagaucaugaccagcaagaccgacguguccagcuccgucaucacgagccugggcgccaucguguccugcuacgggaagaccaagugcaccgccagcaacaagugccggggcaucaucaagaccuucuccaacggcugcgacuacgugagcaacaagggggucgacacgguguccgugggcaacacccucuacuacgucaacaagcaggaggggcagagccuguacgugaagggcgagcccaucaucaacuucuacgacccccugguguucccgagcgacgaguucgacgccuccaucagccaggucaacgagaagaucaaccagucccucgcguucauccgcaagagcgacgagcugcugcacaacgugaacgccgggaaguccaccaccaacaucaugaucaccacgaucaucaucgugaucaucgucauccuccugagccugaucgccgugggccuccugcuguacugcaaggcccgguccacccccgugacccugagcaaggaccagcucuccggcaucaacaacaucgccuucagcaacugaggacuaguggaagcauuuuccuggcugauuaaaagaaauuacucagcuauggucaucuguuccuguuagaaggcuaugcagcauauuauauacuaugcgcauguuaugaaaugcauaauaaaaaauuuuaaaaaaucuaaaagaucuaaaaaaaaaaaaaaaaaaaaaaaaaaaaaaaaaaaaaaaaaaaaaaaaaaaaaaaaaaaaaaaaugcaucccccccccccccccccccccccccccccccaaaggcucuuuucagagccaccagaauu

SEQ ID NO: 7655 - RNA, 1982 nt, Artificial Sequence
  mRNA product Design c-4 comprising derived and/or modified sequence from HRSV(A2)__F_DSCav1_mut8 (opt2)
gggagaguccgcucagccagguugcagaagcggcuuagcguguguccuaaucuucucucugcguguagguaggccugugccgcaaacaagcuuaccauggagcuccucauccucaaggccaacgccaucaccaccauccucaccgccgucaccuucugcuucgccuccggccagaacaucaccgaggaguucuaccaguccaccugcuccgccgucuccaagggcuaccucggcgcccuccgcaccggcugguacaccuccgucaucaccaucgagcucuccaacaucaaggagaucaagugcaacggcaccgacgccaaggucaagcucaucaagcaggagcucgacaaguacaagaacgccgucaccgaccuccagcuccucaugcaguccacccccgccaccggcuccggcuccgccaucgccuccggcgucgccgucugcaagguccuccaccucgagggcgaggucaacaagaucaaguccgcccuccucuccaccaacaaggccgucgucucccucuccggcugcggcgucuccguccucaccuucaagguccucgaccucaagaacuacaucgacaagcagcuccuccccauccucaacaagcaguccugcuccauccccaacaucgagaccgucaucgaguuccagcagaagaacaaccgccuccucgagaucacccgcgaguucuccgucaacgccggcgucaccacccccgucuccaccuacaugcucaccaacuccgagcuccucucccucaucaacgacaugcccaucaccaacgaccagaagaagcucauguccaacaacguccagaucguccgccagcaguccuacuccaucaugugcaucaucaaggaggagguccucgccuacgucguccagcucccccucuacggcgucaucgacacccccugcuggaagcuccacaccuccccccucugcaccaccaacaccaaggagggcuccaacaucugccucacccgcaccgaccgcggcugguacugcgacaacgccggcuccgucuccuucuucccccaggccgagaccugcaagguccaguccaaccgcgucuucugcgacaccaugaacucccucacccuccccuccgaggucaaccucugcaacgucgacaucuucaaccccaaguacgacugcaagaucaugaccuccaagaccgacgucuccuccuccgucaucaccucccucggcgccaucgucuccugcuacggcaagaccaagugcaccgccuccaacaagugccgcggcaucaucaagaccuucuccaacggcugcgacuacgucuccaacaagggcgucgacaccgucuccgucggcaacacccucuacuacgucaacaagcaggagggccagucccucuacgucaagggcgagcccaucaucaacuucuacgacccccucgucuuccccuccgacgaguucgacgccuccaucucccaggucaacgagaagaucaaccagucccucgccuucauccgcaaguccgacgagcuccuccacaacgucaacgccggcaaguccaccaccaacaucaugaucaccaccaucaucaucgucaucaucgucauccuccucucccucaucgccgucggccuccuccucuacugcaaggcccgcuccacccccgucacccucuccaaggaccagcucuccggcaucaacaacaucgccuucuccaacugaggacuaguggaagcauuuuccuggcugauuaaaagaaauuacucagcuauggucaucuguuccuguuagaaggcuaugcagcauauuauauacuaugcgcauguuaugaaaugcauaauaaaaaauuuuaaaaaaucuaaaagaucuaaaaaaaaaaaaaaaaaaaaaaaaaaaaaaaaaaaaaaaaaaaaaaaaaaaaaaaaaaaaaaaaugcaucccccccccccccccccccccccccccccccaaaggcucuuuucagagccaccagaauu

SEQ ID NO: 7656 - RNA, 1982 nt, Artificial Sequence
  mRNA product Design c-4 comprising derived and/or modified sequence from HRSV(A2)__F_DSCav1_mut8 (opt3)
gggagaguccgcucagccagguugcagaagcggcuuagcguguguccuaaucuucucucugcguguagguaggccugugccgcaaacaagcuuaccauggagcugcucauccuuaaggccaacgcuauuaccacaauacugacugcagugacguucugcuuugccagcggccagaauaucaccgaagaguucuaccaauccacauguucugcggucucaaaaggguauuugggagcuuuaagaacugguugguacaccaguguuauuacaaucgaacugagcaacauuaaggagaucaaaugcaauggcaccgacgccaaggugaaacuaauaaagcaggaacucgauaaguauaaaaacgcaguaacugaccugcagcuucugaugcaguccacacccgccaccgggucuggaucggcuaucgcaucaggcguggccgucuguaagguguugcaccucgagggugagguuaauaaaauuaagagcgcucugcugaguacgaacaaagccguggucucccucucugggugcggagugagcguauuaacuuuuaagguucuggaucuuaagaauuacaucgacaaacaauugcugccuauucuaaacaagcaguccuguucaaucccaaauauagaaaccgugauugaguuccagcagaaaaacaauaggcuccuggaaaucacacgggaguuuagugucaacgcgggcgugacuaccccggugagcacauauaugcuuaccaauucugagcuguugucccucauuaacgauaugcccaucacgaaugaccaaaagaaacugaugucaaacaacguccagaucguucgccagcagagcuacaguauuaugugcauaaucaaggaagagguguuagcauauguagugcaacugccucucuacggcgucauugauacuccauguuggaaacuucauacaucuccccugugcaccacuaauacaaaggaaggguccaacaucuguuugacccgaacggaccguggaugguacugcgauaaugccgguagcgugucguucuuuccucaggcugagaccuguaagguucagucuaacagaguguucugcgacacaaugaacucccuaacucugccaucagaagucaaucucugcaauguggauauauuuaaccccaaauaugacuguaagauuaugaccaguaaaacagauguaagcuccucuguuaucacuagccugggcgccaucgugucaugcuacgggaagaccaaauguacagcaaguaauaagugcaggggaauuaucaagaccuucuccaacggcugugacuaugucagcaauaaagguguggacacugucucuguggggaacacgcuuuacuauguuaauaagcaagagggacagucacuguacgugaaaggcgagccuauuauaaacuuuuaugauccauugguauucccgagugacgaauuugaugcuagcaucucccaggucaaugagaagauuaaccagucucucgccuucauccggaaaucggacgaacuguuacacaacgugaaugcgggcaagagcacaaccaacaucaugauuacuaccauaaucauuguuaucauugugauccugcuaucccucauagccgucgggcugcuuuuguacugcaaggcacgcucaacacccgugacccugaguaaagaucaacucucuggaaucaauaacauugcuuucagcaauugaggacuaguggaagcauuuuccuggcugauuaaaagaaauuacucagcuauggucaucuguuccuguuagaaggcuaugcagcauauuauauacuaugcgcauguuaugaaaugcauaauaaaaaauuuuaaaaaaucuaaaagaucuaaaaaaaaaaaaaaaaaaaaaaaaaaaaaaaaaaaaaaaaaaaaaaaaaaaaaaaaaaaaaaaaugcaucccccccccccccccccccccccccccccccaaaggcucuuuucagagccaccagaauu

SEQ ID NO: 7657 - RNA, 1982 nt, Artificial Sequence
  mRNA product Design c-4 comprising derived and/or modified sequence from HRSV(A2)__F_DSCav1_mut8 (opt4)
gggagaguccgcucagccagguugcagaagcggcuuagcguguguccuaaucuucucucugcguguagguaggccugugccgcaaacaagcuuaccauggagcugcugauccugaaggccaacgccaucaccaccauccugaccgccgugaccuucugcuucgccagcggccagaacaucaccgaggaguucuaccagagcaccugcagcgccgugagcaagggcuaccugggcgcccugagaaccggcugguacaccagcgugaucaccaucgagcugagcaacaucaaggagaucaagugcaacggcaccgacgccaaggugaagcugaucaagcaggagcuggacaaguacaagaacgccgugaccgaccugcagcugcugaugcagagcacccccgccaccggcagcggcagcgccaucgccagcggcguggccgugugcaaggugcugcaccuggagggcgaggugaacaagaucaagagcgcccugcugagcaccaacaaggccguggugagccugagcggcugcggcgugagcgugcugaccuucaaggugcuggaccugaagaacuacaucgacaagcagcugcugcccauccugaacaagcagagcugcagcauccccaacaucgagaccgugaucgaguuccagcagaagaacaacagacugcuggagaucaccagagaguucagcgugaacgccggcgugaccacccccgugagcaccuacaugcugaccaacagcgagcugcugagccugaucaacgacaugcccaucaccaacgaccagaagaagcugaugagcaacaacgugcagaucgugagacagcagagcuacagcaucaugugcaucaucaaggaggaggugcuggccuacguggugcagcugccccuguacggcgugaucgacacccccugcuggaagcugcacaccagcccccugugcaccaccaacaccaaggagggcagcaacaucugccugaccagaaccgacagaggcugguacugcgacaacgccggcagcgugagcuucuucccccaggccgagaccugcaaggugcagagcaacagaguguucugcgacaccaugaacagccugacccugcccagcgaggugaaccugugcaacguggacaucuucaaccccaaguacgacugcaagaucaugaccagcaagaccgacgugagcagcagcgugaucaccagccugggcgccaucgugagcugcuacggcaagaccaagugcaccgccagcaacaagugcagaggcaucaucaagaccuucagcaacggcugcgacuacgugagcaacaagggcguggacaccgugagcgugggcaacacccuguacuacgugaacaagcaggagggccagagccuguacgugaagggcgagcccaucaucaacuucuacgacccccugguguuccccagcgacgaguucgacgccagcaucagccaggugaacgagaagaucaaccagagccuggccuucaucagaaagagcgacgagcugcugcacaacgugaacgccggcaagagcaccaccaacaucaugaucaccaccaucaucaucgugaucaucgugauccugcugagccugaucgccgugggccugcugcuguacugcaaggccagaagcacccccgugacccugagcaaggaccagcugagcggcaucaacaacaucgccuucagcaacugaggacuaguggaagcauuuuccuggcugauuaaaagaaauuacucagcuauggucaucuguuccuguuagaaggcuaugcagcauauuauauacuaugcgcauguuaugaaaugcauaauaaaaaauuuuaaaaaaucuaaaagaucuaaaaaaaaaaaaaaaaaaaaaaaaaaaaaaaaaaaaaaaaaaaaaaaaaaaaaaaaaaaaaaaaugcaucccccccccccccccccccccccccccccccaaaggcucuuuucagagccaccagaauu

SEQ ID NO: 7658 - RNA, 1982 nt, Artificial Sequence
  mRNA product Design c-4 comprising derived and/or modified sequence from HRSV(A2)__F_DSCav1_mut8 (opt5)
gggagaguccgcucagccagguugcagaagcggcuuagcguguguccuaaucuucucucugcguguagguaggccugugccgcaaacaagcuuaccauggagcugcucauccugaaggccaacgcuauuaccacaauccuuacggccgugaccuucugcuuugcgagcggccagaauauuacagaagaguucuaccaauccaccuguucugcugucagcaaaggguaucugggagcccucagaacaggcugguacaccuccguuaucacaauugaacugucuaacaucaaggagaucaaaugcaaugggaccgacgccaaggugaaacuuauuaagcaggaacuggauaaguauaaaaacgcugugacggaccuccagcugcugaugcagagcacccccgccacaggauccggcucugcuaucgccagcggggucgcgguguguaagguucuccaccuggagggagaggugaauaaaauuaaguccgcccuucugagcaccaacaaagcugucgugucucucuccggcugcggcguuagcgugcugacauuuaagguccuugaucugaagaauuacaucgacaaacaacuccugccuauucugaacaagcagucuuguuccaucccgaauauugaaaccgugaucgaguuccagcagaaaaacaaucggcuccuggaaaucacgcgcgaguuuagcgugaacgccggggucacaacccccguuucuacauauaugcuuaccaauuccgagcugcucagccugauuaacgauaugccuaucaccaaugaccaaaagaaacuuauguccaacaacgugcagauugugagacagcagucuuacagcaucaugugcauuaucaaggaagagguccuggcuuaugugguucaacucccccuguacggagugaucgauacaccuuguuggaaacugcauacgagcccccucugcaccacaaauaccaaggaaggcagcaacauuugucugacacggaccgaccgcgggugguacugcgauaaugccggaucugucuccuucuuuccucaggcggagacguguaaggugcagagcaacagaguuuucugcgacacaaugaacucucuuacccugccgagcgaagugaaucucugcaaugucgauaucuuuaaccccaaauaugacuguaagauuaugaccuccaaaacagaugugucuagcuccgucaucaccagccugggcgccauugugucuugcuacgggaagacaaaauguacggcuuccaauaagugccggggaaucaucaagaccuucagcaacggcugugacuauguuucuaauaaaggcguggacacagucuccguggggaacacccuuuacuauguuaauaagcaagagggacagagccuguacgugaaaggcgagccuauuaucaacuuuuaugauccccucgucuucccuuccgacgaauuugaugccucuauuagccaggugaaugagaagaucaaccagucccuggcuuucauucgcaaaucugacgaacugcuccacaacgugaaugccgggaaguccacaaccaacaucaugauuacgaccaucaucauuguuaucauugucauccugcuuucccugauugccgugggacuccugcuguacugcaaggcuagaagcacacccgugacccuuucuaaagaucaacucuccggcaucaauaacaucgcguucagcaauugaggacuaguggaagcauuuuccuggcugauuaaaagaaauuacucagcuauggucaucuguuccuguuagaaggcuaugcagcauauuauauacuaugcgcauguuaugaaaugcauaauaaaaaauuuuaaaaaaucuaaaagaucuaaaaaaaaaaaaaaaaaaaaaaaaaaaaaaaaaaaaaaaaaaaaaaaaaaaaaaaaaaaaaaaaugcaucccccccccccccccccccccccccccccccaaaggcucuuuucagagccaccagaauu

SEQ ID NO: 7659 - RNA, 1982 nt, Artificial Sequence
  mRNA product Design c-4 comprising derived and/or modified sequence from HRSV(A2)__F_DSCav1_mut8 (opt6)
gggagaguccgcucagccagguugcagaagcggcuuagcguguguccuaaucuucucucugcguguagguaggccugugccgcaaacaagcuuaccauggaacuauuaauauuaaaagcaaacgcaaucacaacuauacuaacagcaguaacauucugcuuugccucaggucaaaacauaacagaggaauuuuaccaauccacaugcucugcuguaagcaaaggauaccucggagcauuaagaacuggaugguacaccucaguaauaacuauagaacuaucaaacauaaaagaaauaaaauguaauggcacagacgcaaaagugaaauuaaucaaacaagaacucgauaaauacaaaaaugccguaaccgaucuccaacuuuuaaugcaaagcacacccgcaacagguuccgggucagcaauagcaagcggaguugcaguaugcaaaguacuacacuuagaaggagaaguaaauaaaaucaaaucagccuuacuaucaacaaauaaagcaguuguaucacucucaggaugcggaguauccguacuaacauuuaaaguacuagaucuaaaaaacuacauagauaaacaacucuuaccaauacuaaauaaacaaucauguuccauacccaacauagaaaccguuaucgaauuucaacaaaaaaacaacagauuacuagaaaucacacgagaauuuucaguaaaugcuggagucacaacaccaguuaguacauacaugcucaccaauucagaacuacuaaguuuaauuaacgauaugccaauaacaaacgaccaaaaaaaacuaaugucaaauaacguacaaauaguaagacaacaaucauacucaaucaugugcauaauaaaagaagaaguacuagccuauguaguccaauuaccacucuacggcguaaucgacaccccaugcuggaaauuacacacaagcccauuaugcaccaccaacacaaaagaagguucaaacauuugcuuaaccagaaccgaucgaggaugguacugcgauaacgcaggaucugucuccuuuuucccacaagccgaaacaugcaaaguucaaucaaaccgaguuuucugugacacuaugaacucacucacacuuccaagcgaaguaaaccuaugcaacguagauauauuuaacccuaaauacgacugcaaaauaaugacaagcaaaacagacguuaguucaucaguaauuacaagucuaggcgcaauagugucaugcuacggaaaaacaaaaugcaccgcauccaauaaaugccgaggaaucauuaaaacauucucaaacggaugcgacuacgucagcaauaaaggaguagacacuguuucuguaggaaacacccuauacuauguaaacaaacaagaaggucaaucacuauacguaaagggagaaccaauuauaaauuuuuacgaccccuuaguauuuccaagugaugaauuugacgcaucuauaagucaaguuaacgaaaaaauuaaccaaucacuugcauuuauaagaaaaucagacgaacuacuccauaauguaaacgcagguaaaucaacaacaaacaucaugaucacaaccauaauaauaguaauaauuguaauauuacuaucacuaauagcaguaggauuacuacucuacugcaaagcuagaucuaccccggucacacucucaaaagaccaauuaucuggaauaaacaauauagcauucagcaacuaaggacuaguggaagcauuuuccuggcugauuaaaagaaauuacucagcuauggucaucuguuccuguuagaaggcuaugcagcauauuauauacuaugcgcauguuaugaaaugcauaauaaaaaauuuuaaaaaaucuaaaagaucuaaaaaaaaaaaaaaaaaaaaaaaaaaaaaaaaaaaaaaaaaaaaaaaaaaaaaaaaaaaaaaaaugcaucccccccccccccccccccccccccccccccaaaggcucuuuucagagccaccagaauu

SEQ ID NO: 7660 - RNA, 1982 nt, Artificial Sequence
  mRNA product Design c-4 comprising derived and/or modified sequence from HRSV(A2)__F_DSCav1_mut8 (opt11)
gggagaguccgcucagccagguugcagaagcggcuuagcguguguccuaaucuucucucugcguguagguaggccugugccgcaaacaagcuuaccauggaacuccucauccuuaaagccaacgccauaaccaccauccucaccgccgucaccuucugcuucgcuucuggccaaaacauaaccgaagaguucuaccaauccacgugcucugccgugucaaaaggcuaccucggagcccuccgcacagggugguacacuuccgucaucaccaucgaacucucuaacaucaaagaaaucaagugcaacggcacagacgcgaaagucaagcucaucaaacaagaacuagacaaauacaaaaacgccguaacagaccuccaacuccuaaugcaguccacaccagccacaggcuccggcagcgccaucgccuccggcgucgcugucugcaaaguccuacaccucgaaggcgaagucaacaaaaucaagucagcccuccuuagcaccaacaaagcagucgucucuuuaagcgggugcggagucucuguccuaaccuuuaaaguacucgaccucaaaaacuacaucgacaaacaacuacuaccaauacuaaacaaacagagcugcuccauucccaacaucgaaaccguuaucgaguuccaacaaaagaacaaccgccuccucgaaaucacccgcgaguucuccgucaacgcaggcgucaccaccccagucuccaccuauaugcuaaccaacagcgaacuccucagccucaucaaugacaugccaaucaccaacgaccaaaagaaacucauguccaacaacguacagauaguccgccagcaguccuacagcaucaugugcaucaucaaagaagaagugcucgccuacgugguacaacucccucucuacggagucauugauacacccugcuggaaacuccacacaagcccccucugcacuacaaacaccaaagaaggcucuaacauaugccucacccgcacagaccgugguugguacugcgacaacgccggcuccguauccuucuuuccacaagcugaaaccugcaaaguucaaucaaaccgagucuucugcgacaccaugaacucccucacauugcccagcgaagucaaccucugcaacgucgacaucuucaaccccaaguacgacugcaaaaucaugaccuccaaaaccgacgucagcuccagcgugaucacaagccuaggcgcgaucgucagcugcuacggcaaaaccaaaugcacagccuccaacaaaugccgcggaaucauaaaaacauucaguaacggcugcgacuacguguccaauaaaggagucgacaccguauccgucggaaacacccucuacuacgucaacaaacaagaaggacaaucccucuaugucaaaggcgaacccauuaucaacuucuacgacccccuaguuuuccccuccgacgaguucgacgcaagcauuucccaagucaacgaaaagaucaaucaaucccucgccuucauacgcaaaagcgacgaacuacuacacaacguaaacgccggcaaaagcaccaccaacaucaugaucacaacaaucaucaucgucaucaucgucauccuacucucacucaucgccguuggccuacuacucuacugcaaagcccgcuccacacccgucacccucucaaaagaccaacucuccggcaucaacaacaucgcauucagcaacugaggacuaguggaagcauuuuccuggcugauuaaaagaaauuacucagcuauggucaucuguuccuguuagaaggcuaugcagcauauuauauacuaugcgcauguuaugaaaugcauaauaaaaaauuuuaaaaaaucuaaaagaucuaaaaaaaaaaaaaaaaaaaaaaaaaaaaaaaaaaaaaaaaaaaaaaaaaaaaaaaaaaaaaaaaugcaucccccccccccccccccccccccccccccccaaaggcucuuuucagagccaccagaauu

SEQ ID NO: 7661 - RNA, 1900 nt, Artificial Sequence
  mRNA product Design c-5 comprising derived and/or modified sequence from HRSV(A2)__F_DSCav1_mut8 (opt1)
gggagagcggcucggccauuuugucccagucaguccggaggcugcggcugcagaaguaccgccugcggaguaacugcaaagaagcuuaccauggagcugcucauccugaaggccaacgccaucaccaccauccugacggcggugaccuucugcuucgccagcggccagaacaucaccgaggaguucuaccaguccacgugcagcgccgucuccaagggguaccucggcgcccugcggaccggcugguacaccuccgugaucaccaucgagcugagcaacaucaaggagaucaagugcaacgggaccgacgccaaggugaagcucaucaagcaggagcuggacaaguacaagaacgcggucacggaccugcagcuccugaugcaguccaccccggcaaccggcuccggcuccgccaucgcgagcggcgucgccgugugcaaggugcugcaccucgagggggaggucaacaagaucaagagcgcccugcuguccaccaacaaggccguggugagccucuccggcugcggcgucagcgugcugaccuucaaggugcuggaccucaagaacuacaucgacaagcagcugcugcccauccugaacaagcagagcugcuccauccccaacaucgagacggugaucgaguuccagcagaagaacaaccggcuccuggagaucacccgcgaguucagcgugaacgccggggucaccacccccguguccacguacaugcugaccaacagcgagcuccugucccugaucaacgacaugccgaucaccaacgaccagaagaagcucaugagcaacaacgugcagaucguccggcagcaguccuacagcaucaugugcaucaucaaggaggaggugcuggcguacgugguccagcugccccucuacggcgugaucgacacccccugcuggaagcugcacacgagcccccugugcaccaccaacaccaaggagggguccaacaucugccucacgcgcaccgaccggggcugguacugcgacaacgccggcagcgucuccuucuucccgcaggccgagaccugcaaggugcagagcaaccgcguguucugcgacaccaugaacucccugacgcugcccagcgagguaaaccucugcaacgucgacaucuucaaccccaaguacgacugcaagaucaugaccuccaagaccgacgugagcuccagcgugaucaccucccugggggccaucgucagcugcuacggcaagacgaagugcaccgccagcaacaagugccgggggaucaucaagaccuucuccaacggcugcgacuacgugagcaacaagggcguggacaccguguccgucgggaacacccuguacuacgugaacaagcaggagggccagagccucuacgugaagggggagcccaucaucaacuucuacgacccgcuggucuuccccuccgacgaguucgacgcgagcaucucccaggugaacgagaagaucaaccagagccuggccuucauccgcaaguccgacgagcugcuccacaacgugaacgccggcaagagcacgaccaacaucaugaucaccaccaucaucaucgucaucaucgugauccugcugucccucaucgccguggggcugcugcucuacugcaaggcccggagcacgcccgucacccuguccaaggaccagcugagcggcaucaacaacaucgcguucuccaacugaggacuagucccuguucccagagcccacuuuuuuuucuuuuuuugaaauaaaauagccugucuuucagaucuaaaaaaaaaaaaaaaaaaaaaaaaaaaaaaaaaaaaaaaaaaaaaaaaaaaaaaaaaaaaaaaaugcaucccccccccccccccccccccccccccccccaaaggcucuuuucagagccaccagaauu

SEQ ID NO: 7662 - RNA, 1900 nt, Artificial Sequence
  mRNA product Design c-5 comprising derived and/or modified sequence from HRSV(A2)__F_DSCav1_mut8 (opt1)
gggagagcggcucggccauuuugucccagucaguccggaggcugcggcugcagaaguaccgccugcggaguaacugcaaagaagcuuaccauggagcugcucauccugaaggccaacgccaucaccaccauccugacggcggugaccuucugcuucgccagcggccagaacaucaccgaggaguucuaccaguccacgugcagcgccgucuccaagggguaccucggcgcccugcgcaccgggugguacaccagcgugaucaccaucgagcuguccaacaucaaggagaucaagugcaacggcaccgacgccaaggugaagcucaucaagcaggagcuggacaaguacaagaacgcggucacggaccugcagcuccugaugcagagcacccccgccaccggguccggcagcgccaucgccuccggcguggcggugugcaagguccugcaccucgagggggaggugaacaagaucaagagcgcccugcuguccaccaacaaggccguggucagccucuccggcugcggggugagcgugcugacguucaagguccuggaccucaagaacuacaucgacaagcagcugcugccgauccucaacaagcaguccugcagcauccccaacaucgagaccgugaucgaguuccagcagaagaacaaccggcugcuggagaucacccgcgaguucuccgugaacgccggcgucaccacgcccgugagcaccuacaugcucaccaacuccgagcugcugagccucaucaacgacaugcccaucaccaacgaccagaagaagcugaugagcaacaacgugcagaucguccggcagcaguccuacagcaucaugugcaucaucaaggaggaggugcuggccuacgugguccagcucccgcuguacggggugaucgacacgcccugcuggaagcugcacaccagcccccucugcaccaccaacacgaaggagggcuccaacaucugccugacccgcaccgaccggggcugguacugcgacaacgcgggguccgugagcuucuucccccaggccgagaccugcaagguccaguccaaccgcguguucugcgacacgaugaacagccugacccucccguccgaggucaaccugugcaacguggacaucuucaaccccaaguacgacugcaagaucaugaccagcaagaccgacguguccagcuccgucaucacgagccugggcgccaucguguccugcuacgggaagaccaagugcaccgccagcaacaagugccggggcaucaucaagaccuucuccaacggcugcgacuacgugagcaacaagggggucgacacgguguccgugggcaacacccucuacuacgucaacaagcaggaggggcagagccuguacgugaagggcgagcccaucaucaacuucuacgacccccugguguucccgagcgacgaguucgacgccuccaucagccaggucaacgagaagaucaaccagucccucgcguucauccgcaagagcgacgagcugcugcacaacgugaacgccgggaaguccaccaccaacaucaugaucaccacgaucaucaucgugaucaucgucauccuccugagccugaucgccgugggccuccugcuguacugcaaggcccgguccacccccgugacccugagcaaggaccagcucuccggcaucaacaacaucgccuucagcaacugaggacuagucccuguucccagagcccacuuuuuuuucuuuuuuugaaauaaaauagccugucuuucagaucuaaaaaaaaaaaaaaaaaaaaaaaaaaaaaaaaaaaaaaaaaaaaaaaaaaaaaaaaaaaaaaaaugcaucccccccccccccccccccccccccccccccaaaggcucuuuucagagccaccagaauu

SEQ ID NO: 7663 - RNA, 1900 nt, Artificial Sequence
  mRNA product Design c-5 comprising derived and/or modified sequence from HRSV(A2)__F_DSCav1_mut8 (opt2)
gggagagcggcucggccauuuugucccagucaguccggaggcugcggcugcagaaguaccgccugcggaguaacugcaaagaagcuuaccauggagcuccucauccucaaggccaacgccaucaccaccauccucaccgccgucaccuucugcuucgccuccggccagaacaucaccgaggaguucuaccaguccaccugcuccgccgucuccaagggcuaccucggcgcccuccgcaccggcugguacaccuccgucaucaccaucgagcucuccaacaucaaggagaucaagugcaacggcaccgacgccaaggucaagcucaucaagcaggagcucgacaaguacaagaacgccgucaccgaccuccagcuccucaugcaguccacccccgccaccggcuccggcuccgccaucgccuccggcgucgccgucugcaagguccuccaccucgagggcgaggucaacaagaucaaguccgcccuccucuccaccaacaaggccgucgucucccucuccggcugcggcgucuccguccucaccuucaagguccucgaccucaagaacuacaucgacaagcagcuccuccccauccucaacaagcaguccugcuccauccccaacaucgagaccgucaucgaguuccagcagaagaacaaccgccuccucgagaucacccgcgaguucuccgucaacgccggcgucaccacccccgucuccaccuacaugcucaccaacuccgagcuccucucccucaucaacgacaugcccaucaccaacgaccagaagaagcucauguccaacaacguccagaucguccgccagcaguccuacuccaucaugugcaucaucaaggaggagguccucgccuacgucguccagcucccccucuacggcgucaucgacacccccugcuggaagcuccacaccuccccccucugcaccaccaacaccaaggagggcuccaacaucugccucacccgcaccgaccgcggcugguacugcgacaacgccggcuccgucuccuucuucccccaggccgagaccugcaagguccaguccaaccgcgucuucugcgacaccaugaacucccucacccuccccuccgaggucaaccucugcaacgucgacaucuucaaccccaaguacgacugcaagaucaugaccuccaagaccgacgucuccuccuccgucaucaccucccucggcgccaucgucuccugcuacggcaagaccaagugcaccgccuccaacaagugccgcggcaucaucaagaccuucuccaacggcugcgacuacgucuccaacaagggcgucgacaccgucuccgucggcaacacccucuacuacgucaacaagcaggagggccagucccucuacgucaagggcgagcccaucaucaacuucuacgacccccucgucuuccccuccgacgaguucgacgccuccaucucccaggucaacgagaagaucaaccagucccucgccuucauccgcaaguccgacgagcuccuccacaacgucaacgccggcaaguccaccaccaacaucaugaucaccaccaucaucaucgucaucaucgucauccuccucucccucaucgccgucggccuccuccucuacugcaaggcccgcuccacccccgucacccucuccaaggaccagcucuccggcaucaacaacaucgccuucuccaacugaggacuagucccuguucccagagcccacuuuuuuuucuuuuuuugaaauaaaauagccugucuuucagaucuaaaaaaaaaaaaaaaaaaaaaaaaaaaaaaaaaaaaaaaaaaaaaaaaaaaaaaaaaaaaaaaaugcaucccccccccccccccccccccccccccccccaaaggcucuuuucagagccaccagaauu

SEQ ID NO: 7664 - RNA, 1900 nt, Artificial Sequence
  mRNA product Design c-5 comprising derived and/or modified sequence from HRSV(A2)__F_DSCav1_mut8 (opt3)
gggagagcggcucggccauuuugucccagucaguccggaggcugcggcugcagaaguaccgccugcggaguaacugcaaagaagcuuaccauggagcugcucauccuuaaggccaacgcuauuaccacaauacugacugcagugacguucugcuuugccagcggccagaauaucaccgaagaguucuaccaauccacauguucugcggucucaaaaggguauuugggagcuuuaagaacugguugguacaccaguguuauuacaaucgaacugagcaacauuaaggagaucaaaugcaauggcaccgacgccaaggugaaacuaauaaagcaggaacucgauaaguauaaaaacgcaguaacugaccugcagcuucugaugcaguccacacccgccaccgggucuggaucggcuaucgcaucaggcguggccgucuguaagguguugcaccucgagggugagguuaauaaaauuaagagcgcucugcugaguacgaacaaagccguggucucccucucugggugcggagugagcguauuaacuuuuaagguucuggaucuuaagaauuacaucgacaaacaauugcugccuauucuaaacaagcaguccuguucaaucccaaauauagaaaccgugauugaguuccagcagaaaaacaauaggcuccuggaaaucacacgggaguuuagugucaacgcgggcgugacuaccccggugagcacauauaugcuuaccaauucugagcuguugucccucauuaacgauaugcccaucacgaaugaccaaaagaaacugaugucaaacaacguccagaucguucgccagcagagcuacaguauuaugugcauaaucaaggaagagguguuagcauauguagugcaacugccucucuacggcgucauugauacuccauguuggaaacuucauacaucuccccugugcaccacuaauacaaaggaaggguccaacaucuguuugacccgaacggaccguggaugguacugcgauaaugccgguagcgugucguucuuuccucaggcugagaccuguaagguucagucuaacagaguguucugcgacacaaugaacucccuaacucugccaucagaagucaaucucugcaauguggauauauuuaaccccaaauaugacuguaagauuaugaccaguaaaacagauguaagcuccucuguuaucacuagccugggcgccaucgugucaugcuacgggaagaccaaauguacagcaaguaauaagugcaggggaauuaucaagaccuucuccaacggcugugacuaugucagcaauaaagguguggacacugucucuguggggaacacgcuuuacuauguuaauaagcaagagggacagucacuguacgugaaaggcgagccuauuauaaacuuuuaugauccauugguauucccgagugacgaauuugaugcuagcaucucccaggucaaugagaagauuaaccagucucucgccuucauccggaaaucggacgaacuguuacacaacgugaaugcgggcaagagcacaaccaacaucaugauuacuaccauaaucauuguuaucauugugauccugcuaucccucauagccgucgggcugcuuuuguacugcaaggcacgcucaacacccgugacccugaguaaagaucaacucucuggaaucaauaacauugcuuucagcaauugaggacuagucccuguucccagagcccacuuuuuuuucuuuuuuugaaauaaaauagccugucuuucagaucuaaaaaaaaaaaaaaaaaaaaaaaaaaaaaaaaaaaaaaaaaaaaaaaaaaaaaaaaaaaaaaaaugcaucccccccccccccccccccccccccccccccaaaggcucuuuucagagccaccagaauu

SEQ ID NO: 7665 - RNA, 1900 nt, Artificial Sequence
  mRNA product Design c-5 comprising derived and/or modified sequence from HRSV(A2)__F_DSCav1_mut8 (opt4)
gggagagcggcucggccauuuugucccagucaguccggaggcugcggcugcagaaguaccgccugcggaguaacugcaaagaagcuuaccauggagcugcugauccugaaggccaacgccaucaccaccauccugaccgccgugaccuucugcuucgccagcggccagaacaucaccgaggaguucuaccagagcaccugcagcgccgugagcaagggcuaccugggcgcccugagaaccggcugguacaccagcgugaucaccaucgagcugagcaacaucaaggagaucaagugcaacggcaccgacgccaaggugaagcugaucaagcaggagcuggacaaguacaagaacgccgugaccgaccugcagcugcugaugcagagcacccccgccaccggcagcggcagcgccaucgccagcggcguggccgugugcaaggugcugcaccuggagggcgaggugaacaagaucaagagcgcccugcugagcaccaacaaggccguggugagccugagcggcugcggcgugagcgugcugaccuucaaggugcuggaccugaagaacuacaucgacaagcagcugcugcccauccugaacaagcagagcugcagcauccccaacaucgagaccgugaucgaguuccagcagaagaacaacagacugcuggagaucaccagagaguucagcgugaacgccggcgugaccacccccgugagcaccuacaugcugaccaacagcgagcugcugagccugaucaacgacaugcccaucaccaacgaccagaagaagcugaugagcaacaacgugcagaucgugagacagcagagcuacagcaucaugugcaucaucaaggaggaggugcuggccuacguggugcagcugccccuguacggcgugaucgacacccccugcuggaagcugcacaccagcccccugugcaccaccaacaccaaggagggcagcaacaucugccugaccagaaccgacagaggcugguacugcgacaacgccggcagcgugagcuucuucccccaggccgagaccugcaaggugcagagcaacagaguguucugcgacaccaugaacagccugacccugcccagcgaggugaaccugugcaacguggacaucuucaaccccaaguacgacugcaagaucaugaccagcaagaccgacgugagcagcagcgugaucaccagccugggcgccaucgugagcugcuacggcaagaccaagugcaccgccagcaacaagugcagaggcaucaucaagaccuucagcaacggcugcgacuacgugagcaacaagggcguggacaccgugagcgugggcaacacccuguacuacgugaacaagcaggagggccagagccuguacgugaagggcgagcccaucaucaacuucuacgacccccugguguuccccagcgacgaguucgacgccagcaucagccaggugaacgagaagaucaaccagagccuggccuucaucagaaagagcgacgagcugcugcacaacgugaacgccggcaagagcaccaccaacaucaugaucaccaccaucaucaucgugaucaucgugauccugcugagccugaucgccgugggccugcugcuguacugcaaggccagaagcacccccgugacccugagcaaggaccagcugagcggcaucaacaacaucgccuucagcaacugaggacuagucccuguucccagagcccacuuuuuuuucuuuuuuugaaauaaaauagccugucuuucagaucuaaaaaaaaaaaaaaaaaaaaaaaaaaaaaaaaaaaaaaaaaaaaaaaaaaaaaaaaaaaaaaaaugcaucccccccccccccccccccccccccccccccaaaggcucuuuucagagccaccagaauu

SEQ ID NO: 7666 - RNA, 1900 nt, Artificial Sequence
  mRNA product Design c-5 comprising derived and/or modified sequence from HRSV(A2)__F_DSCav1_mut8 (opt5)
gggagagcggcucggccauuuugucccagucaguccggaggcugcggcugcagaaguaccgccugcggaguaacugcaaagaagcuuaccauggagcugcucauccugaaggccaacgcuauuaccacaauccuuacggccgugaccuucugcuuugcgagcggccagaauauuacagaagaguucuaccaauccaccuguucugcugucagcaaaggguaucugggagcccucagaacaggcugguacaccuccguuaucacaauugaacugucuaacaucaaggagaucaaaugcaaugggaccgacgccaaggugaaacuuauuaagcaggaacuggauaaguauaaaaacgcugugacggaccuccagcugcugaugcagagcacccccgccacaggauccggcucugcuaucgccagcggggucgcgguguguaagguucuccaccuggagggagaggugaauaaaauuaaguccgcccuucugagcaccaacaaagcugucgugucucucuccggcugcggcguuagcgugcugacauuuaagguccuugaucugaagaauuacaucgacaaacaacuccugccuauucugaacaagcagucuuguuccaucccgaauauugaaaccgugaucgaguuccagcagaaaaacaaucggcuccuggaaaucacgcgcgaguuuagcgugaacgccggggucacaacccccguuucuacauauaugcuuaccaauuccgagcugcucagccugauuaacgauaugccuaucaccaaugaccaaaagaaacuuauguccaacaacgugcagauugugagacagcagucuuacagcaucaugugcauuaucaaggaagagguccuggcuuaugugguucaacucccccuguacggagugaucgauacaccuuguuggaaacugcauacgagcccccucugcaccacaaauaccaaggaaggcagcaacauuugucugacacggaccgaccgcgggugguacugcgauaaugccggaucugucuccuucuuuccucaggcggagacguguaaggugcagagcaacagaguuuucugcgacacaaugaacucucuuacccugccgagcgaagugaaucucugcaaugucgauaucuuuaaccccaaauaugacuguaagauuaugaccuccaaaacagaugugucuagcuccgucaucaccagccugggcgccauugugucuugcuacgggaagacaaaauguacggcuuccaauaagugccggggaaucaucaagaccuucagcaacggcugugacuauguuucuaauaaaggcguggacacagucuccguggggaacacccuuuacuauguuaauaagcaagagggacagagccuguacgugaaaggcgagccuauuaucaacuuuuaugauccccucgucuucccuuccgacgaauuugaugccucuauuagccaggugaaugagaagaucaaccagucccuggcuuucauucgcaaaucugacgaacugcuccacaacgugaaugccgggaaguccacaaccaacaucaugauuacgaccaucaucauuguuaucauugucauccugcuuucccugauugccgugggacuccugcuguacugcaaggcuagaagcacacccgugacccuuucuaaagaucaacucuccggcaucaauaacaucgcguucagcaauugaggacuagucccuguucccagagcccacuuuuuuuucuuuuuuugaaauaaaauagccugucuuucagaucuaaaaaaaaaaaaaaaaaaaaaaaaaaaaaaaaaaaaaaaaaaaaaaaaaaaaaaaaaaaaaaaaugcaucccccccccccccccccccccccccccccccaaaggcucuuuucagagccaccagaauu

SEQ ID NO: 7667 - RNA, 1900 nt, Artificial Sequence
  mRNA product Design c-5 comprising derived and/or modified sequence from HRSV(A2)__F_DSCav1_mut8 (opt6)
gggagagcggcucggccauuuugucccagucaguccggaggcugcggcugcagaaguaccgccugcggaguaacugcaaagaagcuuaccauggaacuauuaauauuaaaagcaaacgcaaucacaacuauacuaacagcaguaacauucugcuuugccucaggucaaaacauaacagaggaauuuuaccaauccacaugcucugcuguaagcaaaggauaccucggagcauuaagaacuggaugguacaccucaguaauaacuauagaacuaucaaacauaaaagaaauaaaauguaauggcacagacgcaaaagugaaauuaaucaaacaagaacucgauaaauacaaaaaugccguaaccgaucuccaacuuuuaaugcaaagcacacccgcaacagguuccgggucagcaauagcaagcggaguugcaguaugcaaaguacuacacuuagaaggagaaguaaauaaaaucaaaucagccuuacuaucaacaaauaaagcaguuguaucacucucaggaugcggaguauccguacuaacauuuaaaguacuagaucuaaaaaacuacauagauaaacaacucuuaccaauacuaaauaaacaaucauguuccauacccaacauagaaaccguuaucgaauuucaacaaaaaaacaacagauuacuagaaaucacacgagaauuuucaguaaaugcuggagucacaacaccaguuaguacauacaugcucaccaauucagaacuacuaaguuuaauuaacgauaugccaauaacaaacgaccaaaaaaaacuaaugucaaauaacguacaaauaguaagacaacaaucauacucaaucaugugcauaauaaaagaagaaguacuagccuauguaguccaauuaccacucuacggcguaaucgacaccccaugcuggaaauuacacacaagcccauuaugcaccaccaacacaaaagaagguucaaacauuugcuuaaccagaaccgaucgaggaugguacugcgauaacgcaggaucugucuccuuuuucccacaagccgaaacaugcaaaguucaaucaaaccgaguuuucugugacacuaugaacucacucacacuuccaagcgaaguaaaccuaugcaacguagauauauuuaacccuaaauacgacugcaaaauaaugacaagcaaaacagacguuaguucaucaguaauuacaagucuaggcgcaauagugucaugcuacggaaaaacaaaaugcaccgcauccaauaaaugccgaggaaucauuaaaacauucucaaacggaugcgacuacgucagcaauaaaggaguagacacuguuucuguaggaaacacccuauacuauguaaacaaacaagaaggucaaucacuauacguaaagggagaaccaauuauaaauuuuuacgaccccuuaguauuuccaagugaugaauuugacgcaucuauaagucaaguuaacgaaaaaauuaaccaaucacuugcauuuauaagaaaaucagacgaacuacuccauaauguaaacgcagguaaaucaacaacaaacaucaugaucacaaccauaauaauaguaauaauuguaauauuacuaucacuaauagcaguaggauuacuacucuacugcaaagcuagaucuaccccggucacacucucaaaagaccaauuaucuggaauaaacaauauagcauucagcaacuaaggacuagucccuguucccagagcccacuuuuuuuucuuuuuuugaaauaaaauagccugucuuucagaucuaaaaaaaaaaaaaaaaaaaaaaaaaaaaaaaaaaaaaaaaaaaaaaaaaaaaaaaaaaaaaaaaugcaucccccccccccccccccccccccccccccccaaaggcucuuuucagagccaccagaauu

SEQ ID NO: 7668 - RNA, 1900 nt, Artificial Sequence
  mRNA product Design c-5 comprising derived and/or modified sequence from HRSV(A2)__F_DSCav1_mut8 (opt11)
gggagagcggcucggccauuuugucccagucaguccggaggcugcggcugcagaaguaccgccugcggaguaacugcaaagaagcuuaccauggaacuccucauccuuaaagccaacgccauaaccaccauccucaccgccgucaccuucugcuucgcuucuggccaaaacauaaccgaagaguucuaccaauccacgugcucugccgugucaaaaggcuaccucggagcccuccgcacagggugguacacuuccgucaucaccaucgaacucucuaacaucaaagaaaucaagugcaacggcacagacgcgaaagucaagcucaucaaacaagaacuagacaaauacaaaaacgccguaacagaccuccaacuccuaaugcaguccacaccagccacaggcuccggcagcgccaucgccuccggcgucgcugucugcaaaguccuacaccucgaaggcgaagucaacaaaaucaagucagcccuccuuagcaccaacaaagcagucgucucuuuaagcgggugcggagucucuguccuaaccuuuaaaguacucgaccucaaaaacuacaucgacaaacaacuacuaccaauacuaaacaaacagagcugcuccauucccaacaucgaaaccguuaucgaguuccaacaaaagaacaaccgccuccucgaaaucacccgcgaguucuccgucaacgcaggcgucaccaccccagucuccaccuauaugcuaaccaacagcgaacuccucagccucaucaaugacaugccaaucaccaacgaccaaaagaaacucauguccaacaacguacagauaguccgccagcaguccuacagcaucaugugcaucaucaaagaagaagugcucgccuacgugguacaacucccucucuacggagucauugauacacccugcuggaaacuccacacaagcccccucugcacuacaaacaccaaagaaggcucuaacauaugccucacccgcacagaccgugguugguacugcgacaacgccggcuccguauccuucuuuccacaagcugaaaccugcaaaguucaaucaaaccgagucuucugcgacaccaugaacucccucacauugcccagcgaagucaaccucugcaacgucgacaucuucaaccccaaguacgacugcaaaaucaugaccuccaaaaccgacgucagcuccagcgugaucacaagccuaggcgcgaucgucagcugcuacggcaaaaccaaaugcacagccuccaacaaaugccgcggaaucauaaaaacauucaguaacggcugcgacuacguguccaauaaaggagucgacaccguauccgucggaaacacccucuacuacgucaacaaacaagaaggacaaucccucuaugucaaaggcgaacccauuaucaacuucuacgacccccuaguuuuccccuccgacgaguucgacgcaagcauuucccaagucaacgaaaagaucaaucaaucccucgccuucauacgcaaaagcgacgaacuacuacacaacguaaacgccggcaaaagcaccaccaacaucaugaucacaacaaucaucaucgucaucaucgucauccuacucucacucaucgccguuggccuacuacucuacugcaaagcccgcuccacacccgucacccucucaaaagaccaacucuccggcaucaacaacaucgcauucagcaacugaggacuagucccuguucccagagcccacuuuuuuuucuuuuuuugaaauaaaauagccugucuuucagaucuaaaaaaaaaaaaaaaaaaaaaaaaaaaaaaaaaaaaaaaaaaaaaaaaaaaaaaaaaaaaaaaaugcaucccccccccccccccccccccccccccccccaaaggcucuuuucagagccaccagaauu

SEQ ID NO: 7669 - RNA, 1909 nt, Artificial Sequence
  mRNA product Design d-1 comprising derived and/or modified sequence from HRSV(A2)__F_DSCav1_mut8 (opt1)
gggagacccgugacccggaaguuguacggcuacgcgacuuucccucccacaaacccucgcgcccuuccuuuccuacuugggcccggcagaaagcuuaccauggagcugcucauccugaaggccaacgccaucaccaccauccugacggcggugaccuucugcuucgccagcggccagaacaucaccgaggaguucuaccaguccacgugcagcgccgucuccaagggguaccucggcgcccugcggaccggcugguacaccuccgugaucaccaucgagcugagcaacaucaaggagaucaagugcaacgggaccgacgccaaggugaagcucaucaagcaggagcuggacaaguacaagaacgcggucacggaccugcagcuccugaugcaguccaccccggcaaccggcuccggcuccgccaucgcgagcggcgucgccgugugcaaggugcugcaccucgagggggaggucaacaagaucaagagcgcccugcuguccaccaacaaggccguggugagccucuccggcugcggcgucagcgugcugaccuucaaggugcuggaccucaagaacuacaucgacaagcagcugcugcccauccugaacaagcagagcugcuccauccccaacaucgagacggugaucgaguuccagcagaagaacaaccggcuccuggagaucacccgcgaguucagcgugaacgccggggucaccacccccguguccacguacaugcugaccaacagcgagcuccugucccugaucaacgacaugccgaucaccaacgaccagaagaagcucaugagcaacaacgugcagaucguccggcagcaguccuacagcaucaugugcaucaucaaggaggaggugcuggcguacgugguccagcugccccucuacggcgugaucgacacccccugcuggaagcugcacacgagcccccugugcaccaccaacaccaaggagggguccaacaucugccucacgcgcaccgaccggggcugguacugcgacaacgccggcagcgucuccuucuucccgcaggccgagaccugcaaggugcagagcaaccgcguguucugcgacaccaugaacucccugacgcugcccagcgagguaaaccucugcaacgucgacaucuucaaccccaaguacgacugcaagaucaugaccuccaagaccgacgugagcuccagcgugaucaccucccugggggccaucgucagcugcuacggcaagacgaagugcaccgccagcaacaagugccgggggaucaucaagaccuucuccaacggcugcgacuacgugagcaacaagggcguggacaccguguccgucgggaacacccuguacuacgugaacaagcaggagggccagagccucuacgugaagggggagcccaucaucaacuucuacgacccgcuggucuuccccuccgacgaguucgacgcgagcaucucccaggugaacgagaagaucaaccagagccuggccuucauccgcaaguccgacgagcugcuccacaacgugaacgccggcaagagcacgaccaacaucaugaucaccaccaucaucaucgucaucaucgugauccugcugucccucaucgccguggggcugcugcucuacugcaaggcccggagcacgcccgucacccuguccaaggaccagcugagcggcaucaacaacaucgcguucuccaacugaggacuagucccuguucccagagcccacuuuuuuuucuuuuuuugaaauaaaauagccugucuuucagaucuaaaaaaaaaaaaaaaaaaaaaaaaaaaaaaaaaaaaaaaaaaaaaaaaaaaaaaaaaaaaaaaaugcaucccccccccccccccccccccccccccccccaaaggcucuuuucagagccaccagaauu

SEQ ID NO: 7670 - RNA, 1909 nt, Artificial Sequence
  mRNA product Design d-1 comprising derived and/or modified sequence from HRSV(A2)__F_DSCav1_mut8 (opt1)
gggagacccgugacccggaaguuguacggcuacgcgacuuucccucccacaaacccucgcgcccuuccuuuccuacuugggcccggcagaaagcuuaccauggagcugcucauccugaaggccaacgccaucaccaccauccugacggcggugaccuucugcuucgccagcggccagaacaucaccgaggaguucuaccaguccacgugcagcgccgucuccaagggguaccucggcgcccugcgcaccgggugguacaccagcgugaucaccaucgagcuguccaacaucaaggagaucaagugcaacggcaccgacgccaaggugaagcucaucaagcaggagcuggacaaguacaagaacgcggucacggaccugcagcuccugaugcagagcacccccgccaccggguccggcagcgccaucgccuccggcguggcggugugcaagguccugcaccucgagggggaggugaacaagaucaagagcgcccugcuguccaccaacaaggccguggucagccucuccggcugcggggugagcgugcugacguucaagguccuggaccucaagaacuacaucgacaagcagcugcugccgauccucaacaagcaguccugcagcauccccaacaucgagaccgugaucgaguuccagcagaagaacaaccggcugcuggagaucacccgcgaguucuccgugaacgccggcgucaccacgcccgugagcaccuacaugcucaccaacuccgagcugcugagccucaucaacgacaugcccaucaccaacgaccagaagaagcugaugagcaacaacgugcagaucguccggcagcaguccuacagcaucaugugcaucaucaaggaggaggugcuggccuacgugguccagcucccgcuguacggggugaucgacacgcccugcuggaagcugcacaccagcccccucugcaccaccaacacgaaggagggcuccaacaucugccugacccgcaccgaccggggcugguacugcgacaacgcgggguccgugagcuucuucccccaggccgagaccugcaagguccaguccaaccgcguguucugcgacacgaugaacagccugacccucccguccgaggucaaccugugcaacguggacaucuucaaccccaaguacgacugcaagaucaugaccagcaagaccgacguguccagcuccgucaucacgagccugggcgccaucguguccugcuacgggaagaccaagugcaccgccagcaacaagugccggggcaucaucaagaccuucuccaacggcugcgacuacgugagcaacaagggggucgacacgguguccgugggcaacacccucuacuacgucaacaagcaggaggggcagagccuguacgugaagggcgagcccaucaucaacuucuacgacccccugguguucccgagcgacgaguucgacgccuccaucagccaggucaacgagaagaucaaccagucccucgcguucauccgcaagagcgacgagcugcugcacaacgugaacgccgggaaguccaccaccaacaucaugaucaccacgaucaucaucgugaucaucgucauccuccugagccugaucgccgugggccuccugcuguacugcaaggcccgguccacccccgugacccugagcaaggaccagcucuccggcaucaacaacaucgccuucagcaacugaggacuagucccuguucccagagcccacuuuuuuuucuuuuuuugaaauaaaauagccugucuuucagaucuaaaaaaaaaaaaaaaaaaaaaaaaaaaaaaaaaaaaaaaaaaaaaaaaaaaaaaaaaaaaaaaaugcaucccccccccccccccccccccccccccccccaaaggcucuuuucagagccaccagaauu

SEQ ID NO: 7671 - RNA, 1909 nt, Artificial Sequence
  mRNA product Design d-1 comprising derived and/or modified sequence from HRSV(A2)__F_DSCav1_mut8 (opt2)
gggagacccgugacccggaaguuguacggcuacgcgacuuucccucccacaaacccucgcgcccuuccuuuccuacuugggcccggcagaaagcuuaccauggagcuccucauccucaaggccaacgccaucaccaccauccucaccgccgucaccuucugcuucgccuccggccagaacaucaccgaggaguucuaccaguccaccugcuccgccgucuccaagggcuaccucggcgcccuccgcaccggcugguacaccuccgucaucaccaucgagcucuccaacaucaaggagaucaagugcaacggcaccgacgccaaggucaagcucaucaagcaggagcucgacaaguacaagaacgccgucaccgaccuccagcuccucaugcaguccacccccgccaccggcuccggcuccgccaucgccuccggcgucgccgucugcaagguccuccaccucgagggcgaggucaacaagaucaaguccgcccuccucuccaccaacaaggccgucgucucccucuccggcugcggcgucuccguccucaccuucaagguccucgaccucaagaacuacaucgacaagcagcuccuccccauccucaacaagcaguccugcuccauccccaacaucgagaccgucaucgaguuccagcagaagaacaaccgccuccucgagaucacccgcgaguucuccgucaacgccggcgucaccacccccgucuccaccuacaugcucaccaacuccgagcuccucucccucaucaacgacaugcccaucaccaacgaccagaagaagcucauguccaacaacguccagaucguccgccagcaguccuacuccaucaugugcaucaucaaggaggagguccucgccuacgucguccagcucccccucuacggcgucaucgacacccccugcuggaagcuccacaccuccccccucugcaccaccaacaccaaggagggcuccaacaucugccucacccgcaccgaccgcggcugguacugcgacaacgccggcuccgucuccuucuucccccaggccgagaccugcaagguccaguccaaccgcgucuucugcgacaccaugaacucccucacccuccccuccgaggucaaccucugcaacgucgacaucuucaaccccaaguacgacugcaagaucaugaccuccaagaccgacgucuccuccuccgucaucaccucccucggcgccaucgucuccugcuacggcaagaccaagugcaccgccuccaacaagugccgcggcaucaucaagaccuucuccaacggcugcgacuacgucuccaacaagggcgucgacaccgucuccgucggcaacacccucuacuacgucaacaagcaggagggccagucccucuacgucaagggcgagcccaucaucaacuucuacgacccccucgucuuccccuccgacgaguucgacgccuccaucucccaggucaacgagaagaucaaccagucccucgccuucauccgcaaguccgacgagcuccuccacaacgucaacgccggcaaguccaccaccaacaucaugaucaccaccaucaucaucgucaucaucgucauccuccucucccucaucgccgucggccuccuccucuacugcaaggcccgcuccacccccgucacccucuccaaggaccagcucuccggcaucaacaacaucgccuucuccaacugaggacuagucccuguucccagagcccacuuuuuuuucuuuuuuugaaauaaaauagccugucuuucagaucuaaaaaaaaaaaaaaaaaaaaaaaaaaaaaaaaaaaaaaaaaaaaaaaaaaaaaaaaaaaaaaaaugcaucccccccccccccccccccccccccccccccaaaggcucuuuucagagccaccagaauu

SEQ ID NO: 7672 - RNA, 1909 nt, Artificial Sequence
  mRNA product Design d-1 comprising derived and/or modified sequence from HRSV(A2)__F_DSCav1_mut8 (opt3)
gggagacccgugacccggaaguuguacggcuacgcgacuuucccucccacaaacccucgcgcccuuccuuuccuacuugggcccggcagaaagcuuaccauggagcugcucauccuuaaggccaacgcuauuaccacaauacugacugcagugacguucugcuuugccagcggccagaauaucaccgaagaguucuaccaauccacauguucugcggucucaaaaggguauuugggagcuuuaagaacugguugguacaccaguguuauuacaaucgaacugagcaacauuaaggagaucaaaugcaauggcaccgacgccaaggugaaacuaauaaagcaggaacucgauaaguauaaaaacgcaguaacugaccugcagcuucugaugcaguccacacccgccaccgggucuggaucggcuaucgcaucaggcguggccgucuguaagguguugcaccucgagggugagguuaauaaaauuaagagcgcucugcugaguacgaacaaagccguggucucccucucugggugcggagugagcguauuaacuuuuaagguucuggaucuuaagaauuacaucgacaaacaauugcugccuauucuaaacaagcaguccuguucaaucccaaauauagaaaccgugauugaguuccagcagaaaaacaauaggcuccuggaaaucacacgggaguuuagugucaacgcgggcgugacuaccccggugagcacauauaugcuuaccaauucugagcuguugucccucauuaacgauaugcccaucacgaaugaccaaaagaaacugaugucaaacaacguccagaucguucgccagcagagcuacaguauuaugugcauaaucaaggaagagguguuagcauauguagugcaacugccucucuacggcgucauugauacuccauguuggaaacuucauacaucuccccugugcaccacuaauacaaaggaaggguccaacaucuguuugacccgaacggaccguggaugguacugcgauaaugccgguagcgugucguucuuuccucaggcugagaccuguaagguucagucuaacagaguguucugcgacacaaugaacucccuaacucugccaucagaagucaaucucugcaauguggauauauuuaaccccaaauaugacuguaagauuaugaccaguaaaacagauguaagcuccucuguuaucacuagccugggcgccaucgugucaugcuacgggaagaccaaauguacagcaaguaauaagugcaggggaauuaucaagaccuucuccaacggcugugacuaugucagcaauaaagguguggacacugucucuguggggaacacgcuuuacuauguuaauaagcaagagggacagucacuguacgugaaaggcgagccuauuauaaacuuuuaugauccauugguauucccgagugacgaauuugaugcuagcaucucccaggucaaugagaagauuaaccagucucucgccuucauccggaaaucggacgaacuguuacacaacgugaaugcgggcaagagcacaaccaacaucaugauuacuaccauaaucauuguuaucauugugauccugcuaucccucauagccgucgggcugcuuuuguacugcaaggcacgcucaacacccgugacccugaguaaagaucaacucucuggaaucaauaacauugcuuucagcaauugaggacuagucccuguucccagagcccacuuuuuuuucuuuuuuugaaauaaaauagccugucuuucagaucuaaaaaaaaaaaaaaaaaaaaaaaaaaaaaaaaaaaaaaaaaaaaaaaaaaaaaaaaaaaaaaaaugcaucccccccccccccccccccccccccccccccaaaggcucuuuucagagccaccagaauu

SEQ ID NO: 7673 - RNA, 1909 nt, Artificial Sequence
  mRNA product Design d-1 comprising derived and/or modified sequence from HRSV(A2)__F_DSCav1_mut8 (opt4)
gggagacccgugacccggaaguuguacggcuacgcgacuuucccucccacaaacccucgcgcccuuccuuuccuacuugggcccggcagaaagcuuaccauggagcugcugauccugaaggccaacgccaucaccaccauccugaccgccgugaccuucugcuucgccagcggccagaacaucaccgaggaguucuaccagagcaccugcagcgccgugagcaagggcuaccugggcgcccugagaaccggcugguacaccagcgugaucaccaucgagcugagcaacaucaaggagaucaagugcaacggcaccgacgccaaggugaagcugaucaagcaggagcuggacaaguacaagaacgccgugaccgaccugcagcugcugaugcagagcacccccgccaccggcagcggcagcgccaucgccagcggcguggccgugugcaaggugcugcaccuggagggcgaggugaacaagaucaagagcgcccugcugagcaccaacaaggccguggugagccugagcggcugcggcgugagcgugcugaccuucaaggugcuggaccugaagaacuacaucgacaagcagcugcugcccauccugaacaagcagagcugcagcauccccaacaucgagaccgugaucgaguuccagcagaagaacaacagacugcuggagaucaccagagaguucagcgugaacgccggcgugaccacccccgugagcaccuacaugcugaccaacagcgagcugcugagccugaucaacgacaugcccaucaccaacgaccagaagaagcugaugagcaacaacgugcagaucgugagacagcagagcuacagcaucaugugcaucaucaaggaggaggugcuggccuacguggugcagcugccccuguacggcgugaucgacacccccugcuggaagcugcacaccagcccccugugcaccaccaacaccaaggagggcagcaacaucugccugaccagaaccgacagaggcugguacugcgacaacgccggcagcgugagcuucuucccccaggccgagaccugcaaggugcagagcaacagaguguucugcgacaccaugaacagccugacccugcccagcgaggugaaccugugcaacguggacaucuucaaccccaaguacgacugcaagaucaugaccagcaagaccgacgugagcagcagcgugaucaccagccugggcgccaucgugagcugcuacggcaagaccaagugcaccgccagcaacaagugcagaggcaucaucaagaccuucagcaacggcugcgacuacgugagcaacaagggcguggacaccgugagcgugggcaacacccuguacuacgugaacaagcaggagggccagagccuguacgugaagggcgagcccaucaucaacuucuacgacccccugguguuccccagcgacgaguucgacgccagcaucagccaggugaacgagaagaucaaccagagccuggccuucaucagaaagagcgacgagcugcugcacaacgugaacgccggcaagagcaccaccaacaucaugaucaccaccaucaucaucgugaucaucgugauccugcugagccugaucgccgugggccugcugcuguacugcaaggccagaagcacccccgugacccugagcaaggaccagcugagcggcaucaacaacaucgccuucagcaacugaggacuagucccuguucccagagcccacuuuuuuuucuuuuuuugaaauaaaauagccugucuuucagaucuaaaaaaaaaaaaaaaaaaaaaaaaaaaaaaaaaaaaaaaaaaaaaaaaaaaaaaaaaaaaaaaaugcaucccccccccccccccccccccccccccccccaaaggcucuuuucagagccaccagaauu

SEQ ID NO: 7674 - RNA, 1909 nt, Artificial Sequence
  mRNA product Design d-1 comprising derived and/or modified sequence from HRSV(A2)__F_DSCav1_mut8 (opt5)
gggagacccgugacccggaaguuguacggcuacgcgacuuucccucccacaaacccucgcgcccuuccuuuccuacuugggcccggcagaaagcuuaccauggagcugcucauccugaaggccaacgcuauuaccacaauccuuacggccgugaccuucugcuuugcgagcggccagaauauuacagaagaguucuaccaauccaccuguucugcugucagcaaaggguaucugggagcccucagaacaggcugguacaccuccguuaucacaauugaacugucuaacaucaaggagaucaaaugcaaugggaccgacgccaaggugaaacuuauuaagcaggaacuggauaaguauaaaaacgcugugacggaccuccagcugcugaugcagagcacccccgccacaggauccggcucugcuaucgccagcggggucgcgguguguaagguucuccaccuggagggagaggugaauaaaauuaaguccgcccuucugagcaccaacaaagcugucgugucucucuccggcugcggcguuagcgugcugacauuuaagguccuugaucugaagaauuacaucgacaaacaacuccugccuauucugaacaagcagucuuguuccaucccgaauauugaaaccgugaucgaguuccagcagaaaaacaaucggcuccuggaaaucacgcgcgaguuuagcgugaacgccggggucacaacccccguuucuacauauaugcuuaccaauuccgagcugcucagccugauuaacgauaugccuaucaccaaugaccaaaagaaacuuauguccaacaacgugcagauugugagacagcagucuuacagcaucaugugcauuaucaaggaagagguccuggcuuaugugguucaacucccccuguacggagugaucgauacaccuuguuggaaacugcauacgagcccccucugcaccacaaauaccaaggaaggcagcaacauuugucugacacggaccgaccgcgggugguacugcgauaaugccggaucugucuccuucuuuccucaggcggagacguguaaggugcagagcaacagaguuuucugcgacacaaugaacucucuuacccugccgagcgaagugaaucucugcaaugucgauaucuuuaaccccaaauaugacuguaagauuaugaccuccaaaacagaugugucuagcuccgucaucaccagccugggcgccauugugucuugcuacgggaagacaaaauguacggcuuccaauaagugccggggaaucaucaagaccuucagcaacggcugugacuauguuucuaauaaaggcguggacacagucuccguggggaacacccuuuacuauguuaauaagcaagagggacagagccuguacgugaaaggcgagccuauuaucaacuuuuaugauccccucgucuucccuuccgacgaauuugaugccucuauuagccaggugaaugagaagaucaaccagucccuggcuuucauucgcaaaucugacgaacugcuccacaacgugaaugccgggaaguccacaaccaacaucaugauuacgaccaucaucauuguuaucauugucauccugcuuucccugauugccgugggacuccugcuguacugcaaggcuagaagcacacccgugacccuuucuaaagaucaacucuccggcaucaauaacaucgcguucagcaauugaggacuagucccuguucccagagcccacuuuuuuuucuuuuuuugaaauaaaauagccugucuuucagaucuaaaaaaaaaaaaaaaaaaaaaaaaaaaaaaaaaaaaaaaaaaaaaaaaaaaaaaaaaaaaaaaaugcaucccccccccccccccccccccccccccccccaaaggcucuuuucagagccaccagaauu

SEQ ID NO: 7675 - RNA, 1909 nt, Artificial Sequence
  mRNA product Design d-1 comprising derived and/or modified sequence from HRSV(A2)__F_DSCav1_mut8 (opt6)
gggagacccgugacccggaaguuguacggcuacgcgacuuucccucccacaaacccucgcgcccuuccuuuccuacuugggcccggcagaaagcuuaccauggaacuauuaauauuaaaagcaaacgcaaucacaacuauacuaacagcaguaacauucugcuuugccucaggucaaaacauaacagaggaauuuuaccaauccacaugcucugcuguaagcaaaggauaccucggagcauuaagaacuggaugguacaccucaguaauaacuauagaacuaucaaacauaaaagaaauaaaauguaauggcacagacgcaaaagugaaauuaaucaaacaagaacucgauaaauacaaaaaugccguaaccgaucuccaacuuuuaaugcaaagcacacccgcaacagguuccgggucagcaauagcaagcggaguugcaguaugcaaaguacuacacuuagaaggagaaguaaauaaaaucaaaucagccuuacuaucaacaaauaaagcaguuguaucacucucaggaugcggaguauccguacuaacauuuaaaguacuagaucuaaaaaacuacauagauaaacaacucuuaccaauacuaaauaaacaaucauguuccauacccaacauagaaaccguuaucgaauuucaacaaaaaaacaacagauuacuagaaaucacacgagaauuuucaguaaaugcuggagucacaacaccaguuaguacauacaugcucaccaauucagaacuacuaaguuuaauuaacgauaugccaauaacaaacgaccaaaaaaaacuaaugucaaauaacguacaaauaguaagacaacaaucauacucaaucaugugcauaauaaaagaagaaguacuagccuauguaguccaauuaccacucuacggcguaaucgacaccccaugcuggaaauuacacacaagcccauuaugcaccaccaacacaaaagaagguucaaacauuugcuuaaccagaaccgaucgaggaugguacugcgauaacgcaggaucugucuccuuuuucccacaagccgaaacaugcaaaguucaaucaaaccgaguuuucugugacacuaugaacucacucacacuuccaagcgaaguaaaccuaugcaacguagauauauuuaacccuaaauacgacugcaaaauaaugacaagcaaaacagacguuaguucaucaguaauuacaagucuaggcgcaauagugucaugcuacggaaaaacaaaaugcaccgcauccaauaaaugccgaggaaucauuaaaacauucucaaacggaugcgacuacgucagcaauaaaggaguagacacuguuucuguaggaaacacccuauacuauguaaacaaacaagaaggucaaucacuauacguaaagggagaaccaauuauaaauuuuuacgaccccuuaguauuuccaagugaugaauuugacgcaucuauaagucaaguuaacgaaaaaauuaaccaaucacuugcauuuauaagaaaaucagacgaacuacuccauaauguaaacgcagguaaaucaacaacaaacaucaugaucacaaccauaauaauaguaauaauuguaauauuacuaucacuaauagcaguaggauuacuacucuacugcaaagcuagaucuaccccggucacacucucaaaagaccaauuaucuggaauaaacaauauagcauucagcaacuaaggacuagucccuguucccagagcccacuuuuuuuucuuuuuuugaaauaaaauagccugucuuucagaucuaaaaaaaaaaaaaaaaaaaaaaaaaaaaaaaaaaaaaaaaaaaaaaaaaaaaaaaaaaaaaaaaugcaucccccccccccccccccccccccccccccccaaaggcucuuuucagagccaccagaauu

SEQ ID NO: 7676 - RNA, 1909 nt, Artificial Sequence
  mRNA product Design d-1 comprising derived and/or modified sequence from HRSV(A2)__F_DSCav1_mut8 (opt11)
gggagacccgugacccggaaguuguacggcuacgcgacuuucccucccacaaacccucgcgcccuuccuuuccuacuugggcccggcagaaagcuuaccauggaacuccucauccuuaaagccaacgccauaaccaccauccucaccgccgucaccuucugcuucgcuucuggccaaaacauaaccgaagaguucuaccaauccacgugcucugccgugucaaaaggcuaccucggagcccuccgcacagggugguacacuuccgucaucaccaucgaacucucuaacaucaaagaaaucaagugcaacggcacagacgcgaaagucaagcucaucaaacaagaacuagacaaauacaaaaacgccguaacagaccuccaacuccuaaugcaguccacaccagccacaggcuccggcagcgccaucgccuccggcgucgcugucugcaaaguccuacaccucgaaggcgaagucaacaaaaucaagucagcccuccuuagcaccaacaaagcagucgucucuuuaagcgggugcggagucucuguccuaaccuuuaaaguacucgaccucaaaaacuacaucgacaaacaacuacuaccaauacuaaacaaacagagcugcuccauucccaacaucgaaaccguuaucgaguuccaacaaaagaacaaccgccuccucgaaaucacccgcgaguucuccgucaacgcaggcgucaccaccccagucuccaccuauaugcuaaccaacagcgaacuccucagccucaucaaugacaugccaaucaccaacgaccaaaagaaacucauguccaacaacguacagauaguccgccagcaguccuacagcaucaugugcaucaucaaagaagaagugcucgccuacgugguacaacucccucucuacggagucauugauacacccugcuggaaacuccacacaagcccccucugcacuacaaacaccaaagaaggcucuaacauaugccucacccgcacagaccgugguugguacugcgacaacgccggcuccguauccuucuuuccacaagcugaaaccugcaaaguucaaucaaaccgagucuucugcgacaccaugaacucccucacauugcccagcgaagucaaccucugcaacgucgacaucuucaaccccaaguacgacugcaaaaucaugaccuccaaaaccgacgucagcuccagcgugaucacaagccuaggcgcgaucgucagcugcuacggcaaaaccaaaugcacagccuccaacaaaugccgcggaaucauaaaaacauucaguaacggcugcgacuacguguccaauaaaggagucgacaccguauccgucggaaacacccucuacuacgucaacaaacaagaaggacaaucccucuaugucaaaggcgaacccauuaucaacuucuacgacccccuaguuuuccccuccgacgaguucgacgcaagcauuucccaagucaacgaaaagaucaaucaaucccucgccuucauacgcaaaagcgacgaacuacuacacaacguaaacgccggcaaaagcaccaccaacaucaugaucacaacaaucaucaucgucaucaucgucauccuacucucacucaucgccguuggccuacuacucuacugcaaagcccgcuccacacccgucacccucucaaaagaccaacucuccggcaucaacaacaucgcauucagcaacugaggacuagucccuguucccagagcccacuuuuuuuucuuuuuuugaaauaaaauagccugucuuucagaucuaaaaaaaaaaaaaaaaaaaaaaaaaaaaaaaaaaaaaaaaaaaaaaaaaaaaaaaaaaaaaaaaugcaucccccccccccccccccccccccccccccccaaaggcucuuuucagagccaccagaauu

SEQ ID NO: 7677 - RNA, 1964 nt, Artificial Sequence
  mRNA product Design d-2 comprising derived and/or modified sequence from HRSV(A2)__F_DSCav1_mut8 (opt1)
gggagagcggcucggccauuuugucccagucaguccggaggcugcggcugcagaaguaccgccugcggaguaacugcaaagaagcuuaccauggagcugcucauccugaaggccaacgccaucaccaccauccugacggcggugaccuucugcuucgccagcggccagaacaucaccgaggaguucuaccaguccacgugcagcgccgucuccaagggguaccucggcgcccugcggaccggcugguacaccuccgugaucaccaucgagcugagcaacaucaaggagaucaagugcaacgggaccgacgccaaggugaagcucaucaagcaggagcuggacaaguacaagaacgcggucacggaccugcagcuccugaugcaguccaccccggcaaccggcuccggcuccgccaucgcgagcggcgucgccgugugcaaggugcugcaccucgagggggaggucaacaagaucaagagcgcccugcuguccaccaacaaggccguggugagccucuccggcugcggcgucagcgugcugaccuucaaggugcuggaccucaagaacuacaucgacaagcagcugcugcccauccugaacaagcagagcugcuccauccccaacaucgagacggugaucgaguuccagcagaagaacaaccggcuccuggagaucacccgcgaguucagcgugaacgccggggucaccacccccguguccacguacaugcugaccaacagcgagcuccugucccugaucaacgacaugccgaucaccaacgaccagaagaagcucaugagcaacaacgugcagaucguccggcagcaguccuacagcaucaugugcaucaucaaggaggaggugcuggcguacgugguccagcugccccucuacggcgugaucgacacccccugcuggaagcugcacacgagcccccugugcaccaccaacaccaaggagggguccaacaucugccucacgcgcaccgaccggggcugguacugcgacaacgccggcagcgucuccuucuucccgcaggccgagaccugcaaggugcagagcaaccgcguguucugcgacaccaugaacucccugacgcugcccagcgagguaaaccucugcaacgucgacaucuucaaccccaaguacgacugcaagaucaugaccuccaagaccgacgugagcuccagcgugaucaccucccugggggccaucgucagcugcuacggcaagacgaagugcaccgccagcaacaagugccgggggaucaucaagaccuucuccaacggcugcgacuacgugagcaacaagggcguggacaccguguccgucgggaacacccuguacuacgugaacaagcaggagggccagagccucuacgugaagggggagcccaucaucaacuucuacgacccgcuggucuuccccuccgacgaguucgacgcgagcaucucccaggugaacgagaagaucaaccagagccuggccuucauccgcaaguccgacgagcugcuccacaacgugaacgccggcaagagcacgaccaacaucaugaucaccaccaucaucaucgucaucaucgugauccugcugucccucaucgccguggggcugcugcucuacugcaaggcccggagcacgcccgucacccuguccaaggaccagcugagcggcaucaacaacaucgcguucuccaacugaggacuaguaauaaggaaacuguaugaaugucugugggcaggaagugaagagauccuucuguaaagguuuuuggaauuaugucugcugaauaauaaacuuuuuugaaauaauaaaucugguagaaaaaugagaucuaaaaaaaaaaaaaaaaaaaaaaaaaaaaaaaaaaaaaaaaaaaaaaaaaaaaaaaaaaaaaaaaugcaucccccccccccccccccccccccccccccccaaaggcucuuuucagagccaccagaauu

SEQ ID NO: 7678 - RNA, 1964 nt, Artificial Sequence
  mRNA product Design d-2 comprising derived and/or modified sequence from HRSV(A2)__F_DSCav1_mut8 (opt1)
gggagagcggcucggccauuuugucccagucaguccggaggcugcggcugcagaaguaccgccugcggaguaacugcaaagaagcuuaccauggagcugcucauccugaaggccaacgccaucaccaccauccugacggcggugaccuucugcuucgccagcggccagaacaucaccgaggaguucuaccaguccacgugcagcgccgucuccaagggguaccucggcgcccugcgcaccgggugguacaccagcgugaucaccaucgagcuguccaacaucaaggagaucaagugcaacggcaccgacgccaaggugaagcucaucaagcaggagcuggacaaguacaagaacgcggucacggaccugcagcuccugaugcagagcacccccgccaccggguccggcagcgccaucgccuccggcguggcggugugcaagguccugcaccucgagggggaggugaacaagaucaagagcgcccugcuguccaccaacaaggccguggucagccucuccggcugcggggugagcgugcugacguucaagguccuggaccucaagaacuacaucgacaagcagcugcugccgauccucaacaagcaguccugcagcauccccaacaucgagaccgugaucgaguuccagcagaagaacaaccggcugcuggagaucacccgcgaguucuccgugaacgccggcgucaccacgcccgugagcaccuacaugcucaccaacuccgagcugcugagccucaucaacgacaugcccaucaccaacgaccagaagaagcugaugagcaacaacgugcagaucguccggcagcaguccuacagcaucaugugcaucaucaaggaggaggugcuggccuacgugguccagcucccgcuguacggggugaucgacacgcccugcuggaagcugcacaccagcccccucugcaccaccaacacgaaggagggcuccaacaucugccugacccgcaccgaccggggcugguacugcgacaacgcgggguccgugagcuucuucccccaggccgagaccugcaagguccaguccaaccgcguguucugcgacacgaugaacagccugacccucccguccgaggucaaccugugcaacguggacaucuucaaccccaaguacgacugcaagaucaugaccagcaagaccgacguguccagcuccgucaucacgagccugggcgccaucguguccugcuacgggaagaccaagugcaccgccagcaacaagugccggggcaucaucaagaccuucuccaacggcugcgacuacgugagcaacaagggggucgacacgguguccgugggcaacacccucuacuacgucaacaagcaggaggggcagagccuguacgugaagggcgagcccaucaucaacuucuacgacccccugguguucccgagcgacgaguucgacgccuccaucagccaggucaacgagaagaucaaccagucccucgcguucauccgcaagagcgacgagcugcugcacaacgugaacgccgggaaguccaccaccaacaucaugaucaccacgaucaucaucgugaucaucgucauccuccugagccugaucgccgugggccuccugcuguacugcaaggcccgguccacccccgugacccugagcaaggaccagcucuccggcaucaacaacaucgccuucagcaacugaggacuaguaauaaggaaacuguaugaaugucugugggcaggaagugaagagauccuucuguaaagguuuuuggaauuaugucugcugaauaauaaacuuuuuugaaauaauaaaucugguagaaaaaugagaucuaaaaaaaaaaaaaaaaaaaaaaaaaaaaaaaaaaaaaaaaaaaaaaaaaaaaaaaaaaaaaaaaugcaucccccccccccccccccccccccccccccccaaaggcucuuuucagagccaccagaauu

SEQ ID NO: 7679 - RNA, 1964 nt, Artificial Sequence
  mRNA product Design d-2 comprising derived and/or modified sequence from HRSV(A2)__F_DSCav1_mut8 (opt2)
gggagagcggcucggccauuuugucccagucaguccggaggcugcggcugcagaaguaccgccugcggaguaacugcaaagaagcuuaccauggagcuccucauccucaaggccaacgccaucaccaccauccucaccgccgucaccuucugcuucgccuccggccagaacaucaccgaggaguucuaccaguccaccugcuccgccgucuccaagggcuaccucggcgcccuccgcaccggcugguacaccuccgucaucaccaucgagcucuccaacaucaaggagaucaagugcaacggcaccgacgccaaggucaagcucaucaagcaggagcucgacaaguacaagaacgccgucaccgaccuccagcuccucaugcaguccacccccgccaccggcuccggcuccgccaucgccuccggcgucgccgucugcaagguccuccaccucgagggcgaggucaacaagaucaaguccgcccuccucuccaccaacaaggccgucgucucccucuccggcugcggcgucuccguccucaccuucaagguccucgaccucaagaacuacaucgacaagcagcuccuccccauccucaacaagcaguccugcuccauccccaacaucgagaccgucaucgaguuccagcagaagaacaaccgccuccucgagaucacccgcgaguucuccgucaacgccggcgucaccacccccgucuccaccuacaugcucaccaacuccgagcuccucucccucaucaacgacaugcccaucaccaacgaccagaagaagcucauguccaacaacguccagaucguccgccagcaguccuacuccaucaugugcaucaucaaggaggagguccucgccuacgucguccagcucccccucuacggcgucaucgacacccccugcuggaagcuccacaccuccccccucugcaccaccaacaccaaggagggcuccaacaucugccucacccgcaccgaccgcggcugguacugcgacaacgccggcuccgucuccuucuucccccaggccgagaccugcaagguccaguccaaccgcgucuucugcgacaccaugaacucccucacccuccccuccgaggucaaccucugcaacgucgacaucuucaaccccaaguacgacugcaagaucaugaccuccaagaccgacgucuccuccuccgucaucaccucccucggcgccaucgucuccugcuacggcaagaccaagugcaccgccuccaacaagugccgcggcaucaucaagaccuucuccaacggcugcgacuacgucuccaacaagggcgucgacaccgucuccgucggcaacacccucuacuacgucaacaagcaggagggccagucccucuacgucaagggcgagcccaucaucaacuucuacgacccccucgucuuccccuccgacgaguucgacgccuccaucucccaggucaacgagaagaucaaccagucccucgccuucauccgcaaguccgacgagcuccuccacaacgucaacgccggcaaguccaccaccaacaucaugaucaccaccaucaucaucgucaucaucgucauccuccucucccucaucgccgucggccuccuccucuacugcaaggcccgcuccacccccgucacccucuccaaggaccagcucuccggcaucaacaacaucgccuucuccaacugaggacuaguaauaaggaaacuguaugaaugucugugggcaggaagugaagagauccuucuguaaagguuuuuggaauuaugucugcugaauaauaaacuuuuuugaaauaauaaaucugguagaaaaaugagaucuaaaaaaaaaaaaaaaaaaaaaaaaaaaaaaaaaaaaaaaaaaaaaaaaaaaaaaaaaaaaaaaaugcaucccccccccccccccccccccccccccccccaaaggcucuuuucagagccaccagaauu

SEQ ID NO: 7680 - RNA, 1964 nt, Artificial Sequence
  mRNA product Design d-2 comprising derived and/or modified sequence from HRSV(A2)__F_DSCav1_mut8 (opt3)
gggagagcggcucggccauuuugucccagucaguccggaggcugcggcugcagaaguaccgccugcggaguaacugcaaagaagcuuaccauggagcugcucauccuuaaggccaacgcuauuaccacaauacugacugcagugacguucugcuuugccagcggccagaauaucaccgaagaguucuaccaauccacauguucugcggucucaaaaggguauuugggagcuuuaagaacugguugguacaccaguguuauuacaaucgaacugagcaacauuaaggagaucaaaugcaauggcaccgacgccaaggugaaacuaauaaagcaggaacucgauaaguauaaaaacgcaguaacugaccugcagcuucugaugcaguccacacccgccaccgggucuggaucggcuaucgcaucaggcguggccgucuguaagguguugcaccucgagggugagguuaauaaaauuaagagcgcucugcugaguacgaacaaagccguggucucccucucugggugcggagugagcguauuaacuuuuaagguucuggaucuuaagaauuacaucgacaaacaauugcugccuauucuaaacaagcaguccuguucaaucccaaauauagaaaccgugauugaguuccagcagaaaaacaauaggcuccuggaaaucacacgggaguuuagugucaacgcgggcgugacuaccccggugagcacauauaugcuuaccaauucugagcuguugucccucauuaacgauaugcccaucacgaaugaccaaaagaaacugaugucaaacaacguccagaucguucgccagcagagcuacaguauuaugugcauaaucaaggaagagguguuagcauauguagugcaacugccucucuacggcgucauugauacuccauguuggaaacuucauacaucuccccugugcaccacuaauacaaaggaaggguccaacaucuguuugacccgaacggaccguggaugguacugcgauaaugccgguagcgugucguucuuuccucaggcugagaccuguaagguucagucuaacagaguguucugcgacacaaugaacucccuaacucugccaucagaagucaaucucugcaauguggauauauuuaaccccaaauaugacuguaagauuaugaccaguaaaacagauguaagcuccucuguuaucacuagccugggcgccaucgugucaugcuacgggaagaccaaauguacagcaaguaauaagugcaggggaauuaucaagaccuucuccaacggcugugacuaugucagcaauaaagguguggacacugucucuguggggaacacgcuuuacuauguuaauaagcaagagggacagucacuguacgugaaaggcgagccuauuauaaacuuuuaugauccauugguauucccgagugacgaauuugaugcuagcaucucccaggucaaugagaagauuaaccagucucucgccuucauccggaaaucggacgaacuguuacacaacgugaaugcgggcaagagcacaaccaacaucaugauuacuaccauaaucauuguuaucauugugauccugcuaucccucauagccgucgggcugcuuuuguacugcaaggcacgcucaacacccgugacccugaguaaagaucaacucucuggaaucaauaacauugcuuucagcaauugaggacuaguaauaaggaaacuguaugaaugucugugggcaggaagugaagagauccuucuguaaagguuuuuggaauuaugucugcugaauaauaaacuuuuuugaaauaauaaaucugguagaaaaaugagaucuaaaaaaaaaaaaaaaaaaaaaaaaaaaaaaaaaaaaaaaaaaaaaaaaaaaaaaaaaaaaaaaaugcaucccccccccccccccccccccccccccccccaaaggcucuuuucagagccaccagaauu

SEQ ID NO: 7681 - RNA, 1964 nt, Artificial Sequence
  mRNA product Design d-2 comprising derived and/or modified sequence from HRSV(A2)__F_DSCav1_mut8 (opt4)
gggagagcggcucggccauuuugucccagucaguccggaggcugcggcugcagaaguaccgccugcggaguaacugcaaagaagcuuaccauggagcugcugauccugaaggccaacgccaucaccaccauccugaccgccgugaccuucugcuucgccagcggccagaacaucaccgaggaguucuaccagagcaccugcagcgccgugagcaagggcuaccugggcgcccugagaaccggcugguacaccagcgugaucaccaucgagcugagcaacaucaaggagaucaagugcaacggcaccgacgccaaggugaagcugaucaagcaggagcuggacaaguacaagaacgccgugaccgaccugcagcugcugaugcagagcacccccgccaccggcagcggcagcgccaucgccagcggcguggccgugugcaaggugcugcaccuggagggcgaggugaacaagaucaagagcgcccugcugagcaccaacaaggccguggugagccugagcggcugcggcgugagcgugcugaccuucaaggugcuggaccugaagaacuacaucgacaagcagcugcugcccauccugaacaagcagagcugcagcauccccaacaucgagaccgugaucgaguuccagcagaagaacaacagacugcuggagaucaccagagaguucagcgugaacgccggcgugaccacccccgugagcaccuacaugcugaccaacagcgagcugcugagccugaucaacgacaugcccaucaccaacgaccagaagaagcugaugagcaacaacgugcagaucgugagacagcagagcuacagcaucaugugcaucaucaaggaggaggugcuggccuacguggugcagcugccccuguacggcgugaucgacacccccugcuggaagcugcacaccagcccccugugcaccaccaacaccaaggagggcagcaacaucugccugaccagaaccgacagaggcugguacugcgacaacgccggcagcgugagcuucuucccccaggccgagaccugcaaggugcagagcaacagaguguucugcgacaccaugaacagccugacccugcccagcgaggugaaccugugcaacguggacaucuucaaccccaaguacgacugcaagaucaugaccagcaagaccgacgugagcagcagcgugaucaccagccugggcgccaucgugagcugcuacggcaagaccaagugcaccgccagcaacaagugcagaggcaucaucaagaccuucagcaacggcugcgacuacgugagcaacaagggcguggacaccgugagcgugggcaacacccuguacuacgugaacaagcaggagggccagagccuguacgugaagggcgagcccaucaucaacuucuacgacccccugguguuccccagcgacgaguucgacgccagcaucagccaggugaacgagaagaucaaccagagccuggccuucaucagaaagagcgacgagcugcugcacaacgugaacgccggcaagagcaccaccaacaucaugaucaccaccaucaucaucgugaucaucgugauccugcugagccugaucgccgugggccugcugcuguacugcaaggccagaagcacccccgugacccugagcaaggaccagcugagcggcaucaacaacaucgccuucagcaacugaggacuaguaauaaggaaacuguaugaaugucugugggcaggaagugaagagauccuucuguaaagguuuuuggaauuaugucugcugaauaauaaacuuuuuugaaauaauaaaucugguagaaaaaugagaucuaaaaaaaaaaaaaaaaaaaaaaaaaaaaaaaaaaaaaaaaaaaaaaaaaaaaaaaaaaaaaaaaugcaucccccccccccccccccccccccccccccccaaaggcucuuuucagagccaccagaauu

SEQ ID NO: 7682 - RNA, 1964 nt, Artificial Sequence
  mRNA product Design d-2 comprising derived and/or modified sequence from HRSV(A2)__F_DSCav1_mut8 (opt5)
gggagagcggcucggccauuuugucccagucaguccggaggcugcggcugcagaaguaccgccugcggaguaacugcaaagaagcuuaccauggagcugcucauccugaaggccaacgcuauuaccacaauccuuacggccgugaccuucugcuuugcgagcggccagaauauuacagaagaguucuaccaauccaccuguucugcugucagcaaaggguaucugggagcccucagaacaggcugguacaccuccguuaucacaauugaacugucuaacaucaaggagaucaaaugcaaugggaccgacgccaaggugaaacuuauuaagcaggaacuggauaaguauaaaaacgcugugacggaccuccagcugcugaugcagagcacccccgccacaggauccggcucugcuaucgccagcggggucgcgguguguaagguucuccaccuggagggagaggugaauaaaauuaaguccgcccuucugagcaccaacaaagcugucgugucucucuccggcugcggcguuagcgugcugacauuuaagguccuugaucugaagaauuacaucgacaaacaacuccugccuauucugaacaagcagucuuguuccaucccgaauauugaaaccgugaucgaguuccagcagaaaaacaaucggcuccuggaaaucacgcgcgaguuuagcgugaacgccggggucacaacccccguuucuacauauaugcuuaccaauuccgagcugcucagccugauuaacgauaugccuaucaccaaugaccaaaagaaacuuauguccaacaacgugcagauugugagacagcagucuuacagcaucaugugcauuaucaaggaagagguccuggcuuaugugguucaacucccccuguacggagugaucgauacaccuuguuggaaacugcauacgagcccccucugcaccacaaauaccaaggaaggcagcaacauuugucugacacggaccgaccgcgggugguacugcgauaaugccggaucugucuccuucuuuccucaggcggagacguguaaggugcagagcaacagaguuuucugcgacacaaugaacucucuuacccugccgagcgaagugaaucucugcaaugucgauaucuuuaaccccaaauaugacuguaagauuaugaccuccaaaacagaugugucuagcuccgucaucaccagccugggcgccauugugucuugcuacgggaagacaaaauguacggcuuccaauaagugccggggaaucaucaagaccuucagcaacggcugugacuauguuucuaauaaaggcguggacacagucuccguggggaacacccuuuacuauguuaauaagcaagagggacagagccuguacgugaaaggcgagccuauuaucaacuuuuaugauccccucgucuucccuuccgacgaauuugaugccucuauuagccaggugaaugagaagaucaaccagucccuggcuuucauucgcaaaucugacgaacugcuccacaacgugaaugccgggaaguccacaaccaacaucaugauuacgaccaucaucauuguuaucauugucauccugcuuucccugauugccgugggacuccugcuguacugcaaggcuagaagcacacccgugacccuuucuaaagaucaacucuccggcaucaauaacaucgcguucagcaauugaggacuaguaauaaggaaacuguaugaaugucugugggcaggaagugaagagauccuucuguaaagguuuuuggaauuaugucugcugaauaauaaacuuuuuugaaauaauaaaucugguagaaaaaugagaucuaaaaaaaaaaaaaaaaaaaaaaaaaaaaaaaaaaaaaaaaaaaaaaaaaaaaaaaaaaaaaaaaugcaucccccccccccccccccccccccccccccccaaaggcucuuuucagagccaccagaauu

SEQ ID NO: 7683 - RNA, 1964 nt, Artificial Sequence
  mRNA product Design d-2 comprising derived and/or modified sequence from HRSV(A2)__F_DSCav1_mut8 (opt6)
gggagagcggcucggccauuuugucccagucaguccggaggcugcggcugcagaaguaccgccugcggaguaacugcaaagaagcuuaccauggaacuauuaauauuaaaagcaaacgcaaucacaacuauacuaacagcaguaacauucugcuuugccucaggucaaaacauaacagaggaauuuuaccaauccacaugcucugcuguaagcaaaggauaccucggagcauuaagaacuggaugguacaccucaguaauaacuauagaacuaucaaacauaaaagaaauaaaauguaauggcacagacgcaaaagugaaauuaaucaaacaagaacucgauaaauacaaaaaugccguaaccgaucuccaacuuuuaaugcaaagcacacccgcaacagguuccgggucagcaauagcaagcggaguugcaguaugcaaaguacuacacuuagaaggagaaguaaauaaaaucaaaucagccuuacuaucaacaaauaaagcaguuguaucacucucaggaugcggaguauccguacuaacauuuaaaguacuagaucuaaaaaacuacauagauaaacaacucuuaccaauacuaaauaaacaaucauguuccauacccaacauagaaaccguuaucgaauuucaacaaaaaaacaacagauuacuagaaaucacacgagaauuuucaguaaaugcuggagucacaacaccaguuaguacauacaugcucaccaauucagaacuacuaaguuuaauuaacgauaugccaauaacaaacgaccaaaaaaaacuaaugucaaauaacguacaaauaguaagacaacaaucauacucaaucaugugcauaauaaaagaagaaguacuagccuauguaguccaauuaccacucuacggcguaaucgacaccccaugcuggaaauuacacacaagcccauuaugcaccaccaacacaaaagaagguucaaacauuugcuuaaccagaaccgaucgaggaugguacugcgauaacgcaggaucugucuccuuuuucccacaagccgaaacaugcaaaguucaaucaaaccgaguuuucugugacacuaugaacucacucacacuuccaagcgaaguaaaccuaugcaacguagauauauuuaacccuaaauacgacugcaaaauaaugacaagcaaaacagacguuaguucaucaguaauuacaagucuaggcgcaauagugucaugcuacggaaaaacaaaaugcaccgcauccaauaaaugccgaggaaucauuaaaacauucucaaacggaugcgacuacgucagcaauaaaggaguagacacuguuucuguaggaaacacccuauacuauguaaacaaacaagaaggucaaucacuauacguaaagggagaaccaauuauaaauuuuuacgaccccuuaguauuuccaagugaugaauuugacgcaucuauaagucaaguuaacgaaaaaauuaaccaaucacuugcauuuauaagaaaaucagacgaacuacuccauaauguaaacgcagguaaaucaacaacaaacaucaugaucacaaccauaauaauaguaauaauuguaauauuacuaucacuaauagcaguaggauuacuacucuacugcaaagcuagaucuaccccggucacacucucaaaagaccaauuaucuggaauaaacaauauagcauucagcaacuaaggacuaguaauaaggaaacuguaugaaugucugugggcaggaagugaagagauccuucuguaaagguuuuuggaauuaugucugcugaauaauaaacuuuuuugaaauaauaaaucugguagaaaaaugagaucuaaaaaaaaaaaaaaaaaaaaaaaaaaaaaaaaaaaaaaaaaaaaaaaaaaaaaaaaaaaaaaaaugcaucccccccccccccccccccccccccccccccaaaggcucuuuucagagccaccagaauu

SEQ ID NO: 7684 - RNA, 1964 nt, Artificial Sequence
  mRNA product Design d-2 comprising derived and/or modified sequence from HRSV(A2)__F_DSCav1_mut8 (opt11)
gggagagcggcucggccauuuugucccagucaguccggaggcugcggcugcagaaguaccgccugcggaguaacugcaaagaagcuuaccauggaacuccucauccuuaaagccaacgccauaaccaccauccucaccgccgucaccuucugcuucgcuucuggccaaaacauaaccgaagaguucuaccaauccacgugcucugccgugucaaaaggcuaccucggagcccuccgcacagggugguacacuuccgucaucaccaucgaacucucuaacaucaaagaaaucaagugcaacggcacagacgcgaaagucaagcucaucaaacaagaacuagacaaauacaaaaacgccguaacagaccuccaacuccuaaugcaguccacaccagccacaggcuccggcagcgccaucgccuccggcgucgcugucugcaaaguccuacaccucgaaggcgaagucaacaaaaucaagucagcccuccuuagcaccaacaaagcagucgucucuuuaagcgggugcggagucucuguccuaaccuuuaaaguacucgaccucaaaaacuacaucgacaaacaacuacuaccaauacuaaacaaacagagcugcuccauucccaacaucgaaaccguuaucgaguuccaacaaaagaacaaccgccuccucgaaaucacccgcgaguucuccgucaacgcaggcgucaccaccccagucuccaccuauaugcuaaccaacagcgaacuccucagccucaucaaugacaugccaaucaccaacgaccaaaagaaacucauguccaacaacguacagauaguccgccagcaguccuacagcaucaugugcaucaucaaagaagaagugcucgccuacgugguacaacucccucucuacggagucauugauacacccugcuggaaacuccacacaagcccccucugcacuacaaacaccaaagaaggcucuaacauaugccucacccgcacagaccgugguugguacugcgacaacgccggcuccguauccuucuuuccacaagcugaaaccugcaaaguucaaucaaaccgagucuucugcgacaccaugaacucccucacauugcccagcgaagucaaccucugcaacgucgacaucuucaaccccaaguacgacugcaaaaucaugaccuccaaaaccgacgucagcuccagcgugaucacaagccuaggcgcgaucgucagcugcuacggcaaaaccaaaugcacagccuccaacaaaugccgcggaaucauaaaaacauucaguaacggcugcgacuacguguccaauaaaggagucgacaccguauccgucggaaacacccucuacuacgucaacaaacaagaaggacaaucccucuaugucaaaggcgaacccauuaucaacuucuacgacccccuaguuuuccccuccgacgaguucgacgcaagcauuucccaagucaacgaaaagaucaaucaaucccucgccuucauacgcaaaagcgacgaacuacuacacaacguaaacgccggcaaaagcaccaccaacaucaugaucacaacaaucaucaucgucaucaucgucauccuacucucacucaucgccguuggccuacuacucuacugcaaagcccgcuccacacccgucacccucucaaaagaccaacucuccggcaucaacaacaucgcauucagcaacugaggacuaguaauaaggaaacuguaugaaugucugugggcaggaagugaagagauccuucuguaaagguuuuuggaauuaugucugcugaauaauaaacuuuuuugaaauaauaaaucugguagaaaaaugagaucuaaaaaaaaaaaaaaaaaaaaaaaaaaaaaaaaaaaaaaaaaaaaaaaaaaaaaaaaaaaaaaaaugcaucccccccccccccccccccccccccccccccaaaggcucuuuucagagccaccagaauu

SEQ ID NO: 7685 - RNA, 2280 nt, Artificial Sequence
  mRNA product Design d-3 comprising derived and/or modified sequence from HRSV(A2)__F_DSCav1_mut8 (opt1)
gggagagggcgcuuggcuugcaaggacccugagcugcggcauugaagcacacccaacccaacucgacugaagucagccucacugaaccggaucugagaaucuucucucucugggcuugccagggcucuccgaaccuagcuagcauccucuucaauuccaacuagaaagcuuaccauggagcugcucauccugaaggccaacgccaucaccaccauccugacggcggugaccuucugcuucgccagcggccagaacaucaccgaggaguucuaccaguccacgugcagcgccgucuccaagggguaccucggcgcccugcggaccggcugguacaccuccgugaucaccaucgagcugagcaacaucaaggagaucaagugcaacgggaccgacgccaaggugaagcucaucaagcaggagcuggacaaguacaagaacgcggucacggaccugcagcuccugaugcaguccaccccggcaaccggcuccggcuccgccaucgcgagcggcgucgccgugugcaaggugcugcaccucgagggggaggucaacaagaucaagagcgcccugcuguccaccaacaaggccguggugagccucuccggcugcggcgucagcgugcugaccuucaaggugcuggaccucaagaacuacaucgacaagcagcugcugcccauccugaacaagcagagcugcuccauccccaacaucgagacggugaucgaguuccagcagaagaacaaccggcuccuggagaucacccgcgaguucagcgugaacgccggggucaccacccccguguccacguacaugcugaccaacagcgagcuccugucccugaucaacgacaugccgaucaccaacgaccagaagaagcucaugagcaacaacgugcagaucguccggcagcaguccuacagcaucaugugcaucaucaaggaggaggugcuggcguacgugguccagcugccccucuacggcgugaucgacacccccugcuggaagcugcacacgagcccccugugcaccaccaacaccaaggagggguccaacaucugccucacgcgcaccgaccggggcugguacugcgacaacgccggcagcgucuccuucuucccgcaggccgagaccugcaaggugcagagcaaccgcguguucugcgacaccaugaacucccugacgcugcccagcgagguaaaccucugcaacgucgacaucuucaaccccaaguacgacugcaagaucaugaccuccaagaccgacgugagcuccagcgugaucaccucccugggggccaucgucagcugcuacggcaagacgaagugcaccgccagcaacaagugccgggggaucaucaagaccuucuccaacggcugcgacuacgugagcaacaagggcguggacaccguguccgucgggaacacccuguacuacgugaacaagcaggagggccagagccucuacgugaagggggagcccaucaucaacuucuacgacccgcuggucuuccccuccgacgaguucgacgcgagcaucucccaggugaacgagaagaucaaccagagccuggccuucauccgcaaguccgacgagcugcuccacaacgugaacgccggcaagagcacgaccaacaucaugaucaccaccaucaucaucgucaucaucgugauccugcugucccucaucgccguggggcugcugcucuacugcaaggcccggagcacgcccgucacccuguccaaggaccagcugagcggcaucaacaacaucgcguucuccaacugaggacuagugaagggaacacccaaauuuaauucagccuuaagcacaauuaauuaagagugaaacguaauuguacaagcaguuggucacccaccauagggcaugaucaacaccgcaaccuuuccuuuuucccccagugauucugaaaaaccccucuucccuucagcuugcuuagauguuccaaauuuaguaagcuuaaggcggccuacagaagaaaaagaaaaaaaaggccacaaaaguucccucucacuuucaguaaauaaaauaaaagcagcaacagaaauaaagaaauaaaugaaauucaaaaugaaauaaauauuguguugugcagcauuaaaaaaucaauaaaaauuaaaaaugagcaagaucuaaaaaaaaaaaaaaaaaaaaaaaaaaaaaaaaaaaaaaaaaaaaaaaaaaaaaaaaaaaaaaaaugcaucccccccccccccccccccccccccccccccaaaggcucuuuucagagccaccagaauu

SEQ ID NO: 7686 - RNA, 2280 nt, Artificial Sequence
  mRNA product Design d-3 comprising derived and/or modified sequence from HRSV(A2)__F_DSCav1_mut8 (opt1)
gggagagggcgcuuggcuugcaaggacccugagcugcggcauugaagcacacccaacccaacucgacugaagucagccucacugaaccggaucugagaaucuucucucucugggcuugccagggcucuccgaaccuagcuagcauccucuucaauuccaacuagaaagcuuaccauggagcugcucauccugaaggccaacgccaucaccaccauccugacggcggugaccuucugcuucgccagcggccagaacaucaccgaggaguucuaccaguccacgugcagcgccgucuccaagggguaccucggcgcccugcgcaccgggugguacaccagcgugaucaccaucgagcuguccaacaucaaggagaucaagugcaacggcaccgacgccaaggugaagcucaucaagcaggagcuggacaaguacaagaacgcggucacggaccugcagcuccugaugcagagcacccccgccaccggguccggcagcgccaucgccuccggcguggcggugugcaagguccugcaccucgagggggaggugaacaagaucaagagcgcccugcuguccaccaacaaggccguggucagccucuccggcugcggggugagcgugcugacguucaagguccuggaccucaagaacuacaucgacaagcagcugcugccgauccucaacaagcaguccugcagcauccccaacaucgagaccgugaucgaguuccagcagaagaacaaccggcugcuggagaucacccgcgaguucuccgugaacgccggcgucaccacgcccgugagcaccuacaugcucaccaacuccgagcugcugagccucaucaacgacaugcccaucaccaacgaccagaagaagcugaugagcaacaacgugcagaucguccggcagcaguccuacagcaucaugugcaucaucaaggaggaggugcuggccuacgugguccagcucccgcuguacggggugaucgacacgcccugcuggaagcugcacaccagcccccucugcaccaccaacacgaaggagggcuccaacaucugccugacccgcaccgaccggggcugguacugcgacaacgcgggguccgugagcuucuucccccaggccgagaccugcaagguccaguccaaccgcguguucugcgacacgaugaacagccugacccucccguccgaggucaaccugugcaacguggacaucuucaaccccaaguacgacugcaagaucaugaccagcaagaccgacguguccagcuccgucaucacgagccugggcgccaucguguccugcuacgggaagaccaagugcaccgccagcaacaagugccggggcaucaucaagaccuucuccaacggcugcgacuacgugagcaacaagggggucgacacgguguccgugggcaacacccucuacuacgucaacaagcaggaggggcagagccuguacgugaagggcgagcccaucaucaacuucuacgacccccugguguucccgagcgacgaguucgacgccuccaucagccaggucaacgagaagaucaaccagucccucgcguucauccgcaagagcgacgagcugcugcacaacgugaacgccgggaaguccaccaccaacaucaugaucaccacgaucaucaucgugaucaucgucauccuccugagccugaucgccgugggccuccugcuguacugcaaggcccgguccacccccgugacccugagcaaggaccagcucuccggcaucaacaacaucgccuucagcaacugaggacuagugaagggaacacccaaauuuaauucagccuuaagcacaauuaauuaagagugaaacguaauuguacaagcaguuggucacccaccauagggcaugaucaacaccgcaaccuuuccuuuuucccccagugauucugaaaaaccccucuucccuucagcuugcuuagauguuccaaauuuaguaagcuuaaggcggccuacagaagaaaaagaaaaaaaaggccacaaaaguucccucucacuuucaguaaauaaaauaaaagcagcaacagaaauaaagaaauaaaugaaauucaaaaugaaauaaauauuguguugugcagcauuaaaaaaucaauaaaaauuaaaaaugagcaagaucuaaaaaaaaaaaaaaaaaaaaaaaaaaaaaaaaaaaaaaaaaaaaaaaaaaaaaaaaaaaaaaaaugcaucccccccccccccccccccccccccccccccaaaggcucuuuucagagccaccagaauu

SEQ ID NO: 7687 - RNA, 2280 nt, Artificial Sequence
  mRNA product Design d-3 comprising derived and/or modified sequence from HRSV(A2)__F_DSCav1_mut8 (opt2)
gggagagggcgcuuggcuugcaaggacccugagcugcggcauugaagcacacccaacccaacucgacugaagucagccucacugaaccggaucugagaaucuucucucucugggcuugccagggcucuccgaaccuagcuagcauccucuucaauuccaacuagaaagcuuaccauggagcuccucauccucaaggccaacgccaucaccaccauccucaccgccgucaccuucugcuucgccuccggccagaacaucaccgaggaguucuaccaguccaccugcuccgccgucuccaagggcuaccucggcgcccuccgcaccggcugguacaccuccgucaucaccaucgagcucuccaacaucaaggagaucaagugcaacggcaccgacgccaaggucaagcucaucaagcaggagcucgacaaguacaagaacgccgucaccgaccuccagcuccucaugcaguccacccccgccaccggcuccggcuccgccaucgccuccggcgucgccgucugcaagguccuccaccucgagggcgaggucaacaagaucaaguccgcccuccucuccaccaacaaggccgucgucucccucuccggcugcggcgucuccguccucaccuucaagguccucgaccucaagaacuacaucgacaagcagcuccuccccauccucaacaagcaguccugcuccauccccaacaucgagaccgucaucgaguuccagcagaagaacaaccgccuccucgagaucacccgcgaguucuccgucaacgccggcgucaccacccccgucuccaccuacaugcucaccaacuccgagcuccucucccucaucaacgacaugcccaucaccaacgaccagaagaagcucauguccaacaacguccagaucguccgccagcaguccuacuccaucaugugcaucaucaaggaggagguccucgccuacgucguccagcucccccucuacggcgucaucgacacccccugcuggaagcuccacaccuccccccucugcaccaccaacaccaaggagggcuccaacaucugccucacccgcaccgaccgcggcugguacugcgacaacgccggcuccgucuccuucuucccccaggccgagaccugcaagguccaguccaaccgcgucuucugcgacaccaugaacucccucacccuccccuccgaggucaaccucugcaacgucgacaucuucaaccccaaguacgacugcaagaucaugaccuccaagaccgacgucuccuccuccgucaucaccucccucggcgccaucgucuccugcuacggcaagaccaagugcaccgccuccaacaagugccgcggcaucaucaagaccuucuccaacggcugcgacuacgucuccaacaagggcgucgacaccgucuccgucggcaacacccucuacuacgucaacaagcaggagggccagucccucuacgucaagggcgagcccaucaucaacuucuacgacccccucgucuuccccuccgacgaguucgacgccuccaucucccaggucaacgagaagaucaaccagucccucgccuucauccgcaaguccgacgagcuccuccacaacgucaacgccggcaaguccaccaccaacaucaugaucaccaccaucaucaucgucaucaucgucauccuccucucccucaucgccgucggccuccuccucuacugcaaggcccgcuccacccccgucacccucuccaaggaccagcucuccggcaucaacaacaucgccuucuccaacugaggacuagugaagggaacacccaaauuuaauucagccuuaagcacaauuaauuaagagugaaacguaauuguacaagcaguuggucacccaccauagggcaugaucaacaccgcaaccuuuccuuuuucccccagugauucugaaaaaccccucuucccuucagcuugcuuagauguuccaaauuuaguaagcuuaaggcggccuacagaagaaaaagaaaaaaaaggccacaaaaguucccucucacuuucaguaaauaaaauaaaagcagcaacagaaauaaagaaauaaaugaaauucaaaaugaaauaaauauuguguugugcagcauuaaaaaaucaauaaaaauuaaaaaugagcaagaucuaaaaaaaaaaaaaaaaaaaaaaaaaaaaaaaaaaaaaaaaaaaaaaaaaaaaaaaaaaaaaaaaugcaucccccccccccccccccccccccccccccccaaaggcucuuuucagagccaccagaauu

SEQ ID NO: 7688 - RNA, 2280 nt, Artificial Sequence
  mRNA product Design d-3 comprising derived and/or modified sequence from HRSV(A2)__F_DSCav1_mut8 (opt3)
gggagagggcgcuuggcuugcaaggacccugagcugcggcauugaagcacacccaacccaacucgacugaagucagccucacugaaccggaucugagaaucuucucucucugggcuugccagggcucuccgaaccuagcuagcauccucuucaauuccaacuagaaagcuuaccauggagcugcucauccuuaaggccaacgcuauuaccacaauacugacugcagugacguucugcuuugccagcggccagaauaucaccgaagaguucuaccaauccacauguucugcggucucaaaaggguauuugggagcuuuaagaacugguugguacaccaguguuauuacaaucgaacugagcaacauuaaggagaucaaaugcaauggcaccgacgccaaggugaaacuaauaaagcaggaacucgauaaguauaaaaacgcaguaacugaccugcagcuucugaugcaguccacacccgccaccgggucuggaucggcuaucgcaucaggcguggccgucuguaagguguugcaccucgagggugagguuaauaaaauuaagagcgcucugcugaguacgaacaaagccguggucucccucucugggugcggagugagcguauuaacuuuuaagguucuggaucuuaagaauuacaucgacaaacaauugcugccuauucuaaacaagcaguccuguucaaucccaaauauagaaaccgugauugaguuccagcagaaaaacaauaggcuccuggaaaucacacgggaguuuagugucaacgcgggcgugacuaccccggugagcacauauaugcuuaccaauucugagcuguugucccucauuaacgauaugcccaucacgaaugaccaaaagaaacugaugucaaacaacguccagaucguucgccagcagagcuacaguauuaugugcauaaucaaggaagagguguuagcauauguagugcaacugccucucuacggcgucauugauacuccauguuggaaacuucauacaucuccccugugcaccacuaauacaaaggaaggguccaacaucuguuugacccgaacggaccguggaugguacugcgauaaugccgguagcgugucguucuuuccucaggcugagaccuguaagguucagucuaacagaguguucugcgacacaaugaacucccuaacucugccaucagaagucaaucucugcaauguggauauauuuaaccccaaauaugacuguaagauuaugaccaguaaaacagauguaagcuccucuguuaucacuagccugggcgccaucgugucaugcuacgggaagaccaaauguacagcaaguaauaagugcaggggaauuaucaagaccuucuccaacggcugugacuaugucagcaauaaagguguggacacugucucuguggggaacacgcuuuacuauguuaauaagcaagagggacagucacuguacgugaaaggcgagccuauuauaaacuuuuaugauccauugguauucccgagugacgaauuugaugcuagcaucucccaggucaaugagaagauuaaccagucucucgccuucauccggaaaucggacgaacuguuacacaacgugaaugcgggcaagagcacaaccaacaucaugauuacuaccauaaucauuguuaucauugugauccugcuaucccucauagccgucgggcugcuuuuguacugcaaggcacgcucaacacccgugacccugaguaaagaucaacucucuggaaucaauaacauugcuuucagcaauugaggacuagugaagggaacacccaaauuuaauucagccuuaagcacaauuaauuaagagugaaacguaauuguacaagcaguuggucacccaccauagggcaugaucaacaccgcaaccuuuccuuuuucccccagugauucugaaaaaccccucuucccuucagcuugcuuagauguuccaaauuuaguaagcuuaaggcggccuacagaagaaaaagaaaaaaaaggccacaaaaguucccucucacuuucaguaaauaaaauaaaagcagcaacagaaauaaagaaauaaaugaaauucaaaaugaaauaaauauuguguugugcagcauuaaaaaaucaauaaaaauuaaaaaugagcaagaucuaaaaaaaaaaaaaaaaaaaaaaaaaaaaaaaaaaaaaaaaaaaaaaaaaaaaaaaaaaaaaaaaugcaucccccccccccccccccccccccccccccccaaaggcucuuuucagagccaccagaauu

SEQ ID NO: 7689 - RNA, 2280 nt, Artificial Sequence
  mRNA product Design d-3 comprising derived and/or modified sequence from HRSV(A2)__F_DSCav1_mut8 (opt4)
gggagagggcgcuuggcuugcaaggacccugagcugcggcauugaagcacacccaacccaacucgacugaagucagccucacugaaccggaucugagaaucuucucucucugggcuugccagggcucuccgaaccuagcuagcauccucuucaauuccaacuagaaagcuuaccauggagcugcugauccugaaggccaacgccaucaccaccauccugaccgccgugaccuucugcuucgccagcggccagaacaucaccgaggaguucuaccagagcaccugcagcgccgugagcaagggcuaccugggcgcccugagaaccggcugguacaccagcgugaucaccaucgagcugagcaacaucaaggagaucaagugcaacggcaccgacgccaaggugaagcugaucaagcaggagcuggacaaguacaagaacgccgugaccgaccugcagcugcugaugcagagcacccccgccaccggcagcggcagcgccaucgccagcggcguggccgugugcaaggugcugcaccuggagggcgaggugaacaagaucaagagcgcccugcugagcaccaacaaggccguggugagccugagcggcugcggcgugagcgugcugaccuucaaggugcuggaccugaagaacuacaucgacaagcagcugcugcccauccugaacaagcagagcugcagcauccccaacaucgagaccgugaucgaguuccagcagaagaacaacagacugcuggagaucaccagagaguucagcgugaacgccggcgugaccacccccgugagcaccuacaugcugaccaacagcgagcugcugagccugaucaacgacaugcccaucaccaacgaccagaagaagcugaugagcaacaacgugcagaucgugagacagcagagcuacagcaucaugugcaucaucaaggaggaggugcuggccuacguggugcagcugccccuguacggcgugaucgacacccccugcuggaagcugcacaccagcccccugugcaccaccaacaccaaggagggcagcaacaucugccugaccagaaccgacagaggcugguacugcgacaacgccggcagcgugagcuucuucccccaggccgagaccugcaaggugcagagcaacagaguguucugcgacaccaugaacagccugacccugcccagcgaggugaaccugugcaacguggacaucuucaaccccaaguacgacugcaagaucaugaccagcaagaccgacgugagcagcagcgugaucaccagccugggcgccaucgugagcugcuacggcaagaccaagugcaccgccagcaacaagugcagaggcaucaucaagaccuucagcaacggcugcgacuacgugagcaacaagggcguggacaccgugagcgugggcaacacccuguacuacgugaacaagcaggagggccagagccuguacgugaagggcgagcccaucaucaacuucuacgacccccugguguuccccagcgacgaguucgacgccagcaucagccaggugaacgagaagaucaaccagagccuggccuucaucagaaagagcgacgagcugcugcacaacgugaacgccggcaagagcaccaccaacaucaugaucaccaccaucaucaucgugaucaucgugauccugcugagccugaucgccgugggccugcugcuguacugcaaggccagaagcacccccgugacccugagcaaggaccagcugagcggcaucaacaacaucgccuucagcaacugaggacuagugaagggaacacccaaauuuaauucagccuuaagcacaauuaauuaagagugaaacguaauuguacaagcaguuggucacccaccauagggcaugaucaacaccgcaaccuuuccuuuuucccccagugauucugaaaaaccccucuucccuucagcuugcuuagauguuccaaauuuaguaagcuuaaggcggccuacagaagaaaaagaaaaaaaaggccacaaaaguucccucucacuuucaguaaauaaaauaaaagcagcaacagaaauaaagaaauaaaugaaauucaaaaugaaauaaauauuguguugugcagcauuaaaaaaucaauaaaaauuaaaaaugagcaagaucuaaaaaaaaaaaaaaaaaaaaaaaaaaaaaaaaaaaaaaaaaaaaaaaaaaaaaaaaaaaaaaaaugcaucccccccccccccccccccccccccccccccaaaggcucuuuucagagccaccagaauu

SEQ ID NO: 7690 - RNA, 2280 nt, Artificial Sequence
  mRNA product Design d-3 comprising derived and/or modified sequence from HRSV(A2)__F_DSCav1_mut8 (opt5)
gggagagggcgcuuggcuugcaaggacccugagcugcggcauugaagcacacccaacccaacucgacugaagucagccucacugaaccggaucugagaaucuucucucucugggcuugccagggcucuccgaaccuagcuagcauccucuucaauuccaacuagaaagcuuaccauggagcugcucauccugaaggccaacgcuauuaccacaauccuuacggccgugaccuucugcuuugcgagcggccagaauauuacagaagaguucuaccaauccaccuguucugcugucagcaaaggguaucugggagcccucagaacaggcugguacaccuccguuaucacaauugaacugucuaacaucaaggagaucaaaugcaaugggaccgacgccaaggugaaacuuauuaagcaggaacuggauaaguauaaaaacgcugugacggaccuccagcugcugaugcagagcacccccgccacaggauccggcucugcuaucgccagcggggucgcgguguguaagguucuccaccuggagggagaggugaauaaaauuaaguccgcccuucugagcaccaacaaagcugucgugucucucuccggcugcggcguuagcgugcugacauuuaagguccuugaucugaagaauuacaucgacaaacaacuccugccuauucugaacaagcagucuuguuccaucccgaauauugaaaccgugaucgaguuccagcagaaaaacaaucggcuccuggaaaucacgcgcgaguuuagcgugaacgccggggucacaacccccguuucuacauauaugcuuaccaauuccgagcugcucagccugauuaacgauaugccuaucaccaaugaccaaaagaaacuuauguccaacaacgugcagauugugagacagcagucuuacagcaucaugugcauuaucaaggaagagguccuggcuuaugugguucaacucccccuguacggagugaucgauacaccuuguuggaaacugcauacgagcccccucugcaccacaaauaccaaggaaggcagcaacauuugucugacacggaccgaccgcgggugguacugcgauaaugccggaucugucuccuucuuuccucaggcggagacguguaaggugcagagcaacagaguuuucugcgacacaaugaacucucuuacccugccgagcgaagugaaucucugcaaugucgauaucuuuaaccccaaauaugacuguaagauuaugaccuccaaaacagaugugucuagcuccgucaucaccagccugggcgccauugugucuugcuacgggaagacaaaauguacggcuuccaauaagugccggggaaucaucaagaccuucagcaacggcugugacuauguuucuaauaaaggcguggacacagucuccguggggaacacccuuuacuauguuaauaagcaagagggacagagccuguacgugaaaggcgagccuauuaucaacuuuuaugauccccucgucuucccuuccgacgaauuugaugccucuauuagccaggugaaugagaagaucaaccagucccuggcuuucauucgcaaaucugacgaacugcuccacaacgugaaugccgggaaguccacaaccaacaucaugauuacgaccaucaucauuguuaucauugucauccugcuuucccugauugccgugggacuccugcuguacugcaaggcuagaagcacacccgugacccuuucuaaagaucaacucuccggcaucaauaacaucgcguucagcaauugaggacuagugaagggaacacccaaauuuaauucagccuuaagcacaauuaauuaagagugaaacguaauuguacaagcaguuggucacccaccauagggcaugaucaacaccgcaaccuuuccuuuuucccccagugauucugaaaaaccccucuucccuucagcuugcuuagauguuccaaauuuaguaagcuuaaggcggccuacagaagaaaaagaaaaaaaaggccacaaaaguucccucucacuuucaguaaauaaaauaaaagcagcaacagaaauaaagaaauaaaugaaauucaaaaugaaauaaauauuguguugugcagcauuaaaaaaucaauaaaaauuaaaaaugagcaagaucuaaaaaaaaaaaaaaaaaaaaaaaaaaaaaaaaaaaaaaaaaaaaaaaaaaaaaaaaaaaaaaaaugcaucccccccccccccccccccccccccccccccaaaggcucuuuucagagccaccagaauu

SEQ ID NO: 7691 - RNA, 2280 nt, Artificial Sequence
  mRNA product Design d-3 comprising derived and/or modified sequence from HRSV(A2)__F_DSCav1_mut8 (opt6)
gggagagggcgcuuggcuugcaaggacccugagcugcggcauugaagcacacccaacccaacucgacugaagucagccucacugaaccggaucugagaaucuucucucucugggcuugccagggcucuccgaaccuagcuagcauccucuucaauuccaacuagaaagcuuaccauggaacuauuaauauuaaaagcaaacgcaaucacaacuauacuaacagcaguaacauucugcuuugccucaggucaaaacauaacagaggaauuuuaccaauccacaugcucugcuguaagcaaaggauaccucggagcauuaagaacuggaugguacaccucaguaauaacuauagaacuaucaaacauaaaagaaauaaaauguaauggcacagacgcaaaagugaaauuaaucaaacaagaacucgauaaauacaaaaaugccguaaccgaucuccaacuuuuaaugcaaagcacacccgcaacagguuccgggucagcaauagcaagcggaguugcaguaugcaaaguacuacacuuagaaggagaaguaaauaaaaucaaaucagccuuacuaucaacaaauaaagcaguuguaucacucucaggaugcggaguauccguacuaacauuuaaaguacuagaucuaaaaaacuacauagauaaacaacucuuaccaauacuaaauaaacaaucauguuccauacccaacauagaaaccguuaucgaauuucaacaaaaaaacaacagauuacuagaaaucacacgagaauuuucaguaaaugcuggagucacaacaccaguuaguacauacaugcucaccaauucagaacuacuaaguuuaauuaacgauaugccaauaacaaacgaccaaaaaaaacuaaugucaaauaacguacaaauaguaagacaacaaucauacucaaucaugugcauaauaaaagaagaaguacuagccuauguaguccaauuaccacucuacggcguaaucgacaccccaugcuggaaauuacacacaagcccauuaugcaccaccaacacaaaagaagguucaaacauuugcuuaaccagaaccgaucgaggaugguacugcgauaacgcaggaucugucuccuuuuucccacaagccgaaacaugcaaaguucaaucaaaccgaguuuucugugacacuaugaacucacucacacuuccaagcgaaguaaaccuaugcaacguagauauauuuaacccuaaauacgacugcaaaauaaugacaagcaaaacagacguuaguucaucaguaauuacaagucuaggcgcaauagugucaugcuacggaaaaacaaaaugcaccgcauccaauaaaugccgaggaaucauuaaaacauucucaaacggaugcgacuacgucagcaauaaaggaguagacacuguuucuguaggaaacacccuauacuauguaaacaaacaagaaggucaaucacuauacguaaagggagaaccaauuauaaauuuuuacgaccccuuaguauuuccaagugaugaauuugacgcaucuauaagucaaguuaacgaaaaaauuaaccaaucacuugcauuuauaagaaaaucagacgaacuacuccauaauguaaacgcagguaaaucaacaacaaacaucaugaucacaaccauaauaauaguaauaauuguaauauuacuaucacuaauagcaguaggauuacuacucuacugcaaagcuagaucuaccccggucacacucucaaaagaccaauuaucuggaauaaacaauauagcauucagcaacuaaggacuagugaagggaacacccaaauuuaauucagccuuaagcacaauuaauuaagagugaaacguaauuguacaagcaguuggucacccaccauagggcaugaucaacaccgcaaccuuuccuuuuucccccagugauucugaaaaaccccucuucccuucagcuugcuuagauguuccaaauuuaguaagcuuaaggcggccuacagaagaaaaagaaaaaaaaggccacaaaaguucccucucacuuucaguaaauaaaauaaaagcagcaacagaaauaaagaaauaaaugaaauucaaaaugaaauaaauauuguguugugcagcauuaaaaaaucaauaaaaauuaaaaaugagcaagaucuaaaaaaaaaaaaaaaaaaaaaaaaaaaaaaaaaaaaaaaaaaaaaaaaaaaaaaaaaaaaaaaaugcaucccccccccccccccccccccccccccccccaaaggcucuuuucagagccaccagaauu

SEQ ID NO: 7692 - RNA, 2280 nt, Artificial Sequence
  mRNA product Design d-3 comprising derived and/or modified sequence from HRSV(A2)__F_DSCav1_mut8 (opt11)
gggagagggcgcuuggcuugcaaggacccugagcugcggcauugaagcacacccaacccaacucgacugaagucagccucacugaaccggaucugagaaucuucucucucugggcuugccagggcucuccgaaccuagcuagcauccucuucaauuccaacuagaaagcuuaccauggaacuccucauccuuaaagccaacgccauaaccaccauccucaccgccgucaccuucugcuucgcuucuggccaaaacauaaccgaagaguucuaccaauccacgugcucugccgugucaaaaggcuaccucggagcccuccgcacagggugguacacuuccgucaucaccaucgaacucucuaacaucaaagaaaucaagugcaacggcacagacgcgaaagucaagcucaucaaacaagaacuagacaaauacaaaaacgccguaacagaccuccaacuccuaaugcaguccacaccagccacaggcuccggcagcgccaucgccuccggcgucgcugucugcaaaguccuacaccucgaaggcgaagucaacaaaaucaagucagcccuccuuagcaccaacaaagcagucgucucuuuaagcgggugcggagucucuguccuaaccuuuaaaguacucgaccucaaaaacuacaucgacaaacaacuacuaccaauacuaaacaaacagagcugcuccauucccaacaucgaaaccguuaucgaguuccaacaaaagaacaaccgccuccucgaaaucacccgcgaguucuccgucaacgcaggcgucaccaccccagucuccaccuauaugcuaaccaacagcgaacuccucagccucaucaaugacaugccaaucaccaacgaccaaaagaaacucauguccaacaacguacagauaguccgccagcaguccuacagcaucaugugcaucaucaaagaagaagugcucgccuacgugguacaacucccucucuacggagucauugauacacccugcuggaaacuccacacaagcccccucugcacuacaaacaccaaagaaggcucuaacauaugccucacccgcacagaccgugguugguacugcgacaacgccggcuccguauccuucuuuccacaagcugaaaccugcaaaguucaaucaaaccgagucuucugcgacaccaugaacucccucacauugcccagcgaagucaaccucugcaacgucgacaucuucaaccccaaguacgacugcaaaaucaugaccuccaaaaccgacgucagcuccagcgugaucacaagccuaggcgcgaucgucagcugcuacggcaaaaccaaaugcacagccuccaacaaaugccgcggaaucauaaaaacauucaguaacggcugcgacuacguguccaauaaaggagucgacaccguauccgucggaaacacccucuacuacgucaacaaacaagaaggacaaucccucuaugucaaaggcgaacccauuaucaacuucuacgacccccuaguuuuccccuccgacgaguucgacgcaagcauuucccaagucaacgaaaagaucaaucaaucccucgccuucauacgcaaaagcgacgaacuacuacacaacguaaacgccggcaaaagcaccaccaacaucaugaucacaacaaucaucaucgucaucaucgucauccuacucucacucaucgccguuggccuacuacucuacugcaaagcccgcuccacacccgucacccucucaaaagaccaacucuccggcaucaacaacaucgcauucagcaacugaggacuagugaagggaacacccaaauuuaauucagccuuaagcacaauuaauuaagagugaaacguaauuguacaagcaguuggucacccaccauagggcaugaucaacaccgcaaccuuuccuuuuucccccagugauucugaaaaaccccucuucccuucagcuugcuuagauguuccaaauuuaguaagcuuaaggcggccuacagaagaaaaagaaaaaaaaggccacaaaaguucccucucacuuucaguaaauaaaauaaaagcagcaacagaaauaaagaaauaaaugaaauucaaaaugaaauaaauauuguguugugcagcauuaaaaaaucaauaaaaauuaaaaaugagcaagaucuaaaaaaaaaaaaaaaaaaaaaaaaaaaaaaaaaaaaaaaaaaaaaaaaaaaaaaaaaaaaaaaaugcaucccccccccccccccccccccccccccccccaaaggcucuuuucagagccaccagaauu

SEQ ID NO: 7693 - RNA, 1963 nt, Artificial Sequence
  mRNA product Design d-4 comprising derived and/or modified sequence from HRSV(A2)__F_DSCav1_mut8 (opt1)
gggagagucccgcagucggcguccagcggcucugcuuguucgugugugugucguugcaggccuuauucaagcuuaccauggagcugcucauccugaaggccaacgccaucaccaccauccugacggcggugaccuucugcuucgccagcggccagaacaucaccgaggaguucuaccaguccacgugcagcgccgucuccaagggguaccucggcgcccugcggaccggcugguacaccuccgugaucaccaucgagcugagcaacaucaaggagaucaagugcaacgggaccgacgccaaggugaagcucaucaagcaggagcuggacaaguacaagaacgcggucacggaccugcagcuccugaugcaguccaccccggcaaccggcuccggcuccgccaucgcgagcggcgucgccgugugcaaggugcugcaccucgagggggaggucaacaagaucaagagcgcccugcuguccaccaacaaggccguggugagccucuccggcugcggcgucagcgugcugaccuucaaggugcuggaccucaagaacuacaucgacaagcagcugcugcccauccugaacaagcagagcugcuccauccccaacaucgagacggugaucgaguuccagcagaagaacaaccggcuccuggagaucacccgcgaguucagcgugaacgccggggucaccacccccguguccacguacaugcugaccaacagcgagcuccugucccugaucaacgacaugccgaucaccaacgaccagaagaagcucaugagcaacaacgugcagaucguccggcagcaguccuacagcaucaugugcaucaucaaggaggaggugcuggcguacgugguccagcugccccucuacggcgugaucgacacccccugcuggaagcugcacacgagcccccugugcaccaccaacaccaaggagggguccaacaucugccucacgcgcaccgaccggggcugguacugcgacaacgccggcagcgucuccuucuucccgcaggccgagaccugcaaggugcagagcaaccgcguguucugcgacaccaugaacucccugacgcugcccagcgagguaaaccucugcaacgucgacaucuucaaccccaaguacgacugcaagaucaugaccuccaagaccgacgugagcuccagcgugaucaccucccugggggccaucgucagcugcuacggcaagacgaagugcaccgccagcaacaagugccgggggaucaucaagaccuucuccaacggcugcgacuacgugagcaacaagggcguggacaccguguccgucgggaacacccuguacuacgugaacaagcaggagggccagagccucuacgugaagggggagcccaucaucaacuucuacgacccgcuggucuuccccuccgacgaguucgacgcgagcaucucccaggugaacgagaagaucaaccagagccuggccuucauccgcaaguccgacgagcugcuccacaacgugaacgccggcaagagcacgaccaacaucaugaucaccaccaucaucaucgucaucaucgugauccugcugucccucaucgccguggggcugcugcucuacugcaaggcccggagcacgcccgucacccuguccaaggaccagcugagcggcaucaacaacaucgcguucuccaacugaggacuaguggaagcauuuuccuggcugauuaaaagaaauuacucagcuauggucaucuguuccuguuagaaggcuaugcagcauauuauauacuaugcgcauguuaugaaaugcauaauaaaaaauuuuaaaaaaucuaaaagaucuaaaaaaaaaaaaaaaaaaaaaaaaaaaaaaaaaaaaaaaaaaaaaaaaaaaaaaaaaaaaaaaaugcaucccccccccccccccccccccccccccccccaaaggcucuuuucagagccaccagaauu

SEQ ID NO: 7694 - RNA, 1963 nt, Artificial Sequence
  mRNA product Design d-4 comprising derived and/or modified sequence from HRSV(A2)__F_DSCav1_mut8 (opt1)
gggagagucccgcagucggcguccagcggcucugcuuguucgugugugugucguugcaggccuuauucaagcuuaccauggagcugcucauccugaaggccaacgccaucaccaccauccugacggcggugaccuucugcuucgccagcggccagaacaucaccgaggaguucuaccaguccacgugcagcgccgucuccaagggguaccucggcgcccugcgcaccgggugguacaccagcgugaucaccaucgagcuguccaacaucaaggagaucaagugcaacggcaccgacgccaaggugaagcucaucaagcaggagcuggacaaguacaagaacgcggucacggaccugcagcuccugaugcagagcacccccgccaccggguccggcagcgccaucgccuccggcguggcggugugcaagguccugcaccucgagggggaggugaacaagaucaagagcgcccugcuguccaccaacaaggccguggucagccucuccggcugcggggugagcgugcugacguucaagguccuggaccucaagaacuacaucgacaagcagcugcugccgauccucaacaagcaguccugcagcauccccaacaucgagaccgugaucgaguuccagcagaagaacaaccggcugcuggagaucacccgcgaguucuccgugaacgccggcgucaccacgcccgugagcaccuacaugcucaccaacuccgagcugcugagccucaucaacgacaugcccaucaccaacgaccagaagaagcugaugagcaacaacgugcagaucguccggcagcaguccuacagcaucaugugcaucaucaaggaggaggugcuggccuacgugguccagcucccgcuguacggggugaucgacacgcccugcuggaagcugcacaccagcccccucugcaccaccaacacgaaggagggcuccaacaucugccugacccgcaccgaccggggcugguacugcgacaacgcgggguccgugagcuucuucccccaggccgagaccugcaagguccaguccaaccgcguguucugcgacacgaugaacagccugacccucccguccgaggucaaccugugcaacguggacaucuucaaccccaaguacgacugcaagaucaugaccagcaagaccgacguguccagcuccgucaucacgagccugggcgccaucguguccugcuacgggaagaccaagugcaccgccagcaacaagugccggggcaucaucaagaccuucuccaacggcugcgacuacgugagcaacaagggggucgacacgguguccgugggcaacacccucuacuacgucaacaagcaggaggggcagagccuguacgugaagggcgagcccaucaucaacuucuacgacccccugguguucccgagcgacgaguucgacgccuccaucagccaggucaacgagaagaucaaccagucccucgcguucauccgcaagagcgacgagcugcugcacaacgugaacgccgggaaguccaccaccaacaucaugaucaccacgaucaucaucgugaucaucgucauccuccugagccugaucgccgugggccuccugcuguacugcaaggcccgguccacccccgugacccugagcaaggaccagcucuccggcaucaacaacaucgccuucagcaacugaggacuaguggaagcauuuuccuggcugauuaaaagaaauuacucagcuauggucaucuguuccuguuagaaggcuaugcagcauauuauauacuaugcgcauguuaugaaaugcauaauaaaaaauuuuaaaaaaucuaaaagaucuaaaaaaaaaaaaaaaaaaaaaaaaaaaaaaaaaaaaaaaaaaaaaaaaaaaaaaaaaaaaaaaaugcaucccccccccccccccccccccccccccccccaaaggcucuuuucagagccaccagaauu

SEQ ID NO: 7695 - RNA, 1963 nt, Artificial Sequence
  mRNA product Design d-4 comprising derived and/or modified sequence from HRSV(A2)__F_DSCav1_mut8 (opt2)
gggagagucccgcagucggcguccagcggcucugcuuguucgugugugugucguugcaggccuuauucaagcuuaccauggagcuccucauccucaaggccaacgccaucaccaccauccucaccgccgucaccuucugcuucgccuccggccagaacaucaccgaggaguucuaccaguccaccugcuccgccgucuccaagggcuaccucggcgcccuccgcaccggcugguacaccuccgucaucaccaucgagcucuccaacaucaaggagaucaagugcaacggcaccgacgccaaggucaagcucaucaagcaggagcucgacaaguacaagaacgccgucaccgaccuccagcuccucaugcaguccacccccgccaccggcuccggcuccgccaucgccuccggcgucgccgucugcaagguccuccaccucgagggcgaggucaacaagaucaaguccgcccuccucuccaccaacaaggccgucgucucccucuccggcugcggcgucuccguccucaccuucaagguccucgaccucaagaacuacaucgacaagcagcuccuccccauccucaacaagcaguccugcuccauccccaacaucgagaccgucaucgaguuccagcagaagaacaaccgccuccucgagaucacccgcgaguucuccgucaacgccggcgucaccacccccgucuccaccuacaugcucaccaacuccgagcuccucucccucaucaacgacaugcccaucaccaacgaccagaagaagcucauguccaacaacguccagaucguccgccagcaguccuacuccaucaugugcaucaucaaggaggagguccucgccuacgucguccagcucccccucuacggcgucaucgacacccccugcuggaagcuccacaccuccccccucugcaccaccaacaccaaggagggcuccaacaucugccucacccgcaccgaccgcggcugguacugcgacaacgccggcuccgucuccuucuucccccaggccgagaccugcaagguccaguccaaccgcgucuucugcgacaccaugaacucccucacccuccccuccgaggucaaccucugcaacgucgacaucuucaaccccaaguacgacugcaagaucaugaccuccaagaccgacgucuccuccuccgucaucaccucccucggcgccaucgucuccugcuacggcaagaccaagugcaccgccuccaacaagugccgcggcaucaucaagaccuucuccaacggcugcgacuacgucuccaacaagggcgucgacaccgucuccgucggcaacacccucuacuacgucaacaagcaggagggccagucccucuacgucaagggcgagcccaucaucaacuucuacgacccccucgucuuccccuccgacgaguucgacgccuccaucucccaggucaacgagaagaucaaccagucccucgccuucauccgcaaguccgacgagcuccuccacaacgucaacgccggcaaguccaccaccaacaucaugaucaccaccaucaucaucgucaucaucgucauccuccucucccucaucgccgucggccuccuccucuacugcaaggcccgcuccacccccgucacccucuccaaggaccagcucuccggcaucaacaacaucgccuucuccaacugaggacuaguggaagcauuuuccuggcugauuaaaagaaauuacucagcuauggucaucuguuccuguuagaaggcuaugcagcauauuauauacuaugcgcauguuaugaaaugcauaauaaaaaauuuuaaaaaaucuaaaagaucuaaaaaaaaaaaaaaaaaaaaaaaaaaaaaaaaaaaaaaaaaaaaaaaaaaaaaaaaaaaaaaaaugcaucccccccccccccccccccccccccccccccaaaggcucuuuucagagccaccagaauu

SEQ ID NO: 7696 - RNA, 1963 nt, Artificial Sequence
  mRNA product Design d-4 comprising derived and/or modified sequence from HRSV(A2)__F_DSCav1_mut8 (opt3)
gggagagucccgcagucggcguccagcggcucugcuuguucgugugugugucguugcaggccuuauucaagcuuaccauggagcugcucauccuuaaggccaacgcuauuaccacaauacugacugcagugacguucugcuuugccagcggccagaauaucaccgaagaguucuaccaauccacauguucugcggucucaaaaggguauuugggagcuuuaagaacugguugguacaccaguguuauuacaaucgaacugagcaacauuaaggagaucaaaugcaauggcaccgacgccaaggugaaacuaauaaagcaggaacucgauaaguauaaaaacgcaguaacugaccugcagcuucugaugcaguccacacccgccaccgggucuggaucggcuaucgcaucaggcguggccgucuguaagguguugcaccucgagggugagguuaauaaaauuaagagcgcucugcugaguacgaacaaagccguggucucccucucugggugcggagugagcguauuaacuuuuaagguucuggaucuuaagaauuacaucgacaaacaauugcugccuauucuaaacaagcaguccuguucaaucccaaauauagaaaccgugauugaguuccagcagaaaaacaauaggcuccuggaaaucacacgggaguuuagugucaacgcgggcgugacuaccccggugagcacauauaugcuuaccaauucugagcuguugucccucauuaacgauaugcccaucacgaaugaccaaaagaaacugaugucaaacaacguccagaucguucgccagcagagcuacaguauuaugugcauaaucaaggaagagguguuagcauauguagugcaacugccucucuacggcgucauugauacuccauguuggaaacuucauacaucuccccugugcaccacuaauacaaaggaaggguccaacaucuguuugacccgaacggaccguggaugguacugcgauaaugccgguagcgugucguucuuuccucaggcugagaccuguaagguucagucuaacagaguguucugcgacacaaugaacucccuaacucugccaucagaagucaaucucugcaauguggauauauuuaaccccaaauaugacuguaagauuaugaccaguaaaacagauguaagcuccucuguuaucacuagccugggcgccaucgugucaugcuacgggaagaccaaauguacagcaaguaauaagugcaggggaauuaucaagaccuucuccaacggcugugacuaugucagcaauaaagguguggacacugucucuguggggaacacgcuuuacuauguuaauaagcaagagggacagucacuguacgugaaaggcgagccuauuauaaacuuuuaugauccauugguauucccgagugacgaauuugaugcuagcaucucccaggucaaugagaagauuaaccagucucucgccuucauccggaaaucggacgaacuguuacacaacgugaaugcgggcaagagcacaaccaacaucaugauuacuaccauaaucauuguuaucauugugauccugcuaucccucauagccgucgggcugcuuuuguacugcaaggcacgcucaacacccgugacccugaguaaagaucaacucucuggaaucaauaacauugcuuucagcaauugaggacuaguggaagcauuuuccuggcugauuaaaagaaauuacucagcuauggucaucuguuccuguuagaaggcuaugcagcauauuauauacuaugcgcauguuaugaaaugcauaauaaaaaauuuuaaaaaaucuaaaagaucuaaaaaaaaaaaaaaaaaaaaaaaaaaaaaaaaaaaaaaaaaaaaaaaaaaaaaaaaaaaaaaaaugcaucccccccccccccccccccccccccccccccaaaggcucuuuucagagccaccagaauu

SEQ ID NO: 7697 - RNA, 1963 nt, Artificial Sequence
  mRNA product Design d-4 comprising derived and/or modified sequence from HRSV(A2)__F_DSCav1_mut8 (opt4)
gggagagucccgcagucggcguccagcggcucugcuuguucgugugugugucguugcaggccuuauucaagcuuaccauggagcugcugauccugaaggccaacgccaucaccaccauccugaccgccgugaccuucugcuucgccagcggccagaacaucaccgaggaguucuaccagagcaccugcagcgccgugagcaagggcuaccugggcgcccugagaaccggcugguacaccagcgugaucaccaucgagcugagcaacaucaaggagaucaagugcaacggcaccgacgccaaggugaagcugaucaagcaggagcuggacaaguacaagaacgccgugaccgaccugcagcugcugaugcagagcacccccgccaccggcagcggcagcgccaucgccagcggcguggccgugugcaaggugcugcaccuggagggcgaggugaacaagaucaagagcgcccugcugagcaccaacaaggccguggugagccugagcggcugcggcgugagcgugcugaccuucaaggugcuggaccugaagaacuacaucgacaagcagcugcugcccauccugaacaagcagagcugcagcauccccaacaucgagaccgugaucgaguuccagcagaagaacaacagacugcuggagaucaccagagaguucagcgugaacgccggcgugaccacccccgugagcaccuacaugcugaccaacagcgagcugcugagccugaucaacgacaugcccaucaccaacgaccagaagaagcugaugagcaacaacgugcagaucgugagacagcagagcuacagcaucaugugcaucaucaaggaggaggugcuggccuacguggugcagcugccccuguacggcgugaucgacacccccugcuggaagcugcacaccagcccccugugcaccaccaacaccaaggagggcagcaacaucugccugaccagaaccgacagaggcugguacugcgacaacgccggcagcgugagcuucuucccccaggccgagaccugcaaggugcagagcaacagaguguucugcgacaccaugaacagccugacccugcccagcgaggugaaccugugcaacguggacaucuucaaccccaaguacgacugcaagaucaugaccagcaagaccgacgugagcagcagcgugaucaccagccugggcgccaucgugagcugcuacggcaagaccaagugcaccgccagcaacaagugcagaggcaucaucaagaccuucagcaacggcugcgacuacgugagcaacaagggcguggacaccgugagcgugggcaacacccuguacuacgugaacaagcaggagggccagagccuguacgugaagggcgagcccaucaucaacuucuacgacccccugguguuccccagcgacgaguucgacgccagcaucagccaggugaacgagaagaucaaccagagccuggccuucaucagaaagagcgacgagcugcugcacaacgugaacgccggcaagagcaccaccaacaucaugaucaccaccaucaucaucgugaucaucgugauccugcugagccugaucgccgugggccugcugcuguacugcaaggccagaagcacccccgugacccugagcaaggaccagcugagcggcaucaacaacaucgccuucagcaacugaggacuaguggaagcauuuuccuggcugauuaaaagaaauuacucagcuauggucaucuguuccuguuagaaggcuaugcagcauauuauauacuaugcgcauguuaugaaaugcauaauaaaaaauuuuaaaaaaucuaaaagaucuaaaaaaaaaaaaaaaaaaaaaaaaaaaaaaaaaaaaaaaaaaaaaaaaaaaaaaaaaaaaaaaaugcaucccccccccccccccccccccccccccccccaaaggcucuuuucagagccaccagaauu

SEQ ID NO: 7698 - RNA, 1963 nt, Artificial Sequence
  mRNA product Design d-4 comprising derived and/or modified sequence from HRSV(A2)__F_DSCav1_mut8 (opt5)
gggagagucccgcagucggcguccagcggcucugcuuguucgugugugugucguugcaggccuuauucaagcuuaccauggagcugcucauccugaaggccaacgcuauuaccacaauccuuacggccgugaccuucugcuuugcgagcggccagaauauuacagaagaguucuaccaauccaccuguucugcugucagcaaaggguaucugggagcccucagaacaggcugguacaccuccguuaucacaauugaacugucuaacaucaaggagaucaaaugcaaugggaccgacgccaaggugaaacuuauuaagcaggaacuggauaaguauaaaaacgcugugacggaccuccagcugcugaugcagagcacccccgccacaggauccggcucugcuaucgccagcggggucgcgguguguaagguucuccaccuggagggagaggugaauaaaauuaaguccgcccuucugagcaccaacaaagcugucgugucucucuccggcugcggcguuagcgugcugacauuuaagguccuugaucugaagaauuacaucgacaaacaacuccugccuauucugaacaagcagucuuguuccaucccgaauauugaaaccgugaucgaguuccagcagaaaaacaaucggcuccuggaaaucacgcgcgaguuuagcgugaacgccggggucacaacccccguuucuacauauaugcuuaccaauuccgagcugcucagccugauuaacgauaugccuaucaccaaugaccaaaagaaacuuauguccaacaacgugcagauugugagacagcagucuuacagcaucaugugcauuaucaaggaagagguccuggcuuaugugguucaacucccccuguacggagugaucgauacaccuuguuggaaacugcauacgagcccccucugcaccacaaauaccaaggaaggcagcaacauuugucugacacggaccgaccgcgggugguacugcgauaaugccggaucugucuccuucuuuccucaggcggagacguguaaggugcagagcaacagaguuuucugcgacacaaugaacucucuuacccugccgagcgaagugaaucucugcaaugucgauaucuuuaaccccaaauaugacuguaagauuaugaccuccaaaacagaugugucuagcuccgucaucaccagccugggcgccauugugucuugcuacgggaagacaaaauguacggcuuccaauaagugccggggaaucaucaagaccuucagcaacggcugugacuauguuucuaauaaaggcguggacacagucuccguggggaacacccuuuacuauguuaauaagcaagagggacagagccuguacgugaaaggcgagccuauuaucaacuuuuaugauccccucgucuucccuuccgacgaauuugaugccucuauuagccaggugaaugagaagaucaaccagucccuggcuuucauucgcaaaucugacgaacugcuccacaacgugaaugccgggaaguccacaaccaacaucaugauuacgaccaucaucauuguuaucauugucauccugcuuucccugauugccgugggacuccugcuguacugcaaggcuagaagcacacccgugacccuuucuaaagaucaacucuccggcaucaauaacaucgcguucagcaauugaggacuaguggaagcauuuuccuggcugauuaaaagaaauuacucagcuauggucaucuguuccuguuagaaggcuaugcagcauauuauauacuaugcgcauguuaugaaaugcauaauaaaaaauuuuaaaaaaucuaaaagaucuaaaaaaaaaaaaaaaaaaaaaaaaaaaaaaaaaaaaaaaaaaaaaaaaaaaaaaaaaaaaaaaaugcaucccccccccccccccccccccccccccccccaaaggcucuuuucagagccaccagaauu

SEQ ID NO: 7699 - RNA, 1963 nt, Artificial Sequence
  mRNA product Design d-4 comprising derived and/or modified sequence from HRSV(A2)__F_DSCav1_mut8 (opt6)
gggagagucccgcagucggcguccagcggcucugcuuguucgugugugugucguugcaggccuuauucaagcuuaccauggaacuauuaauauuaaaagcaaacgcaaucacaacuauacuaacagcaguaacauucugcuuugccucaggucaaaacauaacagaggaauuuuaccaauccacaugcucugcuguaagcaaaggauaccucggagcauuaagaacuggaugguacaccucaguaauaacuauagaacuaucaaacauaaaagaaauaaaauguaauggcacagacgcaaaagugaaauuaaucaaacaagaacucgauaaauacaaaaaugccguaaccgaucuccaacuuuuaaugcaaagcacacccgcaacagguuccgggucagcaauagcaagcggaguugcaguaugcaaaguacuacacuuagaaggagaaguaaauaaaaucaaaucagccuuacuaucaacaaauaaagcaguuguaucacucucaggaugcggaguauccguacuaacauuuaaaguacuagaucuaaaaaacuacauagauaaacaacucuuaccaauacuaaauaaacaaucauguuccauacccaacauagaaaccguuaucgaauuucaacaaaaaaacaacagauuacuagaaaucacacgagaauuuucaguaaaugcuggagucacaacaccaguuaguacauacaugcucaccaauucagaacuacuaaguuuaauuaacgauaugccaauaacaaacgaccaaaaaaaacuaaugucaaauaacguacaaauaguaagacaacaaucauacucaaucaugugcauaauaaaagaagaaguacuagccuauguaguccaauuaccacucuacggcguaaucgacaccccaugcuggaaauuacacacaagcccauuaugcaccaccaacacaaaagaagguucaaacauuugcuuaaccagaaccgaucgaggaugguacugcgauaacgcaggaucugucuccuuuuucccacaagccgaaacaugcaaaguucaaucaaaccgaguuuucugugacacuaugaacucacucacacuuccaagcgaaguaaaccuaugcaacguagauauauuuaacccuaaauacgacugcaaaauaaugacaagcaaaacagacguuaguucaucaguaauuacaagucuaggcgcaauagugucaugcuacggaaaaacaaaaugcaccgcauccaauaaaugccgaggaaucauuaaaacauucucaaacggaugcgacuacgucagcaauaaaggaguagacacuguuucuguaggaaacacccuauacuauguaaacaaacaagaaggucaaucacuauacguaaagggagaaccaauuauaaauuuuuacgaccccuuaguauuuccaagugaugaauuugacgcaucuauaagucaaguuaacgaaaaaauuaaccaaucacuugcauuuauaagaaaaucagacgaacuacuccauaauguaaacgcagguaaaucaacaacaaacaucaugaucacaaccauaauaauaguaauaauuguaauauuacuaucacuaauagcaguaggauuacuacucuacugcaaagcuagaucuaccccggucacacucucaaaagaccaauuaucuggaauaaacaauauagcauucagcaacuaaggacuaguggaagcauuuuccuggcugauuaaaagaaauuacucagcuauggucaucuguuccuguuagaaggcuaugcagcauauuauauacuaugcgcauguuaugaaaugcauaauaaaaaauuuuaaaaaaucuaaaagaucuaaaaaaaaaaaaaaaaaaaaaaaaaaaaaaaaaaaaaaaaaaaaaaaaaaaaaaaaaaaaaaaaugcaucccccccccccccccccccccccccccccccaaaggcucuuuucagagccaccagaauu

SEQ ID NO: 7700 - RNA, 1963 nt, Artificial Sequence
  mRNA product Design d-4 comprising derived and/or modified sequence from HRSV(A2)__F_DSCav1_mut8 (opt11)
gggagagucccgcagucggcguccagcggcucugcuuguucgugugugugucguugcaggccuuauucaagcuuaccauggaacuccucauccuuaaagccaacgccauaaccaccauccucaccgccgucaccuucugcuucgcuucuggccaaaacauaaccgaagaguucuaccaauccacgugcucugccgugucaaaaggcuaccucggagcccuccgcacagggugguacacuuccgucaucaccaucgaacucucuaacaucaaagaaaucaagugcaacggcacagacgcgaaagucaagcucaucaaacaagaacuagacaaauacaaaaacgccguaacagaccuccaacuccuaaugcaguccacaccagccacaggcuccggcagcgccaucgccuccggcgucgcugucugcaaaguccuacaccucgaaggcgaagucaacaaaaucaagucagcccuccuuagcaccaacaaagcagucgucucuuuaagcgggugcggagucucuguccuaaccuuuaaaguacucgaccucaaaaacuacaucgacaaacaacuacuaccaauacuaaacaaacagagcugcuccauucccaacaucgaaaccguuaucgaguuccaacaaaagaacaaccgccuccucgaaaucacccgcgaguucuccgucaacgcaggcgucaccaccccagucuccaccuauaugcuaaccaacagcgaacuccucagccucaucaaugacaugccaaucaccaacgaccaaaagaaacucauguccaacaacguacagauaguccgccagcaguccuacagcaucaugugcaucaucaaagaagaagugcucgccuacgugguacaacucccucucuacggagucauugauacacccugcuggaaacuccacacaagcccccucugcacuacaaacaccaaagaaggcucuaacauaugccucacccgcacagaccgugguugguacugcgacaacgccggcuccguauccuucuuuccacaagcugaaaccugcaaaguucaaucaaaccgagucuucugcgacaccaugaacucccucacauugcccagcgaagucaaccucugcaacgucgacaucuucaaccccaaguacgacugcaaaaucaugaccuccaaaaccgacgucagcuccagcgugaucacaagccuaggcgcgaucgucagcugcuacggcaaaaccaaaugcacagccuccaacaaaugccgcggaaucauaaaaacauucaguaacggcugcgacuacguguccaauaaaggagucgacaccguauccgucggaaacacccucuacuacgucaacaaacaagaaggacaaucccucuaugucaaaggcgaacccauuaucaacuucuacgacccccuaguuuuccccuccgacgaguucgacgcaagcauuucccaagucaacgaaaagaucaaucaaucccucgccuucauacgcaaaagcgacgaacuacuacacaacguaaacgccggcaaaagcaccaccaacaucaugaucacaacaaucaucaucgucaucaucgucauccuacucucacucaucgccguuggccuacuacucuacugcaaagcccgcuccacacccgucacccucucaaaagaccaacucuccggcaucaacaacaucgcauucagcaacugaggacuaguggaagcauuuuccuggcugauuaaaagaaauuacucagcuauggucaucuguuccuguuagaaggcuaugcagcauauuauauacuaugcgcauguuaugaaaugcauaauaaaaaauuuuaaaaaaucuaaaagaucuaaaaaaaaaaaaaaaaaaaaaaaaaaaaaaaaaaaaaaaaaaaaaaaaaaaaaaaaaaaaaaaaugcaucccccccccccccccccccccccccccccccaaaggcucuuuucagagccaccagaauu

SEQ ID NO: 7701 - RNA, 2060 nt, Artificial Sequence
  mRNA product Design d-5 comprising derived and/or modified sequence from HRSV(A2)__F_DSCav1_mut8 (opt1)
gggagagggcgcuuggcuugcaaggacccugagcugcggcauugaagcacacccaacccaacucgacugaagucagccucacugaaccggaucugagaaucuucucucucugggcuugccagggcucuccgaaccuagcuagcauccucuucaauuccaacuagaaagcuuaccauggagcugcucauccugaaggccaacgccaucaccaccauccugacggcggugaccuucugcuucgccagcggccagaacaucaccgaggaguucuaccaguccacgugcagcgccgucuccaagggguaccucggcgcccugcggaccggcugguacaccuccgugaucaccaucgagcugagcaacaucaaggagaucaagugcaacgggaccgacgccaaggugaagcucaucaagcaggagcuggacaaguacaagaacgcggucacggaccugcagcuccugaugcaguccaccccggcaaccggcuccggcuccgccaucgcgagcggcgucgccgugugcaaggugcugcaccucgagggggaggucaacaagaucaagagcgcccugcuguccaccaacaaggccguggugagccucuccggcugcggcgucagcgugcugaccuucaaggugcuggaccucaagaacuacaucgacaagcagcugcugcccauccugaacaagcagagcugcuccauccccaacaucgagacggugaucgaguuccagcagaagaacaaccggcuccuggagaucacccgcgaguucagcgugaacgccggggucaccacccccguguccacguacaugcugaccaacagcgagcuccugucccugaucaacgacaugccgaucaccaacgaccagaagaagcucaugagcaacaacgugcagaucguccggcagcaguccuacagcaucaugugcaucaucaaggaggaggugcuggcguacgugguccagcugccccucuacggcgugaucgacacccccugcuggaagcugcacacgagcccccugugcaccaccaacaccaaggagggguccaacaucugccucacgcgcaccgaccggggcugguacugcgacaacgccggcagcgucuccuucuucccgcaggccgagaccugcaaggugcagagcaaccgcguguucugcgacaccaugaacucccugacgcugcccagcgagguaaaccucugcaacgucgacaucuucaaccccaaguacgacugcaagaucaugaccuccaagaccgacgugagcuccagcgugaucaccucccugggggccaucgucagcugcuacggcaagacgaagugcaccgccagcaacaagugccgggggaucaucaagaccuucuccaacggcugcgacuacgugagcaacaagggcguggacaccguguccgucgggaacacccuguacuacgugaacaagcaggagggccagagccucuacgugaagggggagcccaucaucaacuucuacgacccgcuggucuuccccuccgacgaguucgacgcgagcaucucccaggugaacgagaagaucaaccagagccuggccuucauccgcaaguccgacgagcugcuccacaacgugaacgccggcaagagcacgaccaacaucaugaucaccaccaucaucaucgucaucaucgugauccugcugucccucaucgccguggggcugcugcucuacugcaaggcccggagcacgcccgucacccuguccaaggaccagcugagcggcaucaacaacaucgcguucuccaacugaggacuaguggaagcauuuuccuggcugauuaaaagaaauuacucagcuauggucaucuguuccuguuagaaggcuaugcagcauauuauauacuaugcgcauguuaugaaaugcauaauaaaaaauuuuaaaaaaucuaaaagaucuaaaaaaaaaaaaaaaaaaaaaaaaaaaaaaaaaaaaaaaaaaaaaaaaaaaaaaaaaaaaaaaaugcaucccccccccccccccccccccccccccccccaaaggcucuuuucagagccaccagaauu

SEQ ID NO: 7702 - RNA, 2060 nt, Artificial Sequence
  mRNA product Design d-5 comprising derived and/or modified sequence from HRSV(A2)__F_DSCav1_mut8 (opt1)
gggagagggcgcuuggcuugcaaggacccugagcugcggcauugaagcacacccaacccaacucgacugaagucagccucacugaaccggaucugagaaucuucucucucugggcuugccagggcucuccgaaccuagcuagcauccucuucaauuccaacuagaaagcuuaccauggagcugcucauccugaaggccaacgccaucaccaccauccugacggcggugaccuucugcuucgccagcggccagaacaucaccgaggaguucuaccaguccacgugcagcgccgucuccaagggguaccucggcgcccugcgcaccgggugguacaccagcgugaucaccaucgagcuguccaacaucaaggagaucaagugcaacggcaccgacgccaaggugaagcucaucaagcaggagcuggacaaguacaagaacgcggucacggaccugcagcuccugaugcagagcacccccgccaccggguccggcagcgccaucgccuccggcguggcggugugcaagguccugcaccucgagggggaggugaacaagaucaagagcgcccugcuguccaccaacaaggccguggucagccucuccggcugcggggugagcgugcugacguucaagguccuggaccucaagaacuacaucgacaagcagcugcugccgauccucaacaagcaguccugcagcauccccaacaucgagaccgugaucgaguuccagcagaagaacaaccggcugcuggagaucacccgcgaguucuccgugaacgccggcgucaccacgcccgugagcaccuacaugcucaccaacuccgagcugcugagccucaucaacgacaugcccaucaccaacgaccagaagaagcugaugagcaacaacgugcagaucguccggcagcaguccuacagcaucaugugcaucaucaaggaggaggugcuggccuacgugguccagcucccgcuguacggggugaucgacacgcccugcuggaagcugcacaccagcccccucugcaccaccaacacgaaggagggcuccaacaucugccugacccgcaccgaccggggcugguacugcgacaacgcgggguccgugagcuucuucccccaggccgagaccugcaagguccaguccaaccgcguguucugcgacacgaugaacagccugacccucccguccgaggucaaccugugcaacguggacaucuucaaccccaaguacgacugcaagaucaugaccagcaagaccgacguguccagcuccgucaucacgagccugggcgccaucguguccugcuacgggaagaccaagugcaccgccagcaacaagugccggggcaucaucaagaccuucuccaacggcugcgacuacgugagcaacaagggggucgacacgguguccgugggcaacacccucuacuacgucaacaagcaggaggggcagagccuguacgugaagggcgagcccaucaucaacuucuacgacccccugguguucccgagcgacgaguucgacgccuccaucagccaggucaacgagaagaucaaccagucccucgcguucauccgcaagagcgacgagcugcugcacaacgugaacgccgggaaguccaccaccaacaucaugaucaccacgaucaucaucgugaucaucgucauccuccugagccugaucgccgugggccuccugcuguacugcaaggcccgguccacccccgugacccugagcaaggaccagcucuccggcaucaacaacaucgccuucagcaacugaggacuaguggaagcauuuuccuggcugauuaaaagaaauuacucagcuauggucaucuguuccuguuagaaggcuaugcagcauauuauauacuaugcgcauguuaugaaaugcauaauaaaaaauuuuaaaaaaucuaaaagaucuaaaaaaaaaaaaaaaaaaaaaaaaaaaaaaaaaaaaaaaaaaaaaaaaaaaaaaaaaaaaaaaaugcaucccccccccccccccccccccccccccccccaaaggcucuuuucagagccaccagaauu

SEQ ID NO: 7703 - RNA, 2060 nt, Artificial Sequence
  mRNA product Design d-5 comprising derived and/or modified sequence from HRSV(A2)__F_DSCav1_mut8 (opt2)
gggagagggcgcuuggcuugcaaggacccugagcugcggcauugaagcacacccaacccaacucgacugaagucagccucacugaaccggaucugagaaucuucucucucugggcuugccagggcucuccgaaccuagcuagcauccucuucaauuccaacuagaaagcuuaccauggagcuccucauccucaaggccaacgccaucaccaccauccucaccgccgucaccuucugcuucgccuccggccagaacaucaccgaggaguucuaccaguccaccugcuccgccgucuccaagggcuaccucggcgcccuccgcaccggcugguacaccuccgucaucaccaucgagcucuccaacaucaaggagaucaagugcaacggcaccgacgccaaggucaagcucaucaagcaggagcucgacaaguacaagaacgccgucaccgaccuccagcuccucaugcaguccacccccgccaccggcuccggcuccgccaucgccuccggcgucgccgucugcaagguccuccaccucgagggcgaggucaacaagaucaaguccgcccuccucuccaccaacaaggccgucgucucccucuccggcugcggcgucuccguccucaccuucaagguccucgaccucaagaacuacaucgacaagcagcuccuccccauccucaacaagcaguccugcuccauccccaacaucgagaccgucaucgaguuccagcagaagaacaaccgccuccucgagaucacccgcgaguucuccgucaacgccggcgucaccacccccgucuccaccuacaugcucaccaacuccgagcuccucucccucaucaacgacaugcccaucaccaacgaccagaagaagcucauguccaacaacguccagaucguccgccagcaguccuacuccaucaugugcaucaucaaggaggagguccucgccuacgucguccagcucccccucuacggcgucaucgacacccccugcuggaagcuccacaccuccccccucugcaccaccaacaccaaggagggcuccaacaucugccucacccgcaccgaccgcggcugguacugcgacaacgccggcuccgucuccuucuucccccaggccgagaccugcaagguccaguccaaccgcgucuucugcgacaccaugaacucccucacccuccccuccgaggucaaccucugcaacgucgacaucuucaaccccaaguacgacugcaagaucaugaccuccaagaccgacgucuccuccuccgucaucaccucccucggcgccaucgucuccugcuacggcaagaccaagugcaccgccuccaacaagugccgcggcaucaucaagaccuucuccaacggcugcgacuacgucuccaacaagggcgucgacaccgucuccgucggcaacacccucuacuacgucaacaagcaggagggccagucccucuacgucaagggcgagcccaucaucaacuucuacgacccccucgucuuccccuccgacgaguucgacgccuccaucucccaggucaacgagaagaucaaccagucccucgccuucauccgcaaguccgacgagcuccuccacaacgucaacgccggcaaguccaccaccaacaucaugaucaccaccaucaucaucgucaucaucgucauccuccucucccucaucgccgucggccuccuccucuacugcaaggcccgcuccacccccgucacccucuccaaggaccagcucuccggcaucaacaacaucgccuucuccaacugaggacuaguggaagcauuuuccuggcugauuaaaagaaauuacucagcuauggucaucuguuccuguuagaaggcuaugcagcauauuauauacuaugcgcauguuaugaaaugcauaauaaaaaauuuuaaaaaaucuaaaagaucuaaaaaaaaaaaaaaaaaaaaaaaaaaaaaaaaaaaaaaaaaaaaaaaaaaaaaaaaaaaaaaaaugcaucccccccccccccccccccccccccccccccaaaggcucuuuucagagccaccagaauu

SEQ ID NO: 7704 - RNA, 2060 nt, Artificial Sequence
  mRNA product Design d-5 comprising derived and/or modified sequence from HRSV(A2)__F_DSCav1_mut8 (opt3)
gggagagggcgcuuggcuugcaaggacccugagcugcggcauugaagcacacccaacccaacucgacugaagucagccucacugaaccggaucugagaaucuucucucucugggcuugccagggcucuccgaaccuagcuagcauccucuucaauuccaacuagaaagcuuaccauggagcugcucauccuuaaggccaacgcuauuaccacaauacugacugcagugacguucugcuuugccagcggccagaauaucaccgaagaguucuaccaauccacauguucugcggucucaaaaggguauuugggagcuuuaagaacugguugguacaccaguguuauuacaaucgaacugagcaacauuaaggagaucaaaugcaauggcaccgacgccaaggugaaacuaauaaagcaggaacucgauaaguauaaaaacgcaguaacugaccugcagcuucugaugcaguccacacccgccaccgggucuggaucggcuaucgcaucaggcguggccgucuguaagguguugcaccucgagggugagguuaauaaaauuaagagcgcucugcugaguacgaacaaagccguggucucccucucugggugcggagugagcguauuaacuuuuaagguucuggaucuuaagaauuacaucgacaaacaauugcugccuauucuaaacaagcaguccuguucaaucccaaauauagaaaccgugauugaguuccagcagaaaaacaauaggcuccuggaaaucacacgggaguuuagugucaacgcgggcgugacuaccccggugagcacauauaugcuuaccaauucugagcuguugucccucauuaacgauaugcccaucacgaaugaccaaaagaaacugaugucaaacaacguccagaucguucgccagcagagcuacaguauuaugugcauaaucaaggaagagguguuagcauauguagugcaacugccucucuacggcgucauugauacuccauguuggaaacuucauacaucuccccugugcaccacuaauacaaaggaaggguccaacaucuguuugacccgaacggaccguggaugguacugcgauaaugccgguagcgugucguucuuuccucaggcugagaccuguaagguucagucuaacagaguguucugcgacacaaugaacucccuaacucugccaucagaagucaaucucugcaauguggauauauuuaaccccaaauaugacuguaagauuaugaccaguaaaacagauguaagcuccucuguuaucacuagccugggcgccaucgugucaugcuacgggaagaccaaauguacagcaaguaauaagugcaggggaauuaucaagaccuucuccaacggcugugacuaugucagcaauaaagguguggacacugucucuguggggaacacgcuuuacuauguuaauaagcaagagggacagucacuguacgugaaaggcgagccuauuauaaacuuuuaugauccauugguauucccgagugacgaauuugaugcuagcaucucccaggucaaugagaagauuaaccagucucucgccuucauccggaaaucggacgaacuguuacacaacgugaaugcgggcaagagcacaaccaacaucaugauuacuaccauaaucauuguuaucauugugauccugcuaucccucauagccgucgggcugcuuuuguacugcaaggcacgcucaacacccgugacccugaguaaagaucaacucucuggaaucaauaacauugcuuucagcaauugaggacuaguggaagcauuuuccuggcugauuaaaagaaauuacucagcuauggucaucuguuccuguuagaaggcuaugcagcauauuauauacuaugcgcauguuaugaaaugcauaauaaaaaauuuuaaaaaaucuaaaagaucuaaaaaaaaaaaaaaaaaaaaaaaaaaaaaaaaaaaaaaaaaaaaaaaaaaaaaaaaaaaaaaaaugcaucccccccccccccccccccccccccccccccaaaggcucuuuucagagccaccagaauu

SEQ ID NO: 7705 - RNA, 2060 nt, Artificial Sequence
  mRNA product Design d-5 comprising derived and/or modified sequence from HRSV(A2)__F_DSCav1_mut8 (opt4)
gggagagggcgcuuggcuugcaaggacccugagcugcggcauugaagcacacccaacccaacucgacugaagucagccucacugaaccggaucugagaaucuucucucucugggcuugccagggcucuccgaaccuagcuagcauccucuucaauuccaacuagaaagcuuaccauggagcugcugauccugaaggccaacgccaucaccaccauccugaccgccgugaccuucugcuucgccagcggccagaacaucaccgaggaguucuaccagagcaccugcagcgccgugagcaagggcuaccugggcgcccugagaaccggcugguacaccagcgugaucaccaucgagcugagcaacaucaaggagaucaagugcaacggcaccgacgccaaggugaagcugaucaagcaggagcuggacaaguacaagaacgccgugaccgaccugcagcugcugaugcagagcacccccgccaccggcagcggcagcgccaucgccagcggcguggccgugugcaaggugcugcaccuggagggcgaggugaacaagaucaagagcgcccugcugagcaccaacaaggccguggugagccugagcggcugcggcgugagcgugcugaccuucaaggugcuggaccugaagaacuacaucgacaagcagcugcugcccauccugaacaagcagagcugcagcauccccaacaucgagaccgugaucgaguuccagcagaagaacaacagacugcuggagaucaccagagaguucagcgugaacgccggcgugaccacccccgugagcaccuacaugcugaccaacagcgagcugcugagccugaucaacgacaugcccaucaccaacgaccagaagaagcugaugagcaacaacgugcagaucgugagacagcagagcuacagcaucaugugcaucaucaaggaggaggugcuggccuacguggugcagcugccccuguacggcgugaucgacacccccugcuggaagcugcacaccagcccccugugcaccaccaacaccaaggagggcagcaacaucugccugaccagaaccgacagaggcugguacugcgacaacgccggcagcgugagcuucuucccccaggccgagaccugcaaggugcagagcaacagaguguucugcgacaccaugaacagccugacccugcccagcgaggugaaccugugcaacguggacaucuucaaccccaaguacgacugcaagaucaugaccagcaagaccgacgugagcagcagcgugaucaccagccugggcgccaucgugagcugcuacggcaagaccaagugcaccgccagcaacaagugcagaggcaucaucaagaccuucagcaacggcugcgacuacgugagcaacaagggcguggacaccgugagcgugggcaacacccuguacuacgugaacaagcaggagggccagagccuguacgugaagggcgagcccaucaucaacuucuacgacccccugguguuccccagcgacgaguucgacgccagcaucagccaggugaacgagaagaucaaccagagccuggccuucaucagaaagagcgacgagcugcugcacaacgugaacgccggcaagagcaccaccaacaucaugaucaccaccaucaucaucgugaucaucgugauccugcugagccugaucgccgugggccugcugcuguacugcaaggccagaagcacccccgugacccugagcaaggaccagcugagcggcaucaacaacaucgccuucagcaacugaggacuaguggaagcauuuuccuggcugauuaaaagaaauuacucagcuauggucaucuguuccuguuagaaggcuaugcagcauauuauauacuaugcgcauguuaugaaaugcauaauaaaaaauuuuaaaaaaucuaaaagaucuaaaaaaaaaaaaaaaaaaaaaaaaaaaaaaaaaaaaaaaaaaaaaaaaaaaaaaaaaaaaaaaaugcaucccccccccccccccccccccccccccccccaaaggcucuuuucagagccaccagaauu

SEQ ID NO: 7706 - RNA, 2060 nt, Artificial Sequence
  mRNA product Design d-5 comprising derived and/or modified sequence from HRSV(A2)__F_DSCav1_mut8 (opt5)
gggagagggcgcuuggcuugcaaggacccugagcugcggcauugaagcacacccaacccaacucgacugaagucagccucacugaaccggaucugagaaucuucucucucugggcuugccagggcucuccgaaccuagcuagcauccucuucaauuccaacuagaaagcuuaccauggagcugcucauccugaaggccaacgcuauuaccacaauccuuacggccgugaccuucugcuuugcgagcggccagaauauuacagaagaguucuaccaauccaccuguucugcugucagcaaaggguaucugggagcccucagaacaggcugguacaccuccguuaucacaauugaacugucuaacaucaaggagaucaaaugcaaugggaccgacgccaaggugaaacuuauuaagcaggaacuggauaaguauaaaaacgcugugacggaccuccagcugcugaugcagagcacccccgccacaggauccggcucugcuaucgccagcggggucgcgguguguaagguucuccaccuggagggagaggugaauaaaauuaaguccgcccuucugagcaccaacaaagcugucgugucucucuccggcugcggcguuagcgugcugacauuuaagguccuugaucugaagaauuacaucgacaaacaacuccugccuauucugaacaagcagucuuguuccaucccgaauauugaaaccgugaucgaguuccagcagaaaaacaaucggcuccuggaaaucacgcgcgaguuuagcgugaacgccggggucacaacccccguuucuacauauaugcuuaccaauuccgagcugcucagccugauuaacgauaugccuaucaccaaugaccaaaagaaacuuauguccaacaacgugcagauugugagacagcagucuuacagcaucaugugcauuaucaaggaagagguccuggcuuaugugguucaacucccccuguacggagugaucgauacaccuuguuggaaacugcauacgagcccccucugcaccacaaauaccaaggaaggcagcaacauuugucugacacggaccgaccgcgggugguacugcgauaaugccggaucugucuccuucuuuccucaggcggagacguguaaggugcagagcaacagaguuuucugcgacacaaugaacucucuuacccugccgagcgaagugaaucucugcaaugucgauaucuuuaaccccaaauaugacuguaagauuaugaccuccaaaacagaugugucuagcuccgucaucaccagccugggcgccauugugucuugcuacgggaagacaaaauguacggcuuccaauaagugccggggaaucaucaagaccuucagcaacggcugugacuauguuucuaauaaaggcguggacacagucuccguggggaacacccuuuacuauguuaauaagcaagagggacagagccuguacgugaaaggcgagccuauuaucaacuuuuaugauccccucgucuucccuuccgacgaauuugaugccucuauuagccaggugaaugagaagaucaaccagucccuggcuuucauucgcaaaucugacgaacugcuccacaacgugaaugccgggaaguccacaaccaacaucaugauuacgaccaucaucauuguuaucauugucauccugcuuucccugauugccgugggacuccugcuguacugcaaggcuagaagcacacccgugacccuuucuaaagaucaacucuccggcaucaauaacaucgcguucagcaauugaggacuaguggaagcauuuuccuggcugauuaaaagaaauuacucagcuauggucaucuguuccuguuagaaggcuaugcagcauauuauauacuaugcgcauguuaugaaaugcauaauaaaaaauuuuaaaaaaucuaaaagaucuaaaaaaaaaaaaaaaaaaaaaaaaaaaaaaaaaaaaaaaaaaaaaaaaaaaaaaaaaaaaaaaaugcaucccccccccccccccccccccccccccccccaaaggcucuuuucagagccaccagaauu

SEQ ID NO: 7707 - RNA, 2060 nt, Artificial Sequence
  mRNA product Design d-5 comprising derived and/or modified sequence from HRSV(A2)__F_DSCav1_mut8 (opt6)
gggagagggcgcuuggcuugcaaggacccugagcugcggcauugaagcacacccaacccaacucgacugaagucagccucacugaaccggaucugagaaucuucucucucugggcuugccagggcucuccgaaccuagcuagcauccucuucaauuccaacuagaaagcuuaccauggaacuauuaauauuaaaagcaaacgcaaucacaacuauacuaacagcaguaacauucugcuuugccucaggucaaaacauaacagaggaauuuuaccaauccacaugcucugcuguaagcaaaggauaccucggagcauuaagaacuggaugguacaccucaguaauaacuauagaacuaucaaacauaaaagaaauaaaauguaauggcacagacgcaaaagugaaauuaaucaaacaagaacucgauaaauacaaaaaugccguaaccgaucuccaacuuuuaaugcaaagcacacccgcaacagguuccgggucagcaauagcaagcggaguugcaguaugcaaaguacuacacuuagaaggagaaguaaauaaaaucaaaucagccuuacuaucaacaaauaaagcaguuguaucacucucaggaugcggaguauccguacuaacauuuaaaguacuagaucuaaaaaacuacauagauaaacaacucuuaccaauacuaaauaaacaaucauguuccauacccaacauagaaaccguuaucgaauuucaacaaaaaaacaacagauuacuagaaaucacacgagaauuuucaguaaaugcuggagucacaacaccaguuaguacauacaugcucaccaauucagaacuacuaaguuuaauuaacgauaugccaauaacaaacgaccaaaaaaaacuaaugucaaauaacguacaaauaguaagacaacaaucauacucaaucaugugcauaauaaaagaagaaguacuagccuauguaguccaauuaccacucuacggcguaaucgacaccccaugcuggaaauuacacacaagcccauuaugcaccaccaacacaaaagaagguucaaacauuugcuuaaccagaaccgaucgaggaugguacugcgauaacgcaggaucugucuccuuuuucccacaagccgaaacaugcaaaguucaaucaaaccgaguuuucugugacacuaugaacucacucacacuuccaagcgaaguaaaccuaugcaacguagauauauuuaacccuaaauacgacugcaaaauaaugacaagcaaaacagacguuaguucaucaguaauuacaagucuaggcgcaauagugucaugcuacggaaaaacaaaaugcaccgcauccaauaaaugccgaggaaucauuaaaacauucucaaacggaugcgacuacgucagcaauaaaggaguagacacuguuucuguaggaaacacccuauacuauguaaacaaacaagaaggucaaucacuauacguaaagggagaaccaauuauaaauuuuuacgaccccuuaguauuuccaagugaugaauuugacgcaucuauaagucaaguuaacgaaaaaauuaaccaaucacuugcauuuauaagaaaaucagacgaacuacuccauaauguaaacgcagguaaaucaacaacaaacaucaugaucacaaccauaauaauaguaauaauuguaauauuacuaucacuaauagcaguaggauuacuacucuacugcaaagcuagaucuaccccggucacacucucaaaagaccaauuaucuggaauaaacaauauagcauucagcaacuaaggacuaguggaagcauuuuccuggcugauuaaaagaaauuacucagcuauggucaucuguuccuguuagaaggcuaugcagcauauuauauacuaugcgcauguuaugaaaugcauaauaaaaaauuuuaaaaaaucuaaaagaucuaaaaaaaaaaaaaaaaaaaaaaaaaaaaaaaaaaaaaaaaaaaaaaaaaaaaaaaaaaaaaaaaugcaucccccccccccccccccccccccccccccccaaaggcucuuuucagagccaccagaauu

SEQ ID NO: 7708 - RNA, 2060 nt, Artificial Sequence
  mRNA product Design d-5 comprising derived and/or modified sequence from HRSV(A2)__F_DSCav1_mut8 (opt11)
gggagagggcgcuuggcuugcaaggacccugagcugcggcauugaagcacacccaacccaacucgacugaagucagccucacugaaccggaucugagaaucuucucucucugggcuugccagggcucuccgaaccuagcuagcauccucuucaauuccaacuagaaagcuuaccauggaacuccucauccuuaaagccaacgccauaaccaccauccucaccgccgucaccuucugcuucgcuucuggccaaaacauaaccgaagaguucuaccaauccacgugcucugccgugucaaaaggcuaccucggagcccuccgcacagggugguacacuuccgucaucaccaucgaacucucuaacaucaaagaaaucaagugcaacggcacagacgcgaaagucaagcucaucaaacaagaacuagacaaauacaaaaacgccguaacagaccuccaacuccuaaugcaguccacaccagccacaggcuccggcagcgccaucgccuccggcgucgcugucugcaaaguccuacaccucgaaggcgaagucaacaaaaucaagucagcccuccuuagcaccaacaaagcagucgucucuuuaagcgggugcggagucucuguccuaaccuuuaaaguacucgaccucaaaaacuacaucgacaaacaacuacuaccaauacuaaacaaacagagcugcuccauucccaacaucgaaaccguuaucgaguuccaacaaaagaacaaccgccuccucgaaaucacccgcgaguucuccgucaacgcaggcgucaccaccccagucuccaccuauaugcuaaccaacagcgaacuccucagccucaucaaugacaugccaaucaccaacgaccaaaagaaacucauguccaacaacguacagauaguccgccagcaguccuacagcaucaugugcaucaucaaagaagaagugcucgccuacgugguacaacucccucucuacggagucauugauacacccugcuggaaacuccacacaagcccccucugcacuacaaacaccaaagaaggcucuaacauaugccucacccgcacagaccgugguugguacugcgacaacgccggcuccguauccuucuuuccacaagcugaaaccugcaaaguucaaucaaaccgagucuucugcgacaccaugaacucccucacauugcccagcgaagucaaccucugcaacgucgacaucuucaaccccaaguacgacugcaaaaucaugaccuccaaaaccgacgucagcuccagcgugaucacaagccuaggcgcgaucgucagcugcuacggcaaaaccaaaugcacagccuccaacaaaugccgcggaaucauaaaaacauucaguaacggcugcgacuacguguccaauaaaggagucgacaccguauccgucggaaacacccucuacuacgucaacaaacaagaaggacaaucccucuaugucaaaggcgaacccauuaucaacuucuacgacccccuaguuuuccccuccgacgaguucgacgcaagcauuucccaagucaacgaaaagaucaaucaaucccucgccuucauacgcaaaagcgacgaacuacuacacaacguaaacgccggcaaaagcaccaccaacaucaugaucacaacaaucaucaucgucaucaucgucauccuacucucacucaucgccguuggccuacuacucuacugcaaagcccgcuccacacccgucacccucucaaaagaccaacucuccggcaucaacaacaucgcauucagcaacugaggacuaguggaagcauuuuccuggcugauuaaaagaaauuacucagcuauggucaucuguuccuguuagaaggcuaugcagcauauuauauacuaugcgcauguuaugaaaugcauaauaaaaaauuuuaaaaaaucuaaaagaucuaaaaaaaaaaaaaaaaaaaaaaaaaaaaaaaaaaaaaaaaaaaaaaaaaaaaaaaaaaaaaaaaugcaucccccccccccccccccccccccccccccccaaaggcucuuuucagagccaccagaauu

SEQ ID NO: 7709 - RNA, 1940 nt, Artificial Sequence
  mRNA product Design e-1 comprising derived and/or modified sequence from HRSV(A2)__F_DSCav1_mut8 (opt1)
gggagaauauaagcguuggcggagcgucgguuguagcacucugcgcgcccgcucuucugcugcuguuugucuacuuccuccugcuuccccgccgccgccgccgccaucaagcuuaccauggagcugcucauccugaaggccaacgccaucaccaccauccugacggcggugaccuucugcuucgccagcggccagaacaucaccgaggaguucuaccaguccacgugcagcgccgucuccaagggguaccucggcgcccugcggaccggcugguacaccuccgugaucaccaucgagcugagcaacaucaaggagaucaagugcaacgggaccgacgccaaggugaagcucaucaagcaggagcuggacaaguacaagaacgcggucacggaccugcagcuccugaugcaguccaccccggcaaccggcuccggcuccgccaucgcgagcggcgucgccgugugcaaggugcugcaccucgagggggaggucaacaagaucaagagcgcccugcuguccaccaacaaggccguggugagccucuccggcugcggcgucagcgugcugaccuucaaggugcuggaccucaagaacuacaucgacaagcagcugcugcccauccugaacaagcagagcugcuccauccccaacaucgagacggugaucgaguuccagcagaagaacaaccggcuccuggagaucacccgcgaguucagcgugaacgccggggucaccacccccguguccacguacaugcugaccaacagcgagcuccugucccugaucaacgacaugccgaucaccaacgaccagaagaagcucaugagcaacaacgugcagaucguccggcagcaguccuacagcaucaugugcaucaucaaggaggaggugcuggcguacgugguccagcugccccucuacggcgugaucgacacccccugcuggaagcugcacacgagcccccugugcaccaccaacaccaaggagggguccaacaucugccucacgcgcaccgaccggggcugguacugcgacaacgccggcagcgucuccuucuucccgcaggccgagaccugcaaggugcagagcaaccgcguguucugcgacaccaugaacucccugacgcugcccagcgagguaaaccucugcaacgucgacaucuucaaccccaaguacgacugcaagaucaugaccuccaagaccgacgugagcuccagcgugaucaccucccugggggccaucgucagcugcuacggcaagacgaagugcaccgccagcaacaagugccgggggaucaucaagaccuucuccaacggcugcgacuacgugagcaacaagggcguggacaccguguccgucgggaacacccuguacuacgugaacaagcaggagggccagagccucuacgugaagggggagcccaucaucaacuucuacgacccgcuggucuuccccuccgacgaguucgacgcgagcaucucccaggugaacgagaagaucaaccagagccuggccuucauccgcaaguccgacgagcugcuccacaacgugaacgccggcaagagcacgaccaacaucaugaucaccaccaucaucaucgucaucaucgugauccugcugucccucaucgccguggggcugcugcucuacugcaaggcccggagcacgcccgucacccuguccaaggaccagcugagcggcaucaacaacaucgcguucuccaacugaggacuaguguccaccugucccuccugggcugcuggauugucucguuuuccugccaaauaaacaggaucagcgcuuuacagaucuaaaaaaaaaaaaaaaaaaaaaaaaaaaaaaaaaaaaaaaaaaaaaaaaaaaaaaaaaaaaaaaaugcaucccccccccccccccccccccccccccccccaaaggcucuuuucagagccaccagaauu

SEQ ID NO: 7710 - RNA, 1940 nt, Artificial Sequence
  mRNA product Design e-1 comprising derived and/or modified sequence from HRSV(A2)__F_DSCav1_mut8 (opt1)
gggagaauauaagcguuggcggagcgucgguuguagcacucugcgcgcccgcucuucugcugcuguuugucuacuuccuccugcuuccccgccgccgccgccgccaucaagcuuaccauggagcugcucauccugaaggccaacgccaucaccaccauccugacggcggugaccuucugcuucgccagcggccagaacaucaccgaggaguucuaccaguccacgugcagcgccgucuccaagggguaccucggcgcccugcgcaccgggugguacaccagcgugaucaccaucgagcuguccaacaucaaggagaucaagugcaacggcaccgacgccaaggugaagcucaucaagcaggagcuggacaaguacaagaacgcggucacggaccugcagcuccugaugcagagcacccccgccaccggguccggcagcgccaucgccuccggcguggcggugugcaagguccugcaccucgagggggaggugaacaagaucaagagcgcccugcuguccaccaacaaggccguggucagccucuccggcugcggggugagcgugcugacguucaagguccuggaccucaagaacuacaucgacaagcagcugcugccgauccucaacaagcaguccugcagcauccccaacaucgagaccgugaucgaguuccagcagaagaacaaccggcugcuggagaucacccgcgaguucuccgugaacgccggcgucaccacgcccgugagcaccuacaugcucaccaacuccgagcugcugagccucaucaacgacaugcccaucaccaacgaccagaagaagcugaugagcaacaacgugcagaucguccggcagcaguccuacagcaucaugugcaucaucaaggaggaggugcuggccuacgugguccagcucccgcuguacggggugaucgacacgcccugcuggaagcugcacaccagcccccucugcaccaccaacacgaaggagggcuccaacaucugccugacccgcaccgaccggggcugguacugcgacaacgcgggguccgugagcuucuucccccaggccgagaccugcaagguccaguccaaccgcguguucugcgacacgaugaacagccugacccucccguccgaggucaaccugugcaacguggacaucuucaaccccaaguacgacugcaagaucaugaccagcaagaccgacguguccagcuccgucaucacgagccugggcgccaucguguccugcuacgggaagaccaagugcaccgccagcaacaagugccggggcaucaucaagaccuucuccaacggcugcgacuacgugagcaacaagggggucgacacgguguccgugggcaacacccucuacuacgucaacaagcaggaggggcagagccuguacgugaagggcgagcccaucaucaacuucuacgacccccugguguucccgagcgacgaguucgacgccuccaucagccaggucaacgagaagaucaaccagucccucgcguucauccgcaagagcgacgagcugcugcacaacgugaacgccgggaaguccaccaccaacaucaugaucaccacgaucaucaucgugaucaucgucauccuccugagccugaucgccgugggccuccugcuguacugcaaggcccgguccacccccgugacccugagcaaggaccagcucuccggcaucaacaacaucgccuucagcaacugaggacuaguguccaccugucccuccugggcugcuggauugucucguuuuccugccaaauaaacaggaucagcgcuuuacagaucuaaaaaaaaaaaaaaaaaaaaaaaaaaaaaaaaaaaaaaaaaaaaaaaaaaaaaaaaaaaaaaaaugcaucccccccccccccccccccccccccccccccaaaggcucuuuucagagccaccagaauu

SEQ ID NO: 7711 - RNA, 1940 nt, Artificial Sequence
  mRNA product Design e-1 comprising derived and/or modified sequence from HRSV(A2)__F_DSCav1_mut8 (opt2)
gggagaauauaagcguuggcggagcgucgguuguagcacucugcgcgcccgcucuucugcugcuguuugucuacuuccuccugcuuccccgccgccgccgccgccaucaagcuuaccauggagcuccucauccucaaggccaacgccaucaccaccauccucaccgccgucaccuucugcuucgccuccggccagaacaucaccgaggaguucuaccaguccaccugcuccgccgucuccaagggcuaccucggcgcccuccgcaccggcugguacaccuccgucaucaccaucgagcucuccaacaucaaggagaucaagugcaacggcaccgacgccaaggucaagcucaucaagcaggagcucgacaaguacaagaacgccgucaccgaccuccagcuccucaugcaguccacccccgccaccggcuccggcuccgccaucgccuccggcgucgccgucugcaagguccuccaccucgagggcgaggucaacaagaucaaguccgcccuccucuccaccaacaaggccgucgucucccucuccggcugcggcgucuccguccucaccuucaagguccucgaccucaagaacuacaucgacaagcagcuccuccccauccucaacaagcaguccugcuccauccccaacaucgagaccgucaucgaguuccagcagaagaacaaccgccuccucgagaucacccgcgaguucuccgucaacgccggcgucaccacccccgucuccaccuacaugcucaccaacuccgagcuccucucccucaucaacgacaugcccaucaccaacgaccagaagaagcucauguccaacaacguccagaucguccgccagcaguccuacuccaucaugugcaucaucaaggaggagguccucgccuacgucguccagcucccccucuacggcgucaucgacacccccugcuggaagcuccacaccuccccccucugcaccaccaacaccaaggagggcuccaacaucugccucacccgcaccgaccgcggcugguacugcgacaacgccggcuccgucuccuucuucccccaggccgagaccugcaagguccaguccaaccgcgucuucugcgacaccaugaacucccucacccuccccuccgaggucaaccucugcaacgucgacaucuucaaccccaaguacgacugcaagaucaugaccuccaagaccgacgucuccuccuccgucaucaccucccucggcgccaucgucuccugcuacggcaagaccaagugcaccgccuccaacaagugccgcggcaucaucaagaccuucuccaacggcugcgacuacgucuccaacaagggcgucgacaccgucuccgucggcaacacccucuacuacgucaacaagcaggagggccagucccucuacgucaagggcgagcccaucaucaacuucuacgacccccucgucuuccccuccgacgaguucgacgccuccaucucccaggucaacgagaagaucaaccagucccucgccuucauccgcaaguccgacgagcuccuccacaacgucaacgccggcaaguccaccaccaacaucaugaucaccaccaucaucaucgucaucaucgucauccuccucucccucaucgccgucggccuccuccucuacugcaaggcccgcuccacccccgucacccucuccaaggaccagcucuccggcaucaacaacaucgccuucuccaacugaggacuaguguccaccugucccuccugggcugcuggauugucucguuuuccugccaaauaaacaggaucagcgcuuuacagaucuaaaaaaaaaaaaaaaaaaaaaaaaaaaaaaaaaaaaaaaaaaaaaaaaaaaaaaaaaaaaaaaaugcaucccccccccccccccccccccccccccccccaaaggcucuuuucagagccaccagaauu

SEQ ID NO: 7712 - RNA, 1940 nt, Artificial Sequence
  mRNA product Design e-1 comprising derived and/or modified sequence from HRSV(A2)__F_DSCav1_mut8 (opt3)
gggagaauauaagcguuggcggagcgucgguuguagcacucugcgcgcccgcucuucugcugcuguuugucuacuuccuccugcuuccccgccgccgccgccgccaucaagcuuaccauggagcugcucauccuuaaggccaacgcuauuaccacaauacugacugcagugacguucugcuuugccagcggccagaauaucaccgaagaguucuaccaauccacauguucugcggucucaaaaggguauuugggagcuuuaagaacugguugguacaccaguguuauuacaaucgaacugagcaacauuaaggagaucaaaugcaauggcaccgacgccaaggugaaacuaauaaagcaggaacucgauaaguauaaaaacgcaguaacugaccugcagcuucugaugcaguccacacccgccaccgggucuggaucggcuaucgcaucaggcguggccgucuguaagguguugcaccucgagggugagguuaauaaaauuaagagcgcucugcugaguacgaacaaagccguggucucccucucugggugcggagugagcguauuaacuuuuaagguucuggaucuuaagaauuacaucgacaaacaauugcugccuauucuaaacaagcaguccuguucaaucccaaauauagaaaccgugauugaguuccagcagaaaaacaauaggcuccuggaaaucacacgggaguuuagugucaacgcgggcgugacuaccccggugagcacauauaugcuuaccaauucugagcuguugucccucauuaacgauaugcccaucacgaaugaccaaaagaaacugaugucaaacaacguccagaucguucgccagcagagcuacaguauuaugugcauaaucaaggaagagguguuagcauauguagugcaacugccucucuacggcgucauugauacuccauguuggaaacuucauacaucuccccugugcaccacuaauacaaaggaaggguccaacaucuguuugacccgaacggaccguggaugguacugcgauaaugccgguagcgugucguucuuuccucaggcugagaccuguaagguucagucuaacagaguguucugcgacacaaugaacucccuaacucugccaucagaagucaaucucugcaauguggauauauuuaaccccaaauaugacuguaagauuaugaccaguaaaacagauguaagcuccucuguuaucacuagccugggcgccaucgugucaugcuacgggaagaccaaauguacagcaaguaauaagugcaggggaauuaucaagaccuucuccaacggcugugacuaugucagcaauaaagguguggacacugucucuguggggaacacgcuuuacuauguuaauaagcaagagggacagucacuguacgugaaaggcgagccuauuauaaacuuuuaugauccauugguauucccgagugacgaauuugaugcuagcaucucccaggucaaugagaagauuaaccagucucucgccuucauccggaaaucggacgaacuguuacacaacgugaaugcgggcaagagcacaaccaacaucaugauuacuaccauaaucauuguuaucauugugauccugcuaucccucauagccgucgggcugcuuuuguacugcaaggcacgcucaacacccgugacccugaguaaagaucaacucucuggaaucaauaacauugcuuucagcaauugaggacuaguguccaccugucccuccugggcugcuggauugucucguuuuccugccaaauaaacaggaucagcgcuuuacagaucuaaaaaaaaaaaaaaaaaaaaaaaaaaaaaaaaaaaaaaaaaaaaaaaaaaaaaaaaaaaaaaaaugcaucccccccccccccccccccccccccccccccaaaggcucuuuucagagccaccagaauu

SEQ ID NO: 7713 - RNA, 1940 nt, Artificial Sequence
  mRNA product Design e-1 comprising derived and/or modified sequence from HRSV(A2)__F_DSCav1_mut8 (opt4)
gggagaauauaagcguuggcggagcgucgguuguagcacucugcgcgcccgcucuucugcugcuguuugucuacuuccuccugcuuccccgccgccgccgccgccaucaagcuuaccauggagcugcugauccugaaggccaacgccaucaccaccauccugaccgccgugaccuucugcuucgccagcggccagaacaucaccgaggaguucuaccagagcaccugcagcgccgugagcaagggcuaccugggcgcccugagaaccggcugguacaccagcgugaucaccaucgagcugagcaacaucaaggagaucaagugcaacggcaccgacgccaaggugaagcugaucaagcaggagcuggacaaguacaagaacgccgugaccgaccugcagcugcugaugcagagcacccccgccaccggcagcggcagcgccaucgccagcggcguggccgugugcaaggugcugcaccuggagggcgaggugaacaagaucaagagcgcccugcugagcaccaacaaggccguggugagccugagcggcugcggcgugagcgugcugaccuucaaggugcuggaccugaagaacuacaucgacaagcagcugcugcccauccugaacaagcagagcugcagcauccccaacaucgagaccgugaucgaguuccagcagaagaacaacagacugcuggagaucaccagagaguucagcgugaacgccggcgugaccacccccgugagcaccuacaugcugaccaacagcgagcugcugagccugaucaacgacaugcccaucaccaacgaccagaagaagcugaugagcaacaacgugcagaucgugagacagcagagcuacagcaucaugugcaucaucaaggaggaggugcuggccuacguggugcagcugccccuguacggcgugaucgacacccccugcuggaagcugcacaccagcccccugugcaccaccaacaccaaggagggcagcaacaucugccugaccagaaccgacagaggcugguacugcgacaacgccggcagcgugagcuucuucccccaggccgagaccugcaaggugcagagcaacagaguguucugcgacaccaugaacagccugacccugcccagcgaggugaaccugugcaacguggacaucuucaaccccaaguacgacugcaagaucaugaccagcaagaccgacgugagcagcagcgugaucaccagccugggcgccaucgugagcugcuacggcaagaccaagugcaccgccagcaacaagugcagaggcaucaucaagaccuucagcaacggcugcgacuacgugagcaacaagggcguggacaccgugagcgugggcaacacccuguacuacgugaacaagcaggagggccagagccuguacgugaagggcgagcccaucaucaacuucuacgacccccugguguuccccagcgacgaguucgacgccagcaucagccaggugaacgagaagaucaaccagagccuggccuucaucagaaagagcgacgagcugcugcacaacgugaacgccggcaagagcaccaccaacaucaugaucaccaccaucaucaucgugaucaucgugauccugcugagccugaucgccgugggccugcugcuguacugcaaggccagaagcacccccgugacccugagcaaggaccagcugagcggcaucaacaacaucgccuucagcaacugaggacuaguguccaccugucccuccugggcugcuggauugucucguuuuccugccaaauaaacaggaucagcgcuuuacagaucuaaaaaaaaaaaaaaaaaaaaaaaaaaaaaaaaaaaaaaaaaaaaaaaaaaaaaaaaaaaaaaaaugcaucccccccccccccccccccccccccccccccaaaggcucuuuucagagccaccagaauu

SEQ ID NO: 7714 - RNA, 1940 nt, Artificial Sequence
  mRNA product Design e-1 comprising derived and/or modified sequence from HRSV(A2)__F_DSCav1_mut8 (opt5)
gggagaauauaagcguuggcggagcgucgguuguagcacucugcgcgcccgcucuucugcugcuguuugucuacuuccuccugcuuccccgccgccgccgccgccaucaagcuuaccauggagcugcucauccugaaggccaacgcuauuaccacaauccuuacggccgugaccuucugcuuugcgagcggccagaauauuacagaagaguucuaccaauccaccuguucugcugucagcaaaggguaucugggagcccucagaacaggcugguacaccuccguuaucacaauugaacugucuaacaucaaggagaucaaaugcaaugggaccgacgccaaggugaaacuuauuaagcaggaacuggauaaguauaaaaacgcugugacggaccuccagcugcugaugcagagcacccccgccacaggauccggcucugcuaucgccagcggggucgcgguguguaagguucuccaccuggagggagaggugaauaaaauuaaguccgcccuucugagcaccaacaaagcugucgugucucucuccggcugcggcguuagcgugcugacauuuaagguccuugaucugaagaauuacaucgacaaacaacuccugccuauucugaacaagcagucuuguuccaucccgaauauugaaaccgugaucgaguuccagcagaaaaacaaucggcuccuggaaaucacgcgcgaguuuagcgugaacgccggggucacaacccccguuucuacauauaugcuuaccaauuccgagcugcucagccugauuaacgauaugccuaucaccaaugaccaaaagaaacuuauguccaacaacgugcagauugugagacagcagucuuacagcaucaugugcauuaucaaggaagagguccuggcuuaugugguucaacucccccuguacggagugaucgauacaccuuguuggaaacugcauacgagcccccucugcaccacaaauaccaaggaaggcagcaacauuugucugacacggaccgaccgcgggugguacugcgauaaugccggaucugucuccuucuuuccucaggcggagacguguaaggugcagagcaacagaguuuucugcgacacaaugaacucucuuacccugccgagcgaagugaaucucugcaaugucgauaucuuuaaccccaaauaugacuguaagauuaugaccuccaaaacagaugugucuagcuccgucaucaccagccugggcgccauugugucuugcuacgggaagacaaaauguacggcuuccaauaagugccggggaaucaucaagaccuucagcaacggcugugacuauguuucuaauaaaggcguggacacagucuccguggggaacacccuuuacuauguuaauaagcaagagggacagagccuguacgugaaaggcgagccuauuaucaacuuuuaugauccccucgucuucccuuccgacgaauuugaugccucuauuagccaggugaaugagaagaucaaccagucccuggcuuucauucgcaaaucugacgaacugcuccacaacgugaaugccgggaaguccacaaccaacaucaugauuacgaccaucaucauuguuaucauugucauccugcuuucccugauugccgugggacuccugcuguacugcaaggcuagaagcacacccgugacccuuucuaaagaucaacucuccggcaucaauaacaucgcguucagcaauugaggacuaguguccaccugucccuccugggcugcuggauugucucguuuuccugccaaauaaacaggaucagcgcuuuacagaucuaaaaaaaaaaaaaaaaaaaaaaaaaaaaaaaaaaaaaaaaaaaaaaaaaaaaaaaaaaaaaaaaugcaucccccccccccccccccccccccccccccccaaaggcucuuuucagagccaccagaauu

SEQ ID NO: 7715 - RNA, 1940 nt, Artificial Sequence
  mRNA product Design e-1 comprising derived and/or modified sequence from HRSV(A2)__F_DSCav1_mut8 (opt6)
gggagaauauaagcguuggcggagcgucgguuguagcacucugcgcgcccgcucuucugcugcuguuugucuacuuccuccugcuuccccgccgccgccgccgccaucaagcuuaccauggaacuauuaauauuaaaagcaaacgcaaucacaacuauacuaacagcaguaacauucugcuuugccucaggucaaaacauaacagaggaauuuuaccaauccacaugcucugcuguaagcaaaggauaccucggagcauuaagaacuggaugguacaccucaguaauaacuauagaacuaucaaacauaaaagaaauaaaauguaauggcacagacgcaaaagugaaauuaaucaaacaagaacucgauaaauacaaaaaugccguaaccgaucuccaacuuuuaaugcaaagcacacccgcaacagguuccgggucagcaauagcaagcggaguugcaguaugcaaaguacuacacuuagaaggagaaguaaauaaaaucaaaucagccuuacuaucaacaaauaaagcaguuguaucacucucaggaugcggaguauccguacuaacauuuaaaguacuagaucuaaaaaacuacauagauaaacaacucuuaccaauacuaaauaaacaaucauguuccauacccaacauagaaaccguuaucgaauuucaacaaaaaaacaacagauuacuagaaaucacacgagaauuuucaguaaaugcuggagucacaacaccaguuaguacauacaugcucaccaauucagaacuacuaaguuuaauuaacgauaugccaauaacaaacgaccaaaaaaaacuaaugucaaauaacguacaaauaguaagacaacaaucauacucaaucaugugcauaauaaaagaagaaguacuagccuauguaguccaauuaccacucuacggcguaaucgacaccccaugcuggaaauuacacacaagcccauuaugcaccaccaacacaaaagaagguucaaacauuugcuuaaccagaaccgaucgaggaugguacugcgauaacgcaggaucugucuccuuuuucccacaagccgaaacaugcaaaguucaaucaaaccgaguuuucugugacacuaugaacucacucacacuuccaagcgaaguaaaccuaugcaacguagauauauuuaacccuaaauacgacugcaaaauaaugacaagcaaaacagacguuaguucaucaguaauuacaagucuaggcgcaauagugucaugcuacggaaaaacaaaaugcaccgcauccaauaaaugccgaggaaucauuaaaacauucucaaacggaugcgacuacgucagcaauaaaggaguagacacuguuucuguaggaaacacccuauacuauguaaacaaacaagaaggucaaucacuauacguaaagggagaaccaauuauaaauuuuuacgaccccuuaguauuuccaagugaugaauuugacgcaucuauaagucaaguuaacgaaaaaauuaaccaaucacuugcauuuauaagaaaaucagacgaacuacuccauaauguaaacgcagguaaaucaacaacaaacaucaugaucacaaccauaauaauaguaauaauuguaauauuacuaucacuaauagcaguaggauuacuacucuacugcaaagcuagaucuaccccggucacacucucaaaagaccaauuaucuggaauaaacaauauagcauucagcaacuaaggacuaguguccaccugucccuccugggcugcuggauugucucguuuuccugccaaauaaacaggaucagcgcuuuacagaucuaaaaaaaaaaaaaaaaaaaaaaaaaaaaaaaaaaaaaaaaaaaaaaaaaaaaaaaaaaaaaaaaugcaucccccccccccccccccccccccccccccccaaaggcucuuuucagagccaccagaauu

SEQ ID NO: 7716 - RNA, 1940 nt, Artificial Sequence
  mRNA product Design e-1 comprising derived and/or modified sequence from HRSV(A2)__F_DSCav1_mut8 (opt11)
gggagaauauaagcguuggcggagcgucgguuguagcacucugcgcgcccgcucuucugcugcuguuugucuacuuccuccugcuuccccgccgccgccgccgccaucaagcuuaccauggaacuccucauccuuaaagccaacgccauaaccaccauccucaccgccgucaccuucugcuucgcuucuggccaaaacauaaccgaagaguucuaccaauccacgugcucugccgugucaaaaggcuaccucggagcccuccgcacagggugguacacuuccgucaucaccaucgaacucucuaacaucaaagaaaucaagugcaacggcacagacgcgaaagucaagcucaucaaacaagaacuagacaaauacaaaaacgccguaacagaccuccaacuccuaaugcaguccacaccagccacaggcuccggcagcgccaucgccuccggcgucgcugucugcaaaguccuacaccucgaaggcgaagucaacaaaaucaagucagcccuccuuagcaccaacaaagcagucgucucuuuaagcgggugcggagucucuguccuaaccuuuaaaguacucgaccucaaaaacuacaucgacaaacaacuacuaccaauacuaaacaaacagagcugcuccauucccaacaucgaaaccguuaucgaguuccaacaaaagaacaaccgccuccucgaaaucacccgcgaguucuccgucaacgcaggcgucaccaccccagucuccaccuauaugcuaaccaacagcgaacuccucagccucaucaaugacaugccaaucaccaacgaccaaaagaaacucauguccaacaacguacagauaguccgccagcaguccuacagcaucaugugcaucaucaaagaagaagugcucgccuacgugguacaacucccucucuacggagucauugauacacccugcuggaaacuccacacaagcccccucugcacuacaaacaccaaagaaggcucuaacauaugccucacccgcacagaccgugguugguacugcgacaacgccggcuccguauccuucuuuccacaagcugaaaccugcaaaguucaaucaaaccgagucuucugcgacaccaugaacucccucacauugcccagcgaagucaaccucugcaacgucgacaucuucaaccccaaguacgacugcaaaaucaugaccuccaaaaccgacgucagcuccagcgugaucacaagccuaggcgcgaucgucagcugcuacggcaaaaccaaaugcacagccuccaacaaaugccgcggaaucauaaaaacauucaguaacggcugcgacuacguguccaauaaaggagucgacaccguauccgucggaaacacccucuacuacgucaacaaacaagaaggacaaucccucuaugucaaaggcgaacccauuaucaacuucuacgacccccuaguuuuccccuccgacgaguucgacgcaagcauuucccaagucaacgaaaagaucaaucaaucccucgccuucauacgcaaaagcgacgaacuacuacacaacguaaacgccggcaaaagcaccaccaacaucaugaucacaacaaucaucaucgucaucaucgucauccuacucucacucaucgccguuggccuacuacucuacugcaaagcccgcuccacacccgucacccucucaaaagaccaacucuccggcaucaacaacaucgcauucagcaacugaggacuaguguccaccugucccuccugggcugcuggauugucucguuuuccugccaaauaaacaggaucagcgcuuuacagaucuaaaaaaaaaaaaaaaaaaaaaaaaaaaaaaaaaaaaaaaaaaaaaaaaaaaaaaaaaaaaaaaaugcaucccccccccccccccccccccccccccccccaaaggcucuuuucagagccaccagaauu

SEQ ID NO: 7717 - RNA, 1922 nt, Artificial Sequence
  mRNA product Design e-2 comprising derived and/or modified sequence from HRSV(A2)__F_DSCav1_mut8 (opt1)
gggagacccgugacccggaaguuguacggcuacgcgacuuucccucccacaaacccucgcgcccuuccuuuccuacuugggcccggcagaaagcuuaccauggagcugcucauccugaaggccaacgccaucaccaccauccugacggcggugaccuucugcuucgccagcggccagaacaucaccgaggaguucuaccaguccacgugcagcgccgucuccaagggguaccucggcgcccugcggaccggcugguacaccuccgugaucaccaucgagcugagcaacaucaaggagaucaagugcaacgggaccgacgccaaggugaagcucaucaagcaggagcuggacaaguacaagaacgcggucacggaccugcagcuccugaugcaguccaccccggcaaccggcuccggcuccgccaucgcgagcggcgucgccgugugcaaggugcugcaccucgagggggaggucaacaagaucaagagcgcccugcuguccaccaacaaggccguggugagccucuccggcugcggcgucagcgugcugaccuucaaggugcuggaccucaagaacuacaucgacaagcagcugcugcccauccugaacaagcagagcugcuccauccccaacaucgagacggugaucgaguuccagcagaagaacaaccggcuccuggagaucacccgcgaguucagcgugaacgccggggucaccacccccguguccacguacaugcugaccaacagcgagcuccugucccugaucaacgacaugccgaucaccaacgaccagaagaagcucaugagcaacaacgugcagaucguccggcagcaguccuacagcaucaugugcaucaucaaggaggaggugcuggcguacgugguccagcugccccucuacggcgugaucgacacccccugcuggaagcugcacacgagcccccugugcaccaccaacaccaaggagggguccaacaucugccucacgcgcaccgaccggggcugguacugcgacaacgccggcagcgucuccuucuucccgcaggccgagaccugcaaggugcagagcaaccgcguguucugcgacaccaugaacucccugacgcugcccagcgagguaaaccucugcaacgucgacaucuucaaccccaaguacgacugcaagaucaugaccuccaagaccgacgugagcuccagcgugaucaccucccugggggccaucgucagcugcuacggcaagacgaagugcaccgccagcaacaagugccgggggaucaucaagaccuucuccaacggcugcgacuacgugagcaacaagggcguggacaccguguccgucgggaacacccuguacuacgugaacaagcaggagggccagagccucuacgugaagggggagcccaucaucaacuucuacgacccgcuggucuuccccuccgacgaguucgacgcgagcaucucccaggugaacgagaagaucaaccagagccuggccuucauccgcaaguccgacgagcugcuccacaacgugaacgccggcaagagcacgaccaacaucaugaucaccaccaucaucaucgucaucaucgugauccugcugucccucaucgccguggggcugcugcucuacugcaaggcccggagcacgcccgucacccuguccaaggaccagcugagcggcaucaacaacaucgcguucuccaacugaggacuaguguccaccugucccuccugggcugcuggauugucucguuuuccugccaaauaaacaggaucagcgcuuuacagaucuaaaaaaaaaaaaaaaaaaaaaaaaaaaaaaaaaaaaaaaaaaaaaaaaaaaaaaaaaaaaaaaaugcaucccccccccccccccccccccccccccccccaaaggcucuuuucagagccaccagaauu

SEQ ID NO: 7718 - RNA, 1922 nt, Artificial Sequence
  mRNA product Design e-2 comprising derived and/or modified sequence from HRSV(A2)__F_DSCav1_mut8 (opt1)
gggagacccgugacccggaaguuguacggcuacgcgacuuucccucccacaaacccucgcgcccuuccuuuccuacuugggcccggcagaaagcuuaccauggagcugcucauccugaaggccaacgccaucaccaccauccugacggcggugaccuucugcuucgccagcggccagaacaucaccgaggaguucuaccaguccacgugcagcgccgucuccaagggguaccucggcgcccugcgcaccgggugguacaccagcgugaucaccaucgagcuguccaacaucaaggagaucaagugcaacggcaccgacgccaaggugaagcucaucaagcaggagcuggacaaguacaagaacgcggucacggaccugcagcuccugaugcagagcacccccgccaccggguccggcagcgccaucgccuccggcguggcggugugcaagguccugcaccucgagggggaggugaacaagaucaagagcgcccugcuguccaccaacaaggccguggucagccucuccggcugcggggugagcgugcugacguucaagguccuggaccucaagaacuacaucgacaagcagcugcugccgauccucaacaagcaguccugcagcauccccaacaucgagaccgugaucgaguuccagcagaagaacaaccggcugcuggagaucacccgcgaguucuccgugaacgccggcgucaccacgcccgugagcaccuacaugcucaccaacuccgagcugcugagccucaucaacgacaugcccaucaccaacgaccagaagaagcugaugagcaacaacgugcagaucguccggcagcaguccuacagcaucaugugcaucaucaaggaggaggugcuggccuacgugguccagcucccgcuguacggggugaucgacacgcccugcuggaagcugcacaccagcccccucugcaccaccaacacgaaggagggcuccaacaucugccugacccgcaccgaccggggcugguacugcgacaacgcgggguccgugagcuucuucccccaggccgagaccugcaagguccaguccaaccgcguguucugcgacacgaugaacagccugacccucccguccgaggucaaccugugcaacguggacaucuucaaccccaaguacgacugcaagaucaugaccagcaagaccgacguguccagcuccgucaucacgagccugggcgccaucguguccugcuacgggaagaccaagugcaccgccagcaacaagugccggggcaucaucaagaccuucuccaacggcugcgacuacgugagcaacaagggggucgacacgguguccgugggcaacacccucuacuacgucaacaagcaggaggggcagagccuguacgugaagggcgagcccaucaucaacuucuacgacccccugguguucccgagcgacgaguucgacgccuccaucagccaggucaacgagaagaucaaccagucccucgcguucauccgcaagagcgacgagcugcugcacaacgugaacgccgggaaguccaccaccaacaucaugaucaccacgaucaucaucgugaucaucgucauccuccugagccugaucgccgugggccuccugcuguacugcaaggcccgguccacccccgugacccugagcaaggaccagcucuccggcaucaacaacaucgccuucagcaacugaggacuaguguccaccugucccuccugggcugcuggauugucucguuuuccugccaaauaaacaggaucagcgcuuuacagaucuaaaaaaaaaaaaaaaaaaaaaaaaaaaaaaaaaaaaaaaaaaaaaaaaaaaaaaaaaaaaaaaaugcaucccccccccccccccccccccccccccccccaaaggcucuuuucagagccaccagaauu

SEQ ID NO: 7719 - RNA, 1922 nt, Artificial Sequence
  mRNA product Design e-2 comprising derived and/or modified sequence from HRSV(A2)__F_DSCav1_mut8 (opt2)
gggagacccgugacccggaaguuguacggcuacgcgacuuucccucccacaaacccucgcgcccuuccuuuccuacuugggcccggcagaaagcuuaccauggagcuccucauccucaaggccaacgccaucaccaccauccucaccgccgucaccuucugcuucgccuccggccagaacaucaccgaggaguucuaccaguccaccugcuccgccgucuccaagggcuaccucggcgcccuccgcaccggcugguacaccuccgucaucaccaucgagcucuccaacaucaaggagaucaagugcaacggcaccgacgccaaggucaagcucaucaagcaggagcucgacaaguacaagaacgccgucaccgaccuccagcuccucaugcaguccacccccgccaccggcuccggcuccgccaucgccuccggcgucgccgucugcaagguccuccaccucgagggcgaggucaacaagaucaaguccgcccuccucuccaccaacaaggccgucgucucccucuccggcugcggcgucuccguccucaccuucaagguccucgaccucaagaacuacaucgacaagcagcuccuccccauccucaacaagcaguccugcuccauccccaacaucgagaccgucaucgaguuccagcagaagaacaaccgccuccucgagaucacccgcgaguucuccgucaacgccggcgucaccacccccgucuccaccuacaugcucaccaacuccgagcuccucucccucaucaacgacaugcccaucaccaacgaccagaagaagcucauguccaacaacguccagaucguccgccagcaguccuacuccaucaugugcaucaucaaggaggagguccucgccuacgucguccagcucccccucuacggcgucaucgacacccccugcuggaagcuccacaccuccccccucugcaccaccaacaccaaggagggcuccaacaucugccucacccgcaccgaccgcggcugguacugcgacaacgccggcuccgucuccuucuucccccaggccgagaccugcaagguccaguccaaccgcgucuucugcgacaccaugaacucccucacccuccccuccgaggucaaccucugcaacgucgacaucuucaaccccaaguacgacugcaagaucaugaccuccaagaccgacgucuccuccuccgucaucaccucccucggcgccaucgucuccugcuacggcaagaccaagugcaccgccuccaacaagugccgcggcaucaucaagaccuucuccaacggcugcgacuacgucuccaacaagggcgucgacaccgucuccgucggcaacacccucuacuacgucaacaagcaggagggccagucccucuacgucaagggcgagcccaucaucaacuucuacgacccccucgucuuccccuccgacgaguucgacgccuccaucucccaggucaacgagaagaucaaccagucccucgccuucauccgcaaguccgacgagcuccuccacaacgucaacgccggcaaguccaccaccaacaucaugaucaccaccaucaucaucgucaucaucgucauccuccucucccucaucgccgucggccuccuccucuacugcaaggcccgcuccacccccgucacccucuccaaggaccagcucuccggcaucaacaacaucgccuucuccaacugaggacuaguguccaccugucccuccugggcugcuggauugucucguuuuccugccaaauaaacaggaucagcgcuuuacagaucuaaaaaaaaaaaaaaaaaaaaaaaaaaaaaaaaaaaaaaaaaaaaaaaaaaaaaaaaaaaaaaaaugcaucccccccccccccccccccccccccccccccaaaggcucuuuucagagccaccagaauu

SEQ ID NO: 7720 - RNA, 1922 nt, Artificial Sequence
  mRNA product Design e-2 comprising derived and/or modified sequence from HRSV(A2)__F_DSCav1_mut8 (opt3)
gggagacccgugacccggaaguuguacggcuacgcgacuuucccucccacaaacccucgcgcccuuccuuuccuacuugggcccggcagaaagcuuaccauggagcugcucauccuuaaggccaacgcuauuaccacaauacugacugcagugacguucugcuuugccagcggccagaauaucaccgaagaguucuaccaauccacauguucugcggucucaaaaggguauuugggagcuuuaagaacugguugguacaccaguguuauuacaaucgaacugagcaacauuaaggagaucaaaugcaauggcaccgacgccaaggugaaacuaauaaagcaggaacucgauaaguauaaaaacgcaguaacugaccugcagcuucugaugcaguccacacccgccaccgggucuggaucggcuaucgcaucaggcguggccgucuguaagguguugcaccucgagggugagguuaauaaaauuaagagcgcucugcugaguacgaacaaagccguggucucccucucugggugcggagugagcguauuaacuuuuaagguucuggaucuuaagaauuacaucgacaaacaauugcugccuauucuaaacaagcaguccuguucaaucccaaauauagaaaccgugauugaguuccagcagaaaaacaauaggcuccuggaaaucacacgggaguuuagugucaacgcgggcgugacuaccccggugagcacauauaugcuuaccaauucugagcuguugucccucauuaacgauaugcccaucacgaaugaccaaaagaaacugaugucaaacaacguccagaucguucgccagcagagcuacaguauuaugugcauaaucaaggaagagguguuagcauauguagugcaacugccucucuacggcgucauugauacuccauguuggaaacuucauacaucuccccugugcaccacuaauacaaaggaaggguccaacaucuguuugacccgaacggaccguggaugguacugcgauaaugccgguagcgugucguucuuuccucaggcugagaccuguaagguucagucuaacagaguguucugcgacacaaugaacucccuaacucugccaucagaagucaaucucugcaauguggauauauuuaaccccaaauaugacuguaagauuaugaccaguaaaacagauguaagcuccucuguuaucacuagccugggcgccaucgugucaugcuacgggaagaccaaauguacagcaaguaauaagugcaggggaauuaucaagaccuucuccaacggcugugacuaugucagcaauaaagguguggacacugucucuguggggaacacgcuuuacuauguuaauaagcaagagggacagucacuguacgugaaaggcgagccuauuauaaacuuuuaugauccauugguauucccgagugacgaauuugaugcuagcaucucccaggucaaugagaagauuaaccagucucucgccuucauccggaaaucggacgaacuguuacacaacgugaaugcgggcaagagcacaaccaacaucaugauuacuaccauaaucauuguuaucauugugauccugcuaucccucauagccgucgggcugcuuuuguacugcaaggcacgcucaacacccgugacccugaguaaagaucaacucucuggaaucaauaacauugcuuucagcaauugaggacuaguguccaccugucccuccugggcugcuggauugucucguuuuccugccaaauaaacaggaucagcgcuuuacagaucuaaaaaaaaaaaaaaaaaaaaaaaaaaaaaaaaaaaaaaaaaaaaaaaaaaaaaaaaaaaaaaaaugcaucccccccccccccccccccccccccccccccaaaggcucuuuucagagccaccagaauu

SEQ ID NO: 7721 - RNA, 1922 nt, Artificial Sequence
  mRNA product Design e-2 comprising derived and/or modified sequence from HRSV(A2)__F_DSCav1_mut8 (opt4)
gggagacccgugacccggaaguuguacggcuacgcgacuuucccucccacaaacccucgcgcccuuccuuuccuacuugggcccggcagaaagcuuaccauggagcugcugauccugaaggccaacgccaucaccaccauccugaccgccgugaccuucugcuucgccagcggccagaacaucaccgaggaguucuaccagagcaccugcagcgccgugagcaagggcuaccugggcgcccugagaaccggcugguacaccagcgugaucaccaucgagcugagcaacaucaaggagaucaagugcaacggcaccgacgccaaggugaagcugaucaagcaggagcuggacaaguacaagaacgccgugaccgaccugcagcugcugaugcagagcacccccgccaccggcagcggcagcgccaucgccagcggcguggccgugugcaaggugcugcaccuggagggcgaggugaacaagaucaagagcgcccugcugagcaccaacaaggccguggugagccugagcggcugcggcgugagcgugcugaccuucaaggugcuggaccugaagaacuacaucgacaagcagcugcugcccauccugaacaagcagagcugcagcauccccaacaucgagaccgugaucgaguuccagcagaagaacaacagacugcuggagaucaccagagaguucagcgugaacgccggcgugaccacccccgugagcaccuacaugcugaccaacagcgagcugcugagccugaucaacgacaugcccaucaccaacgaccagaagaagcugaugagcaacaacgugcagaucgugagacagcagagcuacagcaucaugugcaucaucaaggaggaggugcuggccuacguggugcagcugccccuguacggcgugaucgacacccccugcuggaagcugcacaccagcccccugugcaccaccaacaccaaggagggcagcaacaucugccugaccagaaccgacagaggcugguacugcgacaacgccggcagcgugagcuucuucccccaggccgagaccugcaaggugcagagcaacagaguguucugcgacaccaugaacagccugacccugcccagcgaggugaaccugugcaacguggacaucuucaaccccaaguacgacugcaagaucaugaccagcaagaccgacgugagcagcagcgugaucaccagccugggcgccaucgugagcugcuacggcaagaccaagugcaccgccagcaacaagugcagaggcaucaucaagaccuucagcaacggcugcgacuacgugagcaacaagggcguggacaccgugagcgugggcaacacccuguacuacgugaacaagcaggagggccagagccuguacgugaagggcgagcccaucaucaacuucuacgacccccugguguuccccagcgacgaguucgacgccagcaucagccaggugaacgagaagaucaaccagagccuggccuucaucagaaagagcgacgagcugcugcacaacgugaacgccggcaagagcaccaccaacaucaugaucaccaccaucaucaucgugaucaucgugauccugcugagccugaucgccgugggccugcugcuguacugcaaggccagaagcacccccgugacccugagcaaggaccagcugagcggcaucaacaacaucgccuucagcaacugaggacuaguguccaccugucccuccugggcugcuggauugucucguuuuccugccaaauaaacaggaucagcgcuuuacagaucuaaaaaaaaaaaaaaaaaaaaaaaaaaaaaaaaaaaaaaaaaaaaaaaaaaaaaaaaaaaaaaaaugcaucccccccccccccccccccccccccccccccaaaggcucuuuucagagccaccagaauu

SEQ ID NO: 7722 - RNA, 1922 nt, Artificial Sequence
  mRNA product Design e-2 comprising derived and/or modified sequence from HRSV(A2)__F_DSCav1_mut8 (opt5)
gggagacccgugacccggaaguuguacggcuacgcgacuuucccucccacaaacccucgcgcccuuccuuuccuacuugggcccggcagaaagcuuaccauggagcugcucauccugaaggccaacgcuauuaccacaauccuuacggccgugaccuucugcuuugcgagcggccagaauauuacagaagaguucuaccaauccaccuguucugcugucagcaaaggguaucugggagcccucagaacaggcugguacaccuccguuaucacaauugaacugucuaacaucaaggagaucaaaugcaaugggaccgacgccaaggugaaacuuauuaagcaggaacuggauaaguauaaaaacgcugugacggaccuccagcugcugaugcagagcacccccgccacaggauccggcucugcuaucgccagcggggucgcgguguguaagguucuccaccuggagggagaggugaauaaaauuaaguccgcccuucugagcaccaacaaagcugucgugucucucuccggcugcggcguuagcgugcugacauuuaagguccuugaucugaagaauuacaucgacaaacaacuccugccuauucugaacaagcagucuuguuccaucccgaauauugaaaccgugaucgaguuccagcagaaaaacaaucggcuccuggaaaucacgcgcgaguuuagcgugaacgccggggucacaacccccguuucuacauauaugcuuaccaauuccgagcugcucagccugauuaacgauaugccuaucaccaaugaccaaaagaaacuuauguccaacaacgugcagauugugagacagcagucuuacagcaucaugugcauuaucaaggaagagguccuggcuuaugugguucaacucccccuguacggagugaucgauacaccuuguuggaaacugcauacgagcccccucugcaccacaaauaccaaggaaggcagcaacauuugucugacacggaccgaccgcgggugguacugcgauaaugccggaucugucuccuucuuuccucaggcggagacguguaaggugcagagcaacagaguuuucugcgacacaaugaacucucuuacccugccgagcgaagugaaucucugcaaugucgauaucuuuaaccccaaauaugacuguaagauuaugaccuccaaaacagaugugucuagcuccgucaucaccagccugggcgccauugugucuugcuacgggaagacaaaauguacggcuuccaauaagugccggggaaucaucaagaccuucagcaacggcugugacuauguuucuaauaaaggcguggacacagucuccguggggaacacccuuuacuauguuaauaagcaagagggacagagccuguacgugaaaggcgagccuauuaucaacuuuuaugauccccucgucuucccuuccgacgaauuugaugccucuauuagccaggugaaugagaagaucaaccagucccuggcuuucauucgcaaaucugacgaacugcuccacaacgugaaugccgggaaguccacaaccaacaucaugauuacgaccaucaucauuguuaucauugucauccugcuuucccugauugccgugggacuccugcuguacugcaaggcuagaagcacacccgugacccuuucuaaagaucaacucuccggcaucaauaacaucgcguucagcaauugaggacuaguguccaccugucccuccugggcugcuggauugucucguuuuccugccaaauaaacaggaucagcgcuuuacagaucuaaaaaaaaaaaaaaaaaaaaaaaaaaaaaaaaaaaaaaaaaaaaaaaaaaaaaaaaaaaaaaaaugcaucccccccccccccccccccccccccccccccaaaggcucuuuucagagccaccagaauu

SEQ ID NO: 7723 - RNA, 1922 nt, Artificial Sequence
  mRNA product Design e-2 comprising derived and/or modified sequence from HRSV(A2)__F_DSCav1_mut8 (opt6)
gggagacccgugacccggaaguuguacggcuacgcgacuuucccucccacaaacccucgcgcccuuccuuuccuacuugggcccggcagaaagcuuaccauggaacuauuaauauuaaaagcaaacgcaaucacaacuauacuaacagcaguaacauucugcuuugccucaggucaaaacauaacagaggaauuuuaccaauccacaugcucugcuguaagcaaaggauaccucggagcauuaagaacuggaugguacaccucaguaauaacuauagaacuaucaaacauaaaagaaauaaaauguaauggcacagacgcaaaagugaaauuaaucaaacaagaacucgauaaauacaaaaaugccguaaccgaucuccaacuuuuaaugcaaagcacacccgcaacagguuccgggucagcaauagcaagcggaguugcaguaugcaaaguacuacacuuagaaggagaaguaaauaaaaucaaaucagccuuacuaucaacaaauaaagcaguuguaucacucucaggaugcggaguauccguacuaacauuuaaaguacuagaucuaaaaaacuacauagauaaacaacucuuaccaauacuaaauaaacaaucauguuccauacccaacauagaaaccguuaucgaauuucaacaaaaaaacaacagauuacuagaaaucacacgagaauuuucaguaaaugcuggagucacaacaccaguuaguacauacaugcucaccaauucagaacuacuaaguuuaauuaacgauaugccaauaacaaacgaccaaaaaaaacuaaugucaaauaacguacaaauaguaagacaacaaucauacucaaucaugugcauaauaaaagaagaaguacuagccuauguaguccaauuaccacucuacggcguaaucgacaccccaugcuggaaauuacacacaagcccauuaugcaccaccaacacaaaagaagguucaaacauuugcuuaaccagaaccgaucgaggaugguacugcgauaacgcaggaucugucuccuuuuucccacaagccgaaacaugcaaaguucaaucaaaccgaguuuucugugacacuaugaacucacucacacuuccaagcgaaguaaaccuaugcaacguagauauauuuaacccuaaauacgacugcaaaauaaugacaagcaaaacagacguuaguucaucaguaauuacaagucuaggcgcaauagugucaugcuacggaaaaacaaaaugcaccgcauccaauaaaugccgaggaaucauuaaaacauucucaaacggaugcgacuacgucagcaauaaaggaguagacacuguuucuguaggaaacacccuauacuauguaaacaaacaagaaggucaaucacuauacguaaagggagaaccaauuauaaauuuuuacgaccccuuaguauuuccaagugaugaauuugacgcaucuauaagucaaguuaacgaaaaaauuaaccaaucacuugcauuuauaagaaaaucagacgaacuacuccauaauguaaacgcagguaaaucaacaacaaacaucaugaucacaaccauaauaauaguaauaauuguaauauuacuaucacuaauagcaguaggauuacuacucuacugcaaagcuagaucuaccccggucacacucucaaaagaccaauuaucuggaauaaacaauauagcauucagcaacuaaggacuaguguccaccugucccuccugggcugcuggauugucucguuuuccugccaaauaaacaggaucagcgcuuuacagaucuaaaaaaaaaaaaaaaaaaaaaaaaaaaaaaaaaaaaaaaaaaaaaaaaaaaaaaaaaaaaaaaaugcaucccccccccccccccccccccccccccccccaaaggcucuuuucagagccaccagaauu

SEQ ID NO: 7724 - RNA, 1922 nt, Artificial Sequence
  mRNA product Design e-2 comprising derived and/or modified sequence from HRSV(A2)__F_DSCav1_mut8 (opt11)
gggagacccgugacccggaaguuguacggcuacgcgacuuucccucccacaaacccucgcgcccuuccuuuccuacuugggcccggcagaaagcuuaccauggaacuccucauccuuaaagccaacgccauaaccaccauccucaccgccgucaccuucugcuucgcuucuggccaaaacauaaccgaagaguucuaccaauccacgugcucugccgugucaaaaggcuaccucggagcccuccgcacagggugguacacuuccgucaucaccaucgaacucucuaacaucaaagaaaucaagugcaacggcacagacgcgaaagucaagcucaucaaacaagaacuagacaaauacaaaaacgccguaacagaccuccaacuccuaaugcaguccacaccagccacaggcuccggcagcgccaucgccuccggcgucgcugucugcaaaguccuacaccucgaaggcgaagucaacaaaaucaagucagcccuccuuagcaccaacaaagcagucgucucuuuaagcgggugcggagucucuguccuaaccuuuaaaguacucgaccucaaaaacuacaucgacaaacaacuacuaccaauacuaaacaaacagagcugcuccauucccaacaucgaaaccguuaucgaguuccaacaaaagaacaaccgccuccucgaaaucacccgcgaguucuccgucaacgcaggcgucaccaccccagucuccaccuauaugcuaaccaacagcgaacuccucagccucaucaaugacaugccaaucaccaacgaccaaaagaaacucauguccaacaacguacagauaguccgccagcaguccuacagcaucaugugcaucaucaaagaagaagugcucgccuacgugguacaacucccucucuacggagucauugauacacccugcuggaaacuccacacaagcccccucugcacuacaaacaccaaagaaggcucuaacauaugccucacccgcacagaccgugguugguacugcgacaacgccggcuccguauccuucuuuccacaagcugaaaccugcaaaguucaaucaaaccgagucuucugcgacaccaugaacucccucacauugcccagcgaagucaaccucugcaacgucgacaucuucaaccccaaguacgacugcaaaaucaugaccuccaaaaccgacgucagcuccagcgugaucacaagccuaggcgcgaucgucagcugcuacggcaaaaccaaaugcacagccuccaacaaaugccgcggaaucauaaaaacauucaguaacggcugcgacuacguguccaauaaaggagucgacaccguauccgucggaaacacccucuacuacgucaacaaacaagaaggacaaucccucuaugucaaaggcgaacccauuaucaacuucuacgacccccuaguuuuccccuccgacgaguucgacgcaagcauuucccaagucaacgaaaagaucaaucaaucccucgccuucauacgcaaaagcgacgaacuacuacacaacguaaacgccggcaaaagcaccaccaacaucaugaucacaacaaucaucaucgucaucaucgucauccuacucucacucaucgccguuggccuacuacucuacugcaaagcccgcuccacacccgucacccucucaaaagaccaacucuccggcaucaacaacaucgcauucagcaacugaggacuaguguccaccugucccuccugggcugcuggauugucucguuuuccugccaaauaaacaggaucagcgcuuuacagaucuaaaaaaaaaaaaaaaaaaaaaaaaaaaaaaaaaaaaaaaaaaaaaaaaaaaaaaaaaaaaaaaaugcaucccccccccccccccccccccccccccccccaaaggcucuuuucagagccaccagaauu

SEQ ID NO: 7725 - RNA, 1892 nt, Artificial Sequence
  mRNA product Design e-3 comprising derived and/or modified sequence from HRSV(A2)__F_DSCav1_mut8 (opt1)
gggagacuuucccauucuguagcagaauuugguguugccuguggucuuggucccgcggagaagcuuaccauggagcugcucauccugaaggccaacgccaucaccaccauccugacggcggugaccuucugcuucgccagcggccagaacaucaccgaggaguucuaccaguccacgugcagcgccgucuccaagggguaccucggcgcccugcggaccggcugguacaccuccgugaucaccaucgagcugagcaacaucaaggagaucaagugcaacgggaccgacgccaaggugaagcucaucaagcaggagcuggacaaguacaagaacgcggucacggaccugcagcuccugaugcaguccaccccggcaaccggcuccggcuccgccaucgcgagcggcgucgccgugugcaaggugcugcaccucgagggggaggucaacaagaucaagagcgcccugcuguccaccaacaaggccguggugagccucuccggcugcggcgucagcgugcugaccuucaaggugcuggaccucaagaacuacaucgacaagcagcugcugcccauccugaacaagcagagcugcuccauccccaacaucgagacggugaucgaguuccagcagaagaacaaccggcuccuggagaucacccgcgaguucagcgugaacgccggggucaccacccccguguccacguacaugcugaccaacagcgagcuccugucccugaucaacgacaugccgaucaccaacgaccagaagaagcucaugagcaacaacgugcagaucguccggcagcaguccuacagcaucaugugcaucaucaaggaggaggugcuggcguacgugguccagcugccccucuacggcgugaucgacacccccugcuggaagcugcacacgagcccccugugcaccaccaacaccaaggagggguccaacaucugccucacgcgcaccgaccggggcugguacugcgacaacgccggcagcgucuccuucuucccgcaggccgagaccugcaaggugcagagcaaccgcguguucugcgacaccaugaacucccugacgcugcccagcgagguaaaccucugcaacgucgacaucuucaaccccaaguacgacugcaagaucaugaccuccaagaccgacgugagcuccagcgugaucaccucccugggggccaucgucagcugcuacggcaagacgaagugcaccgccagcaacaagugccgggggaucaucaagaccuucuccaacggcugcgacuacgugagcaacaagggcguggacaccguguccgucgggaacacccuguacuacgugaacaagcaggagggccagagccucuacgugaagggggagcccaucaucaacuucuacgacccgcuggucuuccccuccgacgaguucgacgcgagcaucucccaggugaacgagaagaucaaccagagccuggccuucauccgcaaguccgacgagcugcuccacaacgugaacgccggcaagagcacgaccaacaucaugaucaccaccaucaucaucgucaucaucgugauccugcugucccucaucgccguggggcugcugcucuacugcaaggcccggagcacgcccgucacccuguccaaggaccagcugagcggcaucaacaacaucgcguucuccaacugaggacuaguguccaccugucccuccugggcugcuggauugucucguuuuccugccaaauaaacaggaucagcgcuuuacagaucuaaaaaaaaaaaaaaaaaaaaaaaaaaaaaaaaaaaaaaaaaaaaaaaaaaaaaaaaaaaaaaaaugcaucccccccccccccccccccccccccccccccaaaggcucuuuucagagccaccagaauu

SEQ ID NO: 7726 - RNA, 1892 nt, Artificial Sequence
  mRNA product Design e-3 comprising derived and/or modified sequence from HRSV(A2)__F_DSCav1_mut8 (opt1)
gggagacuuucccauucuguagcagaauuugguguugccuguggucuuggucccgcggagaagcuuaccauggagcugcucauccugaaggccaacgccaucaccaccauccugacggcggugaccuucugcuucgccagcggccagaacaucaccgaggaguucuaccaguccacgugcagcgccgucuccaagggguaccucggcgcccugcgcaccgggugguacaccagcgugaucaccaucgagcuguccaacaucaaggagaucaagugcaacggcaccgacgccaaggugaagcucaucaagcaggagcuggacaaguacaagaacgcggucacggaccugcagcuccugaugcagagcacccccgccaccggguccggcagcgccaucgccuccggcguggcggugugcaagguccugcaccucgagggggaggugaacaagaucaagagcgcccugcuguccaccaacaaggccguggucagccucuccggcugcggggugagcgugcugacguucaagguccuggaccucaagaacuacaucgacaagcagcugcugccgauccucaacaagcaguccugcagcauccccaacaucgagaccgugaucgaguuccagcagaagaacaaccggcugcuggagaucacccgcgaguucuccgugaacgccggcgucaccacgcccgugagcaccuacaugcucaccaacuccgagcugcugagccucaucaacgacaugcccaucaccaacgaccagaagaagcugaugagcaacaacgugcagaucguccggcagcaguccuacagcaucaugugcaucaucaaggaggaggugcuggccuacgugguccagcucccgcuguacggggugaucgacacgcccugcuggaagcugcacaccagcccccucugcaccaccaacacgaaggagggcuccaacaucugccugacccgcaccgaccggggcugguacugcgacaacgcgggguccgugagcuucuucccccaggccgagaccugcaagguccaguccaaccgcguguucugcgacacgaugaacagccugacccucccguccgaggucaaccugugcaacguggacaucuucaaccccaaguacgacugcaagaucaugaccagcaagaccgacguguccagcuccgucaucacgagccugggcgccaucguguccugcuacgggaagaccaagugcaccgccagcaacaagugccggggcaucaucaagaccuucuccaacggcugcgacuacgugagcaacaagggggucgacacgguguccgugggcaacacccucuacuacgucaacaagcaggaggggcagagccuguacgugaagggcgagcccaucaucaacuucuacgacccccugguguucccgagcgacgaguucgacgccuccaucagccaggucaacgagaagaucaaccagucccucgcguucauccgcaagagcgacgagcugcugcacaacgugaacgccgggaaguccaccaccaacaucaugaucaccacgaucaucaucgugaucaucgucauccuccugagccugaucgccgugggccuccugcuguacugcaaggcccgguccacccccgugacccugagcaaggaccagcucuccggcaucaacaacaucgccuucagcaacugaggacuaguguccaccugucccuccugggcugcuggauugucucguuuuccugccaaauaaacaggaucagcgcuuuacagaucuaaaaaaaaaaaaaaaaaaaaaaaaaaaaaaaaaaaaaaaaaaaaaaaaaaaaaaaaaaaaaaaaugcaucccccccccccccccccccccccccccccccaaaggcucuuuucagagccaccagaauu

SEQ ID NO: 7727 - RNA, 1892 nt, Artificial Sequence
  mRNA product Design e-3 comprising derived and/or modified sequence from HRSV(A2)__F_DSCav1_mut8 (opt2)
gggagacuuucccauucuguagcagaauuugguguugccuguggucuuggucccgcggagaagcuuaccauggagcuccucauccucaaggccaacgccaucaccaccauccucaccgccgucaccuucugcuucgccuccggccagaacaucaccgaggaguucuaccaguccaccugcuccgccgucuccaagggcuaccucggcgcccuccgcaccggcugguacaccuccgucaucaccaucgagcucuccaacaucaaggagaucaagugcaacggcaccgacgccaaggucaagcucaucaagcaggagcucgacaaguacaagaacgccgucaccgaccuccagcuccucaugcaguccacccccgccaccggcuccggcuccgccaucgccuccggcgucgccgucugcaagguccuccaccucgagggcgaggucaacaagaucaaguccgcccuccucuccaccaacaaggccgucgucucccucuccggcugcggcgucuccguccucaccuucaagguccucgaccucaagaacuacaucgacaagcagcuccuccccauccucaacaagcaguccugcuccauccccaacaucgagaccgucaucgaguuccagcagaagaacaaccgccuccucgagaucacccgcgaguucuccgucaacgccggcgucaccacccccgucuccaccuacaugcucaccaacuccgagcuccucucccucaucaacgacaugcccaucaccaacgaccagaagaagcucauguccaacaacguccagaucguccgccagcaguccuacuccaucaugugcaucaucaaggaggagguccucgccuacgucguccagcucccccucuacggcgucaucgacacccccugcuggaagcuccacaccuccccccucugcaccaccaacaccaaggagggcuccaacaucugccucacccgcaccgaccgcggcugguacugcgacaacgccggcuccgucuccuucuucccccaggccgagaccugcaagguccaguccaaccgcgucuucugcgacaccaugaacucccucacccuccccuccgaggucaaccucugcaacgucgacaucuucaaccccaaguacgacugcaagaucaugaccuccaagaccgacgucuccuccuccgucaucaccucccucggcgccaucgucuccugcuacggcaagaccaagugcaccgccuccaacaagugccgcggcaucaucaagaccuucuccaacggcugcgacuacgucuccaacaagggcgucgacaccgucuccgucggcaacacccucuacuacgucaacaagcaggagggccagucccucuacgucaagggcgagcccaucaucaacuucuacgacccccucgucuuccccuccgacgaguucgacgccuccaucucccaggucaacgagaagaucaaccagucccucgccuucauccgcaaguccgacgagcuccuccacaacgucaacgccggcaaguccaccaccaacaucaugaucaccaccaucaucaucgucaucaucgucauccuccucucccucaucgccgucggccuccuccucuacugcaaggcccgcuccacccccgucacccucuccaaggaccagcucuccggcaucaacaacaucgccuucuccaacugaggacuaguguccaccugucccuccugggcugcuggauugucucguuuuccugccaaauaaacaggaucagcgcuuuacagaucuaaaaaaaaaaaaaaaaaaaaaaaaaaaaaaaaaaaaaaaaaaaaaaaaaaaaaaaaaaaaaaaaugcaucccccccccccccccccccccccccccccccaaaggcucuuuucagagccaccagaauu

SEQ ID NO: 7728 - RNA, 1892 nt, Artificial Sequence
  mRNA product Design e-3 comprising derived and/or modified sequence from HRSV(A2)__F_DSCav1_mut8 (opt3)
gggagacuuucccauucuguagcagaauuugguguugccuguggucuuggucccgcggagaagcuuaccauggagcugcucauccuuaaggccaacgcuauuaccacaauacugacugcagugacguucugcuuugccagcggccagaauaucaccgaagaguucuaccaauccacauguucugcggucucaaaaggguauuugggagcuuuaagaacugguugguacaccaguguuauuacaaucgaacugagcaacauuaaggagaucaaaugcaauggcaccgacgccaaggugaaacuaauaaagcaggaacucgauaaguauaaaaacgcaguaacugaccugcagcuucugaugcaguccacacccgccaccgggucuggaucggcuaucgcaucaggcguggccgucuguaagguguugcaccucgagggugagguuaauaaaauuaagagcgcucugcugaguacgaacaaagccguggucucccucucugggugcggagugagcguauuaacuuuuaagguucuggaucuuaagaauuacaucgacaaacaauugcugccuauucuaaacaagcaguccuguucaaucccaaauauagaaaccgugauugaguuccagcagaaaaacaauaggcuccuggaaaucacacgggaguuuagugucaacgcgggcgugacuaccccggugagcacauauaugcuuaccaauucugagcuguugucccucauuaacgauaugcccaucacgaaugaccaaaagaaacugaugucaaacaacguccagaucguucgccagcagagcuacaguauuaugugcauaaucaaggaagagguguuagcauauguagugcaacugccucucuacggcgucauugauacuccauguuggaaacuucauacaucuccccugugcaccacuaauacaaaggaaggguccaacaucuguuugacccgaacggaccguggaugguacugcgauaaugccgguagcgugucguucuuuccucaggcugagaccuguaagguucagucuaacagaguguucugcgacacaaugaacucccuaacucugccaucagaagucaaucucugcaauguggauauauuuaaccccaaauaugacuguaagauuaugaccaguaaaacagauguaagcuccucuguuaucacuagccugggcgccaucgugucaugcuacgggaagaccaaauguacagcaaguaauaagugcaggggaauuaucaagaccuucuccaacggcugugacuaugucagcaauaaagguguggacacugucucuguggggaacacgcuuuacuauguuaauaagcaagagggacagucacuguacgugaaaggcgagccuauuauaaacuuuuaugauccauugguauucccgagugacgaauuugaugcuagcaucucccaggucaaugagaagauuaaccagucucucgccuucauccggaaaucggacgaacuguuacacaacgugaaugcgggcaagagcacaaccaacaucaugauuacuaccauaaucauuguuaucauugugauccugcuaucccucauagccgucgggcugcuuuuguacugcaaggcacgcucaacacccgugacccugaguaaagaucaacucucuggaaucaauaacauugcuuucagcaauugaggacuaguguccaccugucccuccugggcugcuggauugucucguuuuccugccaaauaaacaggaucagcgcuuuacagaucuaaaaaaaaaaaaaaaaaaaaaaaaaaaaaaaaaaaaaaaaaaaaaaaaaaaaaaaaaaaaaaaaugcaucccccccccccccccccccccccccccccccaaaggcucuuuucagagccaccagaauu

SEQ ID NO: 7729 - RNA, 1892 nt, Artificial Sequence
  mRNA product Design e-3 comprising derived and/or modified sequence from HRSV(A2)__F_DSCav1_mut8 (opt4)
gggagacuuucccauucuguagcagaauuugguguugccuguggucuuggucccgcggagaagcuuaccauggagcugcugauccugaaggccaacgccaucaccaccauccugaccgccgugaccuucugcuucgccagcggccagaacaucaccgaggaguucuaccagagcaccugcagcgccgugagcaagggcuaccugggcgcccugagaaccggcugguacaccagcgugaucaccaucgagcugagcaacaucaaggagaucaagugcaacggcaccgacgccaaggugaagcugaucaagcaggagcuggacaaguacaagaacgccgugaccgaccugcagcugcugaugcagagcacccccgccaccggcagcggcagcgccaucgccagcggcguggccgugugcaaggugcugcaccuggagggcgaggugaacaagaucaagagcgcccugcugagcaccaacaaggccguggugagccugagcggcugcggcgugagcgugcugaccuucaaggugcuggaccugaagaacuacaucgacaagcagcugcugcccauccugaacaagcagagcugcagcauccccaacaucgagaccgugaucgaguuccagcagaagaacaacagacugcuggagaucaccagagaguucagcgugaacgccggcgugaccacccccgugagcaccuacaugcugaccaacagcgagcugcugagccugaucaacgacaugcccaucaccaacgaccagaagaagcugaugagcaacaacgugcagaucgugagacagcagagcuacagcaucaugugcaucaucaaggaggaggugcuggccuacguggugcagcugccccuguacggcgugaucgacacccccugcuggaagcugcacaccagcccccugugcaccaccaacaccaaggagggcagcaacaucugccugaccagaaccgacagaggcugguacugcgacaacgccggcagcgugagcuucuucccccaggccgagaccugcaaggugcagagcaacagaguguucugcgacaccaugaacagccugacccugcccagcgaggugaaccugugcaacguggacaucuucaaccccaaguacgacugcaagaucaugaccagcaagaccgacgugagcagcagcgugaucaccagccugggcgccaucgugagcugcuacggcaagaccaagugcaccgccagcaacaagugcagaggcaucaucaagaccuucagcaacggcugcgacuacgugagcaacaagggcguggacaccgugagcgugggcaacacccuguacuacgugaacaagcaggagggccagagccuguacgugaagggcgagcccaucaucaacuucuacgacccccugguguuccccagcgacgaguucgacgccagcaucagccaggugaacgagaagaucaaccagagccuggccuucaucagaaagagcgacgagcugcugcacaacgugaacgccggcaagagcaccaccaacaucaugaucaccaccaucaucaucgugaucaucgugauccugcugagccugaucgccgugggccugcugcuguacugcaaggccagaagcacccccgugacccugagcaaggaccagcugagcggcaucaacaacaucgccuucagcaacugaggacuaguguccaccugucccuccugggcugcuggauugucucguuuuccugccaaauaaacaggaucagcgcuuuacagaucuaaaaaaaaaaaaaaaaaaaaaaaaaaaaaaaaaaaaaaaaaaaaaaaaaaaaaaaaaaaaaaaaugcaucccccccccccccccccccccccccccccccaaaggcucuuuucagagccaccagaauu

SEQ ID NO: 7730 - RNA, 1892 nt, Artificial Sequence
  mRNA product Design e-3 comprising derived and/or modified sequence from HRSV(A2)__F_DSCav1_mut8 (opt5)
gggagacuuucccauucuguagcagaauuugguguugccuguggucuuggucccgcggagaagcuuaccauggagcugcucauccugaaggccaacgcuauuaccacaauccuuacggccgugaccuucugcuuugcgagcggccagaauauuacagaagaguucuaccaauccaccuguucugcugucagcaaaggguaucugggagcccucagaacaggcugguacaccuccguuaucacaauugaacugucuaacaucaaggagaucaaaugcaaugggaccgacgccaaggugaaacuuauuaagcaggaacuggauaaguauaaaaacgcugugacggaccuccagcugcugaugcagagcacccccgccacaggauccggcucugcuaucgccagcggggucgcgguguguaagguucuccaccuggagggagaggugaauaaaauuaaguccgcccuucugagcaccaacaaagcugucgugucucucuccggcugcggcguuagcgugcugacauuuaagguccuugaucugaagaauuacaucgacaaacaacuccugccuauucugaacaagcagucuuguuccaucccgaauauugaaaccgugaucgaguuccagcagaaaaacaaucggcuccuggaaaucacgcgcgaguuuagcgugaacgccggggucacaacccccguuucuacauauaugcuuaccaauuccgagcugcucagccugauuaacgauaugccuaucaccaaugaccaaaagaaacuuauguccaacaacgugcagauugugagacagcagucuuacagcaucaugugcauuaucaaggaagagguccuggcuuaugugguucaacucccccuguacggagugaucgauacaccuuguuggaaacugcauacgagcccccucugcaccacaaauaccaaggaaggcagcaacauuugucugacacggaccgaccgcgggugguacugcgauaaugccggaucugucuccuucuuuccucaggcggagacguguaaggugcagagcaacagaguuuucugcgacacaaugaacucucuuacccugccgagcgaagugaaucucugcaaugucgauaucuuuaaccccaaauaugacuguaagauuaugaccuccaaaacagaugugucuagcuccgucaucaccagccugggcgccauugugucuugcuacgggaagacaaaauguacggcuuccaauaagugccggggaaucaucaagaccuucagcaacggcugugacuauguuucuaauaaaggcguggacacagucuccguggggaacacccuuuacuauguuaauaagcaagagggacagagccuguacgugaaaggcgagccuauuaucaacuuuuaugauccccucgucuucccuuccgacgaauuugaugccucuauuagccaggugaaugagaagaucaaccagucccuggcuuucauucgcaaaucugacgaacugcuccacaacgugaaugccgggaaguccacaaccaacaucaugauuacgaccaucaucauuguuaucauugucauccugcuuucccugauugccgugggacuccugcuguacugcaaggcuagaagcacacccgugacccuuucuaaagaucaacucuccggcaucaauaacaucgcguucagcaauugaggacuaguguccaccugucccuccugggcugcuggauugucucguuuuccugccaaauaaacaggaucagcgcuuuacagaucuaaaaaaaaaaaaaaaaaaaaaaaaaaaaaaaaaaaaaaaaaaaaaaaaaaaaaaaaaaaaaaaaugcaucccccccccccccccccccccccccccccccaaaggcucuuuucagagccaccagaauu

SEQ ID NO: 7731 - RNA, 1892 nt, Artificial Sequence
  mRNA product Design e-3 comprising derived and/or modified sequence from HRSV(A2)__F_DSCav1_mut8 (opt6)
gggagacuuucccauucuguagcagaauuugguguugccuguggucuuggucccgcggagaagcuuaccauggaacuauuaauauuaaaagcaaacgcaaucacaacuauacuaacagcaguaacauucugcuuugccucaggucaaaacauaacagaggaauuuuaccaauccacaugcucugcuguaagcaaaggauaccucggagcauuaagaacuggaugguacaccucaguaauaacuauagaacuaucaaacauaaaagaaauaaaauguaauggcacagacgcaaaagugaaauuaaucaaacaagaacucgauaaauacaaaaaugccguaaccgaucuccaacuuuuaaugcaaagcacacccgcaacagguuccgggucagcaauagcaagcggaguugcaguaugcaaaguacuacacuuagaaggagaaguaaauaaaaucaaaucagccuuacuaucaacaaauaaagcaguuguaucacucucaggaugcggaguauccguacuaacauuuaaaguacuagaucuaaaaaacuacauagauaaacaacucuuaccaauacuaaauaaacaaucauguuccauacccaacauagaaaccguuaucgaauuucaacaaaaaaacaacagauuacuagaaaucacacgagaauuuucaguaaaugcuggagucacaacaccaguuaguacauacaugcucaccaauucagaacuacuaaguuuaauuaacgauaugccaauaacaaacgaccaaaaaaaacuaaugucaaauaacguacaaauaguaagacaacaaucauacucaaucaugugcauaauaaaagaagaaguacuagccuauguaguccaauuaccacucuacggcguaaucgacaccccaugcuggaaauuacacacaagcccauuaugcaccaccaacacaaaagaagguucaaacauuugcuuaaccagaaccgaucgaggaugguacugcgauaacgcaggaucugucuccuuuuucccacaagccgaaacaugcaaaguucaaucaaaccgaguuuucugugacacuaugaacucacucacacuuccaagcgaaguaaaccuaugcaacguagauauauuuaacccuaaauacgacugcaaaauaaugacaagcaaaacagacguuaguucaucaguaauuacaagucuaggcgcaauagugucaugcuacggaaaaacaaaaugcaccgcauccaauaaaugccgaggaaucauuaaaacauucucaaacggaugcgacuacgucagcaauaaaggaguagacacuguuucuguaggaaacacccuauacuauguaaacaaacaagaaggucaaucacuauacguaaagggagaaccaauuauaaauuuuuacgaccccuuaguauuuccaagugaugaauuugacgcaucuauaagucaaguuaacgaaaaaauuaaccaaucacuugcauuuauaagaaaaucagacgaacuacuccauaauguaaacgcagguaaaucaacaacaaacaucaugaucacaaccauaauaauaguaauaauuguaauauuacuaucacuaauagcaguaggauuacuacucuacugcaaagcuagaucuaccccggucacacucucaaaagaccaauuaucuggaauaaacaauauagcauucagcaacuaaggacuaguguccaccugucccuccugggcugcuggauugucucguuuuccugccaaauaaacaggaucagcgcuuuacagaucuaaaaaaaaaaaaaaaaaaaaaaaaaaaaaaaaaaaaaaaaaaaaaaaaaaaaaaaaaaaaaaaaugcaucccccccccccccccccccccccccccccccaaaggcucuuuucagagccaccagaauu

SEQ ID NO: 7732 - RNA, 1892 nt, Artificial Sequence
  mRNA product Design e-3 comprising derived and/or modified sequence from HRSV(A2)__F_DSCav1_mut8 (opt11)
gggagacuuucccauucuguagcagaauuugguguugccuguggucuuggucccgcggagaagcuuaccauggaacuccucauccuuaaagccaacgccauaaccaccauccucaccgccgucaccuucugcuucgcuucuggccaaaacauaaccgaagaguucuaccaauccacgugcucugccgugucaaaaggcuaccucggagcccuccgcacagggugguacacuuccgucaucaccaucgaacucucuaacaucaaagaaaucaagugcaacggcacagacgcgaaagucaagcucaucaaacaagaacuagacaaauacaaaaacgccguaacagaccuccaacuccuaaugcaguccacaccagccacaggcuccggcagcgccaucgccuccggcgucgcugucugcaaaguccuacaccucgaaggcgaagucaacaaaaucaagucagcccuccuuagcaccaacaaagcagucgucucuuuaagcgggugcggagucucuguccuaaccuuuaaaguacucgaccucaaaaacuacaucgacaaacaacuacuaccaauacuaaacaaacagagcugcuccauucccaacaucgaaaccguuaucgaguuccaacaaaagaacaaccgccuccucgaaaucacccgcgaguucuccgucaacgcaggcgucaccaccccagucuccaccuauaugcuaaccaacagcgaacuccucagccucaucaaugacaugccaaucaccaacgaccaaaagaaacucauguccaacaacguacagauaguccgccagcaguccuacagcaucaugugcaucaucaaagaagaagugcucgccuacgugguacaacucccucucuacggagucauugauacacccugcuggaaacuccacacaagcccccucugcacuacaaacaccaaagaaggcucuaacauaugccucacccgcacagaccgugguugguacugcgacaacgccggcuccguauccuucuuuccacaagcugaaaccugcaaaguucaaucaaaccgagucuucugcgacaccaugaacucccucacauugcccagcgaagucaaccucugcaacgucgacaucuucaaccccaaguacgacugcaaaaucaugaccuccaaaaccgacgucagcuccagcgugaucacaagccuaggcgcgaucgucagcugcuacggcaaaaccaaaugcacagccuccaacaaaugccgcggaaucauaaaaacauucaguaacggcugcgacuacguguccaauaaaggagucgacaccguauccgucggaaacacccucuacuacgucaacaaacaagaaggacaaucccucuaugucaaaggcgaacccauuaucaacuucuacgacccccuaguuuuccccuccgacgaguucgacgcaagcauuucccaagucaacgaaaagaucaaucaaucccucgccuucauacgcaaaagcgacgaacuacuacacaacguaaacgccggcaaaagcaccaccaacaucaugaucacaacaaucaucaucgucaucaucgucauccuacucucacucaucgccguuggccuacuacucuacugcaaagcccgcuccacacccgucacccucucaaaagaccaacucuccggcaucaacaacaucgcauucagcaacugaggacuaguguccaccugucccuccugggcugcuggauugucucguuuuccugccaaauaaacaggaucagcgcuuuacagaucuaaaaaaaaaaaaaaaaaaaaaaaaaaaaaaaaaaaaaaaaaaaaaaaaaaaaaaaaaaaaaaaaugcaucccccccccccccccccccccccccccccccaaaggcucuuuucagagccaccagaauu

SEQ ID NO: 7733 - RNA, 1946 nt, Artificial Sequence
  mRNA product Design e-4 comprising derived and/or modified sequence from HRSV(A2)__F_DSCav1_mut8 (opt1)
gggagacuccugucgggcggaaguaggaggaguagaguuuaaaaacaguacucuuuuuccgguucgggacguaguugaagcaacgacaagccggauaaccgcucuugagacaggaagcuuaccauggagcugcucauccugaaggccaacgccaucaccaccauccugacggcggugaccuucugcuucgccagcggccagaacaucaccgaggaguucuaccaguccacgugcagcgccgucuccaagggguaccucggcgcccugcggaccggcugguacaccuccgugaucaccaucgagcugagcaacaucaaggagaucaagugcaacgggaccgacgccaaggugaagcucaucaagcaggagcuggacaaguacaagaacgcggucacggaccugcagcuccugaugcaguccaccccggcaaccggcuccggcuccgccaucgcgagcggcgucgccgugugcaaggugcugcaccucgagggggaggucaacaagaucaagagcgcccugcuguccaccaacaaggccguggugagccucuccggcugcggcgucagcgugcugaccuucaaggugcuggaccucaagaacuacaucgacaagcagcugcugcccauccugaacaagcagagcugcuccauccccaacaucgagacggugaucgaguuccagcagaagaacaaccggcuccuggagaucacccgcgaguucagcgugaacgccggggucaccacccccguguccacguacaugcugaccaacagcgagcuccugucccugaucaacgacaugccgaucaccaacgaccagaagaagcucaugagcaacaacgugcagaucguccggcagcaguccuacagcaucaugugcaucaucaaggaggaggugcuggcguacgugguccagcugccccucuacggcgugaucgacacccccugcuggaagcugcacacgagcccccugugcaccaccaacaccaaggagggguccaacaucugccucacgcgcaccgaccggggcugguacugcgacaacgccggcagcgucuccuucuucccgcaggccgagaccugcaaggugcagagcaaccgcguguucugcgacaccaugaacucccugacgcugcccagcgagguaaaccucugcaacgucgacaucuucaaccccaaguacgacugcaagaucaugaccuccaagaccgacgugagcuccagcgugaucaccucccugggggccaucgucagcugcuacggcaagacgaagugcaccgccagcaacaagugccgggggaucaucaagaccuucuccaacggcugcgacuacgugagcaacaagggcguggacaccguguccgucgggaacacccuguacuacgugaacaagcaggagggccagagccucuacgugaagggggagcccaucaucaacuucuacgacccgcuggucuuccccuccgacgaguucgacgcgagcaucucccaggugaacgagaagaucaaccagagccuggccuucauccgcaaguccgacgagcugcuccacaacgugaacgccggcaagagcacgaccaacaucaugaucaccaccaucaucaucgucaucaucgugauccugcugucccucaucgccguggggcugcugcucuacugcaaggcccggagcacgcccgucacccuguccaaggaccagcugagcggcaucaacaacaucgcguucuccaacugaggacuaguguccaccugucccuccugggcugcuggauugucucguuuuccugccaaauaaacaggaucagcgcuuuacagaucuaaaaaaaaaaaaaaaaaaaaaaaaaaaaaaaaaaaaaaaaaaaaaaaaaaaaaaaaaaaaaaaaugcaucccccccccccccccccccccccccccccccaaaggcucuuuucagagccaccagaauu

SEQ ID NO: 7734 - RNA, 1946 nt, Artificial Sequence
  mRNA product Design e-4 comprising derived and/or modified sequence from HRSV(A2)__F_DSCav1_mut8 (opt1)
gggagacuccugucgggcggaaguaggaggaguagaguuuaaaaacaguacucuuuuuccgguucgggacguaguugaagcaacgacaagccggauaaccgcucuugagacaggaagcuuaccauggagcugcucauccugaaggccaacgccaucaccaccauccugacggcggugaccuucugcuucgccagcggccagaacaucaccgaggaguucuaccaguccacgugcagcgccgucuccaagggguaccucggcgcccugcgcaccgggugguacaccagcgugaucaccaucgagcuguccaacaucaaggagaucaagugcaacggcaccgacgccaaggugaagcucaucaagcaggagcuggacaaguacaagaacgcggucacggaccugcagcuccugaugcagagcacccccgccaccggguccggcagcgccaucgccuccggcguggcggugugcaagguccugcaccucgagggggaggugaacaagaucaagagcgcccugcuguccaccaacaaggccguggucagccucuccggcugcggggugagcgugcugacguucaagguccuggaccucaagaacuacaucgacaagcagcugcugccgauccucaacaagcaguccugcagcauccccaacaucgagaccgugaucgaguuccagcagaagaacaaccggcugcuggagaucacccgcgaguucuccgugaacgccggcgucaccacgcccgugagcaccuacaugcucaccaacuccgagcugcugagccucaucaacgacaugcccaucaccaacgaccagaagaagcugaugagcaacaacgugcagaucguccggcagcaguccuacagcaucaugugcaucaucaaggaggaggugcuggccuacgugguccagcucccgcuguacggggugaucgacacgcccugcuggaagcugcacaccagcccccucugcaccaccaacacgaaggagggcuccaacaucugccugacccgcaccgaccggggcugguacugcgacaacgcgggguccgugagcuucuucccccaggccgagaccugcaagguccaguccaaccgcguguucugcgacacgaugaacagccugacccucccguccgaggucaaccugugcaacguggacaucuucaaccccaaguacgacugcaagaucaugaccagcaagaccgacguguccagcuccgucaucacgagccugggcgccaucguguccugcuacgggaagaccaagugcaccgccagcaacaagugccggggcaucaucaagaccuucuccaacggcugcgacuacgugagcaacaagggggucgacacgguguccgugggcaacacccucuacuacgucaacaagcaggaggggcagagccuguacgugaagggcgagcccaucaucaacuucuacgacccccugguguucccgagcgacgaguucgacgccuccaucagccaggucaacgagaagaucaaccagucccucgcguucauccgcaagagcgacgagcugcugcacaacgugaacgccgggaaguccaccaccaacaucaugaucaccacgaucaucaucgugaucaucgucauccuccugagccugaucgccgugggccuccugcuguacugcaaggcccgguccacccccgugacccugagcaaggaccagcucuccggcaucaacaacaucgccuucagcaacugaggacuaguguccaccugucccuccugggcugcuggauugucucguuuuccugccaaauaaacaggaucagcgcuuuacagaucuaaaaaaaaaaaaaaaaaaaaaaaaaaaaaaaaaaaaaaaaaaaaaaaaaaaaaaaaaaaaaaaaugcaucccccccccccccccccccccccccccccccaaaggcucuuuucagagccaccagaauu

SEQ ID NO: 7735 - RNA, 1946 nt, Artificial Sequence
  mRNA product Design e-4 comprising derived and/or modified sequence from HRSV(A2)__F_DSCav1_mut8 (opt2)
gggagacuccugucgggcggaaguaggaggaguagaguuuaaaaacaguacucuuuuuccgguucgggacguaguugaagcaacgacaagccggauaaccgcucuugagacaggaagcuuaccauggagcuccucauccucaaggccaacgccaucaccaccauccucaccgccgucaccuucugcuucgccuccggccagaacaucaccgaggaguucuaccaguccaccugcuccgccgucuccaagggcuaccucggcgcccuccgcaccggcugguacaccuccgucaucaccaucgagcucuccaacaucaaggagaucaagugcaacggcaccgacgccaaggucaagcucaucaagcaggagcucgacaaguacaagaacgccgucaccgaccuccagcuccucaugcaguccacccccgccaccggcuccggcuccgccaucgccuccggcgucgccgucugcaagguccuccaccucgagggcgaggucaacaagaucaaguccgcccuccucuccaccaacaaggccgucgucucccucuccggcugcggcgucuccguccucaccuucaagguccucgaccucaagaacuacaucgacaagcagcuccuccccauccucaacaagcaguccugcuccauccccaacaucgagaccgucaucgaguuccagcagaagaacaaccgccuccucgagaucacccgcgaguucuccgucaacgccggcgucaccacccccgucuccaccuacaugcucaccaacuccgagcuccucucccucaucaacgacaugcccaucaccaacgaccagaagaagcucauguccaacaacguccagaucguccgccagcaguccuacuccaucaugugcaucaucaaggaggagguccucgccuacgucguccagcucccccucuacggcgucaucgacacccccugcuggaagcuccacaccuccccccucugcaccaccaacaccaaggagggcuccaacaucugccucacccgcaccgaccgcggcugguacugcgacaacgccggcuccgucuccuucuucccccaggccgagaccugcaagguccaguccaaccgcgucuucugcgacaccaugaacucccucacccuccccuccgaggucaaccucugcaacgucgacaucuucaaccccaaguacgacugcaagaucaugaccuccaagaccgacgucuccuccuccgucaucaccucccucggcgccaucgucuccugcuacggcaagaccaagugcaccgccuccaacaagugccgcggcaucaucaagaccuucuccaacggcugcgacuacgucuccaacaagggcgucgacaccgucuccgucggcaacacccucuacuacgucaacaagcaggagggccagucccucuacgucaagggcgagcccaucaucaacuucuacgacccccucgucuuccccuccgacgaguucgacgccuccaucucccaggucaacgagaagaucaaccagucccucgccuucauccgcaaguccgacgagcuccuccacaacgucaacgccggcaaguccaccaccaacaucaugaucaccaccaucaucaucgucaucaucgucauccuccucucccucaucgccgucggccuccuccucuacugcaaggcccgcuccacccccgucacccucuccaaggaccagcucuccggcaucaacaacaucgccuucuccaacugaggacuaguguccaccugucccuccugggcugcuggauugucucguuuuccugccaaauaaacaggaucagcgcuuuacagaucuaaaaaaaaaaaaaaaaaaaaaaaaaaaaaaaaaaaaaaaaaaaaaaaaaaaaaaaaaaaaaaaaugcaucccccccccccccccccccccccccccccccaaaggcucuuuucagagccaccagaauu

SEQ ID NO: 7736 - RNA, 1946 nt, Artificial Sequence
  mRNA product Design e-4 comprising derived and/or modified sequence from HRSV(A2)__F_DSCav1_mut8 (opt3)
gggagacuccugucgggcggaaguaggaggaguagaguuuaaaaacaguacucuuuuuccgguucgggacguaguugaagcaacgacaagccggauaaccgcucuugagacaggaagcuuaccauggagcugcucauccuuaaggccaacgcuauuaccacaauacugacugcagugacguucugcuuugccagcggccagaauaucaccgaagaguucuaccaauccacauguucugcggucucaaaaggguauuugggagcuuuaagaacugguugguacaccaguguuauuacaaucgaacugagcaacauuaaggagaucaaaugcaauggcaccgacgccaaggugaaacuaauaaagcaggaacucgauaaguauaaaaacgcaguaacugaccugcagcuucugaugcaguccacacccgccaccgggucuggaucggcuaucgcaucaggcguggccgucuguaagguguugcaccucgagggugagguuaauaaaauuaagagcgcucugcugaguacgaacaaagccguggucucccucucugggugcggagugagcguauuaacuuuuaagguucuggaucuuaagaauuacaucgacaaacaauugcugccuauucuaaacaagcaguccuguucaaucccaaauauagaaaccgugauugaguuccagcagaaaaacaauaggcuccuggaaaucacacgggaguuuagugucaacgcgggcgugacuaccccggugagcacauauaugcuuaccaauucugagcuguugucccucauuaacgauaugcccaucacgaaugaccaaaagaaacugaugucaaacaacguccagaucguucgccagcagagcuacaguauuaugugcauaaucaaggaagagguguuagcauauguagugcaacugccucucuacggcgucauugauacuccauguuggaaacuucauacaucuccccugugcaccacuaauacaaaggaaggguccaacaucuguuugacccgaacggaccguggaugguacugcgauaaugccgguagcgugucguucuuuccucaggcugagaccuguaagguucagucuaacagaguguucugcgacacaaugaacucccuaacucugccaucagaagucaaucucugcaauguggauauauuuaaccccaaauaugacuguaagauuaugaccaguaaaacagauguaagcuccucuguuaucacuagccugggcgccaucgugucaugcuacgggaagaccaaauguacagcaaguaauaagugcaggggaauuaucaagaccuucuccaacggcugugacuaugucagcaauaaagguguggacacugucucuguggggaacacgcuuuacuauguuaauaagcaagagggacagucacuguacgugaaaggcgagccuauuauaaacuuuuaugauccauugguauucccgagugacgaauuugaugcuagcaucucccaggucaaugagaagauuaaccagucucucgccuucauccggaaaucggacgaacuguuacacaacgugaaugcgggcaagagcacaaccaacaucaugauuacuaccauaaucauuguuaucauugugauccugcuaucccucauagccgucgggcugcuuuuguacugcaaggcacgcucaacacccgugacccugaguaaagaucaacucucuggaaucaauaacauugcuuucagcaauugaggacuaguguccaccugucccuccugggcugcuggauugucucguuuuccugccaaauaaacaggaucagcgcuuuacagaucuaaaaaaaaaaaaaaaaaaaaaaaaaaaaaaaaaaaaaaaaaaaaaaaaaaaaaaaaaaaaaaaaugcaucccccccccccccccccccccccccccccccaaaggcucuuuucagagccaccagaauu

SEQ ID NO: 7737 - RNA, 1946 nt, Artificial Sequence
  mRNA product Design e-4 comprising derived and/or modified sequence from HRSV(A2)__F_DSCav1_mut8 (opt4)
gggagacuccugucgggcggaaguaggaggaguagaguuuaaaaacaguacucuuuuuccgguucgggacguaguugaagcaacgacaagccggauaaccgcucuugagacaggaagcuuaccauggagcugcugauccugaaggccaacgccaucaccaccauccugaccgccgugaccuucugcuucgccagcggccagaacaucaccgaggaguucuaccagagcaccugcagcgccgugagcaagggcuaccugggcgcccugagaaccggcugguacaccagcgugaucaccaucgagcugagcaacaucaaggagaucaagugcaacggcaccgacgccaaggugaagcugaucaagcaggagcuggacaaguacaagaacgccgugaccgaccugcagcugcugaugcagagcacccccgccaccggcagcggcagcgccaucgccagcggcguggccgugugcaaggugcugcaccuggagggcgaggugaacaagaucaagagcgcccugcugagcaccaacaaggccguggugagccugagcggcugcggcgugagcgugcugaccuucaaggugcuggaccugaagaacuacaucgacaagcagcugcugcccauccugaacaagcagagcugcagcauccccaacaucgagaccgugaucgaguuccagcagaagaacaacagacugcuggagaucaccagagaguucagcgugaacgccggcgugaccacccccgugagcaccuacaugcugaccaacagcgagcugcugagccugaucaacgacaugcccaucaccaacgaccagaagaagcugaugagcaacaacgugcagaucgugagacagcagagcuacagcaucaugugcaucaucaaggaggaggugcuggccuacguggugcagcugccccuguacggcgugaucgacacccccugcuggaagcugcacaccagcccccugugcaccaccaacaccaaggagggcagcaacaucugccugaccagaaccgacagaggcugguacugcgacaacgccggcagcgugagcuucuucccccaggccgagaccugcaaggugcagagcaacagaguguucugcgacaccaugaacagccugacccugcccagcgaggugaaccugugcaacguggacaucuucaaccccaaguacgacugcaagaucaugaccagcaagaccgacgugagcagcagcgugaucaccagccugggcgccaucgugagcugcuacggcaagaccaagugcaccgccagcaacaagugcagaggcaucaucaagaccuucagcaacggcugcgacuacgugagcaacaagggcguggacaccgugagcgugggcaacacccuguacuacgugaacaagcaggagggccagagccuguacgugaagggcgagcccaucaucaacuucuacgacccccugguguuccccagcgacgaguucgacgccagcaucagccaggugaacgagaagaucaaccagagccuggccuucaucagaaagagcgacgagcugcugcacaacgugaacgccggcaagagcaccaccaacaucaugaucaccaccaucaucaucgugaucaucgugauccugcugagccugaucgccgugggccugcugcuguacugcaaggccagaagcacccccgugacccugagcaaggaccagcugagcggcaucaacaacaucgccuucagcaacugaggacuaguguccaccugucccuccugggcugcuggauugucucguuuuccugccaaauaaacaggaucagcgcuuuacagaucuaaaaaaaaaaaaaaaaaaaaaaaaaaaaaaaaaaaaaaaaaaaaaaaaaaaaaaaaaaaaaaaaugcaucccccccccccccccccccccccccccccccaaaggcucuuuucagagccaccagaauu

SEQ ID NO: 7738 - RNA, 1946 nt, Artificial Sequence
  mRNA product Design e-4 comprising derived and/or modified sequence from HRSV(A2)__F_DSCav1_mut8 (opt5)
gggagacuccugucgggcggaaguaggaggaguagaguuuaaaaacaguacucuuuuuccgguucgggacguaguugaagcaacgacaagccggauaaccgcucuugagacaggaagcuuaccauggagcugcucauccugaaggccaacgcuauuaccacaauccuuacggccgugaccuucugcuuugcgagcggccagaauauuacagaagaguucuaccaauccaccuguucugcugucagcaaaggguaucugggagcccucagaacaggcugguacaccuccguuaucacaauugaacugucuaacaucaaggagaucaaaugcaaugggaccgacgccaaggugaaacuuauuaagcaggaacuggauaaguauaaaaacgcugugacggaccuccagcugcugaugcagagcacccccgccacaggauccggcucugcuaucgccagcggggucgcgguguguaagguucuccaccuggagggagaggugaauaaaauuaaguccgcccuucugagcaccaacaaagcugucgugucucucuccggcugcggcguuagcgugcugacauuuaagguccuugaucugaagaauuacaucgacaaacaacuccugccuauucugaacaagcagucuuguuccaucccgaauauugaaaccgugaucgaguuccagcagaaaaacaaucggcuccuggaaaucacgcgcgaguuuagcgugaacgccggggucacaacccccguuucuacauauaugcuuaccaauuccgagcugcucagccugauuaacgauaugccuaucaccaaugaccaaaagaaacuuauguccaacaacgugcagauugugagacagcagucuuacagcaucaugugcauuaucaaggaagagguccuggcuuaugugguucaacucccccuguacggagugaucgauacaccuuguuggaaacugcauacgagcccccucugcaccacaaauaccaaggaaggcagcaacauuugucugacacggaccgaccgcgggugguacugcgauaaugccggaucugucuccuucuuuccucaggcggagacguguaaggugcagagcaacagaguuuucugcgacacaaugaacucucuuacccugccgagcgaagugaaucucugcaaugucgauaucuuuaaccccaaauaugacuguaagauuaugaccuccaaaacagaugugucuagcuccgucaucaccagccugggcgccauugugucuugcuacgggaagacaaaauguacggcuuccaauaagugccggggaaucaucaagaccuucagcaacggcugugacuauguuucuaauaaaggcguggacacagucuccguggggaacacccuuuacuauguuaauaagcaagagggacagagccuguacgugaaaggcgagccuauuaucaacuuuuaugauccccucgucuucccuuccgacgaauuugaugccucuauuagccaggugaaugagaagaucaaccagucccuggcuuucauucgcaaaucugacgaacugcuccacaacgugaaugccgggaaguccacaaccaacaucaugauuacgaccaucaucauuguuaucauugucauccugcuuucccugauugccgugggacuccugcuguacugcaaggcuagaagcacacccgugacccuuucuaaagaucaacucuccggcaucaauaacaucgcguucagcaauugaggacuaguguccaccugucccuccugggcugcuggauugucucguuuuccugccaaauaaacaggaucagcgcuuuacagaucuaaaaaaaaaaaaaaaaaaaaaaaaaaaaaaaaaaaaaaaaaaaaaaaaaaaaaaaaaaaaaaaaugcaucccccccccccccccccccccccccccccccaaaggcucuuuucagagccaccagaauu

SEQ ID NO: 7739 - RNA, 1946 nt, Artificial Sequence
  mRNA product Design e-4 comprising derived and/or modified sequence from HRSV(A2)__F_DSCav1_mut8 (opt6)
gggagacuccugucgggcggaaguaggaggaguagaguuuaaaaacaguacucuuuuuccgguucgggacguaguugaagcaacgacaagccggauaaccgcucuugagacaggaagcuuaccauggaacuauuaauauuaaaagcaaacgcaaucacaacuauacuaacagcaguaacauucugcuuugccucaggucaaaacauaacagaggaauuuuaccaauccacaugcucugcuguaagcaaaggauaccucggagcauuaagaacuggaugguacaccucaguaauaacuauagaacuaucaaacauaaaagaaauaaaauguaauggcacagacgcaaaagugaaauuaaucaaacaagaacucgauaaauacaaaaaugccguaaccgaucuccaacuuuuaaugcaaagcacacccgcaacagguuccgggucagcaauagcaagcggaguugcaguaugcaaaguacuacacuuagaaggagaaguaaauaaaaucaaaucagccuuacuaucaacaaauaaagcaguuguaucacucucaggaugcggaguauccguacuaacauuuaaaguacuagaucuaaaaaacuacauagauaaacaacucuuaccaauacuaaauaaacaaucauguuccauacccaacauagaaaccguuaucgaauuucaacaaaaaaacaacagauuacuagaaaucacacgagaauuuucaguaaaugcuggagucacaacaccaguuaguacauacaugcucaccaauucagaacuacuaaguuuaauuaacgauaugccaauaacaaacgaccaaaaaaaacuaaugucaaauaacguacaaauaguaagacaacaaucauacucaaucaugugcauaauaaaagaagaaguacuagccuauguaguccaauuaccacucuacggcguaaucgacaccccaugcuggaaauuacacacaagcccauuaugcaccaccaacacaaaagaagguucaaacauuugcuuaaccagaaccgaucgaggaugguacugcgauaacgcaggaucugucuccuuuuucccacaagccgaaacaugcaaaguucaaucaaaccgaguuuucugugacacuaugaacucacucacacuuccaagcgaaguaaaccuaugcaacguagauauauuuaacccuaaauacgacugcaaaauaaugacaagcaaaacagacguuaguucaucaguaauuacaagucuaggcgcaauagugucaugcuacggaaaaacaaaaugcaccgcauccaauaaaugccgaggaaucauuaaaacauucucaaacggaugcgacuacgucagcaauaaaggaguagacacuguuucuguaggaaacacccuauacuauguaaacaaacaagaaggucaaucacuauacguaaagggagaaccaauuauaaauuuuuacgaccccuuaguauuuccaagugaugaauuugacgcaucuauaagucaaguuaacgaaaaaauuaaccaaucacuugcauuuauaagaaaaucagacgaacuacuccauaauguaaacgcagguaaaucaacaacaaacaucaugaucacaaccauaauaauaguaauaauuguaauauuacuaucacuaauagcaguaggauuacuacucuacugcaaagcuagaucuaccccggucacacucucaaaagaccaauuaucuggaauaaacaauauagcauucagcaacuaaggacuaguguccaccugucccuccugggcugcuggauugucucguuuuccugccaaauaaacaggaucagcgcuuuacagaucuaaaaaaaaaaaaaaaaaaaaaaaaaaaaaaaaaaaaaaaaaaaaaaaaaaaaaaaaaaaaaaaaugcaucccccccccccccccccccccccccccccccaaaggcucuuuucagagccaccagaauu

SEQ ID NO: 7740 - RNA, 1946 nt, Artificial Sequence
  mRNA product Design e-4 comprising derived and/or modified sequence from HRSV(A2)__F_DSCav1_mut8 (opt11)
gggagacuccugucgggcggaaguaggaggaguagaguuuaaaaacaguacucuuuuuccgguucgggacguaguugaagcaacgacaagccggauaaccgcucuugagacaggaagcuuaccauggaacuccucauccuuaaagccaacgccauaaccaccauccucaccgccgucaccuucugcuucgcuucuggccaaaacauaaccgaagaguucuaccaauccacgugcucugccgugucaaaaggcuaccucggagcccuccgcacagggugguacacuuccgucaucaccaucgaacucucuaacaucaaagaaaucaagugcaacggcacagacgcgaaagucaagcucaucaaacaagaacuagacaaauacaaaaacgccguaacagaccuccaacuccuaaugcaguccacaccagccacaggcuccggcagcgccaucgccuccggcgucgcugucugcaaaguccuacaccucgaaggcgaagucaacaaaaucaagucagcccuccuuagcaccaacaaagcagucgucucuuuaagcgggugcggagucucuguccuaaccuuuaaaguacucgaccucaaaaacuacaucgacaaacaacuacuaccaauacuaaacaaacagagcugcuccauucccaacaucgaaaccguuaucgaguuccaacaaaagaacaaccgccuccucgaaaucacccgcgaguucuccgucaacgcaggcgucaccaccccagucuccaccuauaugcuaaccaacagcgaacuccucagccucaucaaugacaugccaaucaccaacgaccaaaagaaacucauguccaacaacguacagauaguccgccagcaguccuacagcaucaugugcaucaucaaagaagaagugcucgccuacgugguacaacucccucucuacggagucauugauacacccugcuggaaacuccacacaagcccccucugcacuacaaacaccaaagaaggcucuaacauaugccucacccgcacagaccgugguugguacugcgacaacgccggcuccguauccuucuuuccacaagcugaaaccugcaaaguucaaucaaaccgagucuucugcgacaccaugaacucccucacauugcccagcgaagucaaccucugcaacgucgacaucuucaaccccaaguacgacugcaaaaucaugaccuccaaaaccgacgucagcuccagcgugaucacaagccuaggcgcgaucgucagcugcuacggcaaaaccaaaugcacagccuccaacaaaugccgcggaaucauaaaaacauucaguaacggcugcgacuacguguccaauaaaggagucgacaccguauccgucggaaacacccucuacuacgucaacaaacaagaaggacaaucccucuaugucaaaggcgaacccauuaucaacuucuacgacccccuaguuuuccccuccgacgaguucgacgcaagcauuucccaagucaacgaaaagaucaaucaaucccucgccuucauacgcaaaagcgacgaacuacuacacaacguaaacgccggcaaaagcaccaccaacaucaugaucacaacaaucaucaucgucaucaucgucauccuacucucacucaucgccguuggccuacuacucuacugcaaagcccgcuccacacccgucacccucucaaaagaccaacucuccggcaucaacaacaucgcauucagcaacugaggacuaguguccaccugucccuccugggcugcuggauugucucguuuuccugccaaauaaacaggaucagcgcuuuacagaucuaaaaaaaaaaaaaaaaaaaaaaaaaaaaaaaaaaaaaaaaaaaaaaaaaaaaaaaaaaaaaaaaugcaucccccccccccccccccccccccccccccccaaaggcucuuuucagagccaccagaauu

SEQ ID NO: 7741 - RNA, 1913 nt, Artificial Sequence
  mRNA product Design e-5 comprising derived and/or modified sequence from HRSV(A2)__F_DSCav1_mut8 (opt1)
gggagagcggcucggccauuuugucccagucaguccggaggcugcggcugcagaaguaccgccugcggaguaacugcaaagaagcuuaccauggagcugcucauccugaaggccaacgccaucaccaccauccugacggcggugaccuucugcuucgccagcggccagaacaucaccgaggaguucuaccaguccacgugcagcgccgucuccaagggguaccucggcgcccugcggaccggcugguacaccuccgugaucaccaucgagcugagcaacaucaaggagaucaagugcaacgggaccgacgccaaggugaagcucaucaagcaggagcuggacaaguacaagaacgcggucacggaccugcagcuccugaugcaguccaccccggcaaccggcuccggcuccgccaucgcgagcggcgucgccgugugcaaggugcugcaccucgagggggaggucaacaagaucaagagcgcccugcuguccaccaacaaggccguggugagccucuccggcugcggcgucagcgugcugaccuucaaggugcuggaccucaagaacuacaucgacaagcagcugcugcccauccugaacaagcagagcugcuccauccccaacaucgagacggugaucgaguuccagcagaagaacaaccggcuccuggagaucacccgcgaguucagcgugaacgccggggucaccacccccguguccacguacaugcugaccaacagcgagcuccugucccugaucaacgacaugccgaucaccaacgaccagaagaagcucaugagcaacaacgugcagaucguccggcagcaguccuacagcaucaugugcaucaucaaggaggaggugcuggcguacgugguccagcugccccucuacggcgugaucgacacccccugcuggaagcugcacacgagcccccugugcaccaccaacaccaaggagggguccaacaucugccucacgcgcaccgaccggggcugguacugcgacaacgccggcagcgucuccuucuucccgcaggccgagaccugcaaggugcagagcaaccgcguguucugcgacaccaugaacucccugacgcugcccagcgagguaaaccucugcaacgucgacaucuucaaccccaaguacgacugcaagaucaugaccuccaagaccgacgugagcuccagcgugaucaccucccugggggccaucgucagcugcuacggcaagacgaagugcaccgccagcaacaagugccgggggaucaucaagaccuucuccaacggcugcgacuacgugagcaacaagggcguggacaccguguccgucgggaacacccuguacuacgugaacaagcaggagggccagagccucuacgugaagggggagcccaucaucaacuucuacgacccgcuggucuuccccuccgacgaguucgacgcgagcaucucccaggugaacgagaagaucaaccagagccuggccuucauccgcaaguccgacgagcugcuccacaacgugaacgccggcaagagcacgaccaacaucaugaucaccaccaucaucaucgucaucaucgugauccugcugucccucaucgccguggggcugcugcucuacugcaaggcccggagcacgcccgucacccuguccaaggaccagcugagcggcaucaacaacaucgcguucuccaacugaggacuaguguccaccugucccuccugggcugcuggauugucucguuuuccugccaaauaaacaggaucagcgcuuuacagaucuaaaaaaaaaaaaaaaaaaaaaaaaaaaaaaaaaaaaaaaaaaaaaaaaaaaaaaaaaaaaaaaaugcaucccccccccccccccccccccccccccccccaaaggcucuuuucagagccaccagaauu

SEQ ID NO: 7742 - RNA, 1913 nt, Artificial Sequence
  mRNA product Design e-5 comprising derived and/or modified sequence from HRSV(A2)__F_DSCav1_mut8 (opt1)
gggagagcggcucggccauuuugucccagucaguccggaggcugcggcugcagaaguaccgccugcggaguaacugcaaagaagcuuaccauggagcugcucauccugaaggccaacgccaucaccaccauccugacggcggugaccuucugcuucgccagcggccagaacaucaccgaggaguucuaccaguccacgugcagcgccgucuccaagggguaccucggcgcccugcgcaccgggugguacaccagcgugaucaccaucgagcuguccaacaucaaggagaucaagugcaacggcaccgacgccaaggugaagcucaucaagcaggagcuggacaaguacaagaacgcggucacggaccugcagcuccugaugcagagcacccccgccaccggguccggcagcgccaucgccuccggcguggcggugugcaagguccugcaccucgagggggaggugaacaagaucaagagcgcccugcuguccaccaacaaggccguggucagccucuccggcugcggggugagcgugcugacguucaagguccuggaccucaagaacuacaucgacaagcagcugcugccgauccucaacaagcaguccugcagcauccccaacaucgagaccgugaucgaguuccagcagaagaacaaccggcugcuggagaucacccgcgaguucuccgugaacgccggcgucaccacgcccgugagcaccuacaugcucaccaacuccgagcugcugagccucaucaacgacaugcccaucaccaacgaccagaagaagcugaugagcaacaacgugcagaucguccggcagcaguccuacagcaucaugugcaucaucaaggaggaggugcuggccuacgugguccagcucccgcuguacggggugaucgacacgcccugcuggaagcugcacaccagcccccucugcaccaccaacacgaaggagggcuccaacaucugccugacccgcaccgaccggggcugguacugcgacaacgcgggguccgugagcuucuucccccaggccgagaccugcaagguccaguccaaccgcguguucugcgacacgaugaacagccugacccucccguccgaggucaaccugugcaacguggacaucuucaaccccaaguacgacugcaagaucaugaccagcaagaccgacguguccagcuccgucaucacgagccugggcgccaucguguccugcuacgggaagaccaagugcaccgccagcaacaagugccggggcaucaucaagaccuucuccaacggcugcgacuacgugagcaacaagggggucgacacgguguccgugggcaacacccucuacuacgucaacaagcaggaggggcagagccuguacgugaagggcgagcccaucaucaacuucuacgacccccugguguucccgagcgacgaguucgacgccuccaucagccaggucaacgagaagaucaaccagucccucgcguucauccgcaagagcgacgagcugcugcacaacgugaacgccgggaaguccaccaccaacaucaugaucaccacgaucaucaucgugaucaucgucauccuccugagccugaucgccgugggccuccugcuguacugcaaggcccgguccacccccgugacccugagcaaggaccagcucuccggcaucaacaacaucgccuucagcaacugaggacuaguguccaccugucccuccugggcugcuggauugucucguuuuccugccaaauaaacaggaucagcgcuuuacagaucuaaaaaaaaaaaaaaaaaaaaaaaaaaaaaaaaaaaaaaaaaaaaaaaaaaaaaaaaaaaaaaaaugcaucccccccccccccccccccccccccccccccaaaggcucuuuucagagccaccagaauu

SEQ ID NO: 7743 - RNA, 1913 nt, Artificial Sequence
  mRNA product Design e-5 comprising derived and/or modified sequence from HRSV(A2)__F_DSCav1_mut8 (opt2)
gggagagcggcucggccauuuugucccagucaguccggaggcugcggcugcagaaguaccgccugcggaguaacugcaaagaagcuuaccauggagcuccucauccucaaggccaacgccaucaccaccauccucaccgccgucaccuucugcuucgccuccggccagaacaucaccgaggaguucuaccaguccaccugcuccgccgucuccaagggcuaccucggcgcccuccgcaccggcugguacaccuccgucaucaccaucgagcucuccaacaucaaggagaucaagugcaacggcaccgacgccaaggucaagcucaucaagcaggagcucgacaaguacaagaacgccgucaccgaccuccagcuccucaugcaguccacccccgccaccggcuccggcuccgccaucgccuccggcgucgccgucugcaagguccuccaccucgagggcgaggucaacaagaucaaguccgcccuccucuccaccaacaaggccgucgucucccucuccggcugcggcgucuccguccucaccuucaagguccucgaccucaagaacuacaucgacaagcagcuccuccccauccucaacaagcaguccugcuccauccccaacaucgagaccgucaucgaguuccagcagaagaacaaccgccuccucgagaucacccgcgaguucuccgucaacgccggcgucaccacccccgucuccaccuacaugcucaccaacuccgagcuccucucccucaucaacgacaugcccaucaccaacgaccagaagaagcucauguccaacaacguccagaucguccgccagcaguccuacuccaucaugugcaucaucaaggaggagguccucgccuacgucguccagcucccccucuacggcgucaucgacacccccugcuggaagcuccacaccuccccccucugcaccaccaacaccaaggagggcuccaacaucugccucacccgcaccgaccgcggcugguacugcgacaacgccggcuccgucuccuucuucccccaggccgagaccugcaagguccaguccaaccgcgucuucugcgacaccaugaacucccucacccuccccuccgaggucaaccucugcaacgucgacaucuucaaccccaaguacgacugcaagaucaugaccuccaagaccgacgucuccuccuccgucaucaccucccucggcgccaucgucuccugcuacggcaagaccaagugcaccgccuccaacaagugccgcggcaucaucaagaccuucuccaacggcugcgacuacgucuccaacaagggcgucgacaccgucuccgucggcaacacccucuacuacgucaacaagcaggagggccagucccucuacgucaagggcgagcccaucaucaacuucuacgacccccucgucuuccccuccgacgaguucgacgccuccaucucccaggucaacgagaagaucaaccagucccucgccuucauccgcaaguccgacgagcuccuccacaacgucaacgccggcaaguccaccaccaacaucaugaucaccaccaucaucaucgucaucaucgucauccuccucucccucaucgccgucggccuccuccucuacugcaaggcccgcuccacccccgucacccucuccaaggaccagcucuccggcaucaacaacaucgccuucuccaacugaggacuaguguccaccugucccuccugggcugcuggauugucucguuuuccugccaaauaaacaggaucagcgcuuuacagaucuaaaaaaaaaaaaaaaaaaaaaaaaaaaaaaaaaaaaaaaaaaaaaaaaaaaaaaaaaaaaaaaaugcaucccccccccccccccccccccccccccccccaaaggcucuuuucagagccaccagaauu

SEQ ID NO: 7744 - RNA, 1913 nt, Artificial Sequence
  mRNA product Design e-5 comprising derived and/or modified sequence from HRSV(A2)__F_DSCav1_mut8 (opt3)
gggagagcggcucggccauuuugucccagucaguccggaggcugcggcugcagaaguaccgccugcggaguaacugcaaagaagcuuaccauggagcugcucauccuuaaggccaacgcuauuaccacaauacugacugcagugacguucugcuuugccagcggccagaauaucaccgaagaguucuaccaauccacauguucugcggucucaaaaggguauuugggagcuuuaagaacugguugguacaccaguguuauuacaaucgaacugagcaacauuaaggagaucaaaugcaauggcaccgacgccaaggugaaacuaauaaagcaggaacucgauaaguauaaaaacgcaguaacugaccugcagcuucugaugcaguccacacccgccaccgggucuggaucggcuaucgcaucaggcguggccgucuguaagguguugcaccucgagggugagguuaauaaaauuaagagcgcucugcugaguacgaacaaagccguggucucccucucugggugcggagugagcguauuaacuuuuaagguucuggaucuuaagaauuacaucgacaaacaauugcugccuauucuaaacaagcaguccuguucaaucccaaauauagaaaccgugauugaguuccagcagaaaaacaauaggcuccuggaaaucacacgggaguuuagugucaacgcgggcgugacuaccccggugagcacauauaugcuuaccaauucugagcuguugucccucauuaacgauaugcccaucacgaaugaccaaaagaaacugaugucaaacaacguccagaucguucgccagcagagcuacaguauuaugugcauaaucaaggaagagguguuagcauauguagugcaacugccucucuacggcgucauugauacuccauguuggaaacuucauacaucuccccugugcaccacuaauacaaaggaaggguccaacaucuguuugacccgaacggaccguggaugguacugcgauaaugccgguagcgugucguucuuuccucaggcugagaccuguaagguucagucuaacagaguguucugcgacacaaugaacucccuaacucugccaucagaagucaaucucugcaauguggauauauuuaaccccaaauaugacuguaagauuaugaccaguaaaacagauguaagcuccucuguuaucacuagccugggcgccaucgugucaugcuacgggaagaccaaauguacagcaaguaauaagugcaggggaauuaucaagaccuucuccaacggcugugacuaugucagcaauaaagguguggacacugucucuguggggaacacgcuuuacuauguuaauaagcaagagggacagucacuguacgugaaaggcgagccuauuauaaacuuuuaugauccauugguauucccgagugacgaauuugaugcuagcaucucccaggucaaugagaagauuaaccagucucucgccuucauccggaaaucggacgaacuguuacacaacgugaaugcgggcaagagcacaaccaacaucaugauuacuaccauaaucauuguuaucauugugauccugcuaucccucauagccgucgggcugcuuuuguacugcaaggcacgcucaacacccgugacccugaguaaagaucaacucucuggaaucaauaacauugcuuucagcaauugaggacuaguguccaccugucccuccugggcugcuggauugucucguuuuccugccaaauaaacaggaucagcgcuuuacagaucuaaaaaaaaaaaaaaaaaaaaaaaaaaaaaaaaaaaaaaaaaaaaaaaaaaaaaaaaaaaaaaaaugcaucccccccccccccccccccccccccccccccaaaggcucuuuucagagccaccagaauu

SEQ ID NO: 7745 - RNA, 1913 nt, Artificial Sequence
  mRNA product Design e-5 comprising derived and/or modified sequence from HRSV(A2)__F_DSCav1_mut8 (opt4)
gggagagcggcucggccauuuugucccagucaguccggaggcugcggcugcagaaguaccgccugcggaguaacugcaaagaagcuuaccauggagcugcugauccugaaggccaacgccaucaccaccauccugaccgccgugaccuucugcuucgccagcggccagaacaucaccgaggaguucuaccagagcaccugcagcgccgugagcaagggcuaccugggcgcccugagaaccggcugguacaccagcgugaucaccaucgagcugagcaacaucaaggagaucaagugcaacggcaccgacgccaaggugaagcugaucaagcaggagcuggacaaguacaagaacgccgugaccgaccugcagcugcugaugcagagcacccccgccaccggcagcggcagcgccaucgccagcggcguggccgugugcaaggugcugcaccuggagggcgaggugaacaagaucaagagcgcccugcugagcaccaacaaggccguggugagccugagcggcugcggcgugagcgugcugaccuucaaggugcuggaccugaagaacuacaucgacaagcagcugcugcccauccugaacaagcagagcugcagcauccccaacaucgagaccgugaucgaguuccagcagaagaacaacagacugcuggagaucaccagagaguucagcgugaacgccggcgugaccacccccgugagcaccuacaugcugaccaacagcgagcugcugagccugaucaacgacaugcccaucaccaacgaccagaagaagcugaugagcaacaacgugcagaucgugagacagcagagcuacagcaucaugugcaucaucaaggaggaggugcuggccuacguggugcagcugccccuguacggcgugaucgacacccccugcuggaagcugcacaccagcccccugugcaccaccaacaccaaggagggcagcaacaucugccugaccagaaccgacagaggcugguacugcgacaacgccggcagcgugagcuucuucccccaggccgagaccugcaaggugcagagcaacagaguguucugcgacaccaugaacagccugacccugcccagcgaggugaaccugugcaacguggacaucuucaaccccaaguacgacugcaagaucaugaccagcaagaccgacgugagcagcagcgugaucaccagccugggcgccaucgugagcugcuacggcaagaccaagugcaccgccagcaacaagugcagaggcaucaucaagaccuucagcaacggcugcgacuacgugagcaacaagggcguggacaccgugagcgugggcaacacccuguacuacgugaacaagcaggagggccagagccuguacgugaagggcgagcccaucaucaacuucuacgacccccugguguuccccagcgacgaguucgacgccagcaucagccaggugaacgagaagaucaaccagagccuggccuucaucagaaagagcgacgagcugcugcacaacgugaacgccggcaagagcaccaccaacaucaugaucaccaccaucaucaucgugaucaucgugauccugcugagccugaucgccgugggccugcugcuguacugcaaggccagaagcacccccgugacccugagcaaggaccagcugagcggcaucaacaacaucgccuucagcaacugaggacuaguguccaccugucccuccugggcugcuggauugucucguuuuccugccaaauaaacaggaucagcgcuuuacagaucuaaaaaaaaaaaaaaaaaaaaaaaaaaaaaaaaaaaaaaaaaaaaaaaaaaaaaaaaaaaaaaaaugcaucccccccccccccccccccccccccccccccaaaggcucuuuucagagccaccagaauu

SEQ ID NO: 7746 - RNA, 1913 nt, Artificial Sequence
  mRNA product Design e-5 comprising derived and/or modified sequence from HRSV(A2)__F_DSCav1_mut8 (opt5)
gggagagcggcucggccauuuugucccagucaguccggaggcugcggcugcagaaguaccgccugcggaguaacugcaaagaagcuuaccauggagcugcucauccugaaggccaacgcuauuaccacaauccuuacggccgugaccuucugcuuugcgagcggccagaauauuacagaagaguucuaccaauccaccuguucugcugucagcaaaggguaucugggagcccucagaacaggcugguacaccuccguuaucacaauugaacugucuaacaucaaggagaucaaaugcaaugggaccgacgccaaggugaaacuuauuaagcaggaacuggauaaguauaaaaacgcugugacggaccuccagcugcugaugcagagcacccccgccacaggauccggcucugcuaucgccagcggggucgcgguguguaagguucuccaccuggagggagaggugaauaaaauuaaguccgcccuucugagcaccaacaaagcugucgugucucucuccggcugcggcguuagcgugcugacauuuaagguccuugaucugaagaauuacaucgacaaacaacuccugccuauucugaacaagcagucuuguuccaucccgaauauugaaaccgugaucgaguuccagcagaaaaacaaucggcuccuggaaaucacgcgcgaguuuagcgugaacgccggggucacaacccccguuucuacauauaugcuuaccaauuccgagcugcucagccugauuaacgauaugccuaucaccaaugaccaaaagaaacuuauguccaacaacgugcagauugugagacagcagucuuacagcaucaugugcauuaucaaggaagagguccuggcuuaugugguucaacucccccuguacggagugaucgauacaccuuguuggaaacugcauacgagcccccucugcaccacaaauaccaaggaaggcagcaacauuugucugacacggaccgaccgcgggugguacugcgauaaugccggaucugucuccuucuuuccucaggcggagacguguaaggugcagagcaacagaguuuucugcgacacaaugaacucucuuacccugccgagcgaagugaaucucugcaaugucgauaucuuuaaccccaaauaugacuguaagauuaugaccuccaaaacagaugugucuagcuccgucaucaccagccugggcgccauugugucuugcuacgggaagacaaaauguacggcuuccaauaagugccggggaaucaucaagaccuucagcaacggcugugacuauguuucuaauaaaggcguggacacagucuccguggggaacacccuuuacuauguuaauaagcaagagggacagagccuguacgugaaaggcgagccuauuaucaacuuuuaugauccccucgucuucccuuccgacgaauuugaugccucuauuagccaggugaaugagaagaucaaccagucccuggcuuucauucgcaaaucugacgaacugcuccacaacgugaaugccgggaaguccacaaccaacaucaugauuacgaccaucaucauuguuaucauugucauccugcuuucccugauugccgugggacuccugcuguacugcaaggcuagaagcacacccgugacccuuucuaaagaucaacucuccggcaucaauaacaucgcguucagcaauugaggacuaguguccaccugucccuccugggcugcuggauugucucguuuuccugccaaauaaacaggaucagcgcuuuacagaucuaaaaaaaaaaaaaaaaaaaaaaaaaaaaaaaaaaaaaaaaaaaaaaaaaaaaaaaaaaaaaaaaugcaucccccccccccccccccccccccccccccccaaaggcucuuuucagagccaccagaauu

SEQ ID NO: 7747 - RNA, 1913 nt, Artificial Sequence
  mRNA product Design e-5 comprising derived and/or modified sequence from HRSV(A2)__F_DSCav1_mut8 (opt6)
gggagagcggcucggccauuuugucccagucaguccggaggcugcggcugcagaaguaccgccugcggaguaacugcaaagaagcuuaccauggaacuauuaauauuaaaagcaaacgcaaucacaacuauacuaacagcaguaacauucugcuuugccucaggucaaaacauaacagaggaauuuuaccaauccacaugcucugcuguaagcaaaggauaccucggagcauuaagaacuggaugguacaccucaguaauaacuauagaacuaucaaacauaaaagaaauaaaauguaauggcacagacgcaaaagugaaauuaaucaaacaagaacucgauaaauacaaaaaugccguaaccgaucuccaacuuuuaaugcaaagcacacccgcaacagguuccgggucagcaauagcaagcggaguugcaguaugcaaaguacuacacuuagaaggagaaguaaauaaaaucaaaucagccuuacuaucaacaaauaaagcaguuguaucacucucaggaugcggaguauccguacuaacauuuaaaguacuagaucuaaaaaacuacauagauaaacaacucuuaccaauacuaaauaaacaaucauguuccauacccaacauagaaaccguuaucgaauuucaacaaaaaaacaacagauuacuagaaaucacacgagaauuuucaguaaaugcuggagucacaacaccaguuaguacauacaugcucaccaauucagaacuacuaaguuuaauuaacgauaugccaauaacaaacgaccaaaaaaaacuaaugucaaauaacguacaaauaguaagacaacaaucauacucaaucaugugcauaauaaaagaagaaguacuagccuauguaguccaauuaccacucuacggcguaaucgacaccccaugcuggaaauuacacacaagcccauuaugcaccaccaacacaaaagaagguucaaacauuugcuuaaccagaaccgaucgaggaugguacugcgauaacgcaggaucugucuccuuuuucccacaagccgaaacaugcaaaguucaaucaaaccgaguuuucugugacacuaugaacucacucacacuuccaagcgaaguaaaccuaugcaacguagauauauuuaacccuaaauacgacugcaaaauaaugacaagcaaaacagacguuaguucaucaguaauuacaagucuaggcgcaauagugucaugcuacggaaaaacaaaaugcaccgcauccaauaaaugccgaggaaucauuaaaacauucucaaacggaugcgacuacgucagcaauaaaggaguagacacuguuucuguaggaaacacccuauacuauguaaacaaacaagaaggucaaucacuauacguaaagggagaaccaauuauaaauuuuuacgaccccuuaguauuuccaagugaugaauuugacgcaucuauaagucaaguuaacgaaaaaauuaaccaaucacuugcauuuauaagaaaaucagacgaacuacuccauaauguaaacgcagguaaaucaacaacaaacaucaugaucacaaccauaauaauaguaauaauuguaauauuacuaucacuaauagcaguaggauuacuacucuacugcaaagcuagaucuaccccggucacacucucaaaagaccaauuaucuggaauaaacaauauagcauucagcaacuaaggacuaguguccaccugucccuccugggcugcuggauugucucguuuuccugccaaauaaacaggaucagcgcuuuacagaucuaaaaaaaaaaaaaaaaaaaaaaaaaaaaaaaaaaaaaaaaaaaaaaaaaaaaaaaaaaaaaaaaugcaucccccccccccccccccccccccccccccccaaaggcucuuuucagagccaccagaauu

SEQ ID NO: 7748 - RNA, 1913 nt, Artificial Sequence
  mRNA product Design e-5 comprising derived and/or modified sequence from HRSV(A2)__F_DSCav1_mut8 (opt11)
gggagagcggcucggccauuuugucccagucaguccggaggcugcggcugcagaaguaccgccugcggaguaacugcaaagaagcuuaccauggaacuccucauccuuaaagccaacgccauaaccaccauccucaccgccgucaccuucugcuucgcuucuggccaaaacauaaccgaagaguucuaccaauccacgugcucugccgugucaaaaggcuaccucggagcccuccgcacagggugguacacuuccgucaucaccaucgaacucucuaacaucaaagaaaucaagugcaacggcacagacgcgaaagucaagcucaucaaacaagaacuagacaaauacaaaaacgccguaacagaccuccaacuccuaaugcaguccacaccagccacaggcuccggcagcgccaucgccuccggcgucgcugucugcaaaguccuacaccucgaaggcgaagucaacaaaaucaagucagcccuccuuagcaccaacaaagcagucgucucuuuaagcgggugcggagucucuguccuaaccuuuaaaguacucgaccucaaaaacuacaucgacaaacaacuacuaccaauacuaaacaaacagagcugcuccauucccaacaucgaaaccguuaucgaguuccaacaaaagaacaaccgccuccucgaaaucacccgcgaguucuccgucaacgcaggcgucaccaccccagucuccaccuauaugcuaaccaacagcgaacuccucagccucaucaaugacaugccaaucaccaacgaccaaaagaaacucauguccaacaacguacagauaguccgccagcaguccuacagcaucaugugcaucaucaaagaagaagugcucgccuacgugguacaacucccucucuacggagucauugauacacccugcuggaaacuccacacaagcccccucugcacuacaaacaccaaagaaggcucuaacauaugccucacccgcacagaccgugguugguacugcgacaacgccggcuccguauccuucuuuccacaagcugaaaccugcaaaguucaaucaaaccgagucuucugcgacaccaugaacucccucacauugcccagcgaagucaaccucugcaacgucgacaucuucaaccccaaguacgacugcaaaaucaugaccuccaaaaccgacgucagcuccagcgugaucacaagccuaggcgcgaucgucagcugcuacggcaaaaccaaaugcacagccuccaacaaaugccgcggaaucauaaaaacauucaguaacggcugcgacuacguguccaauaaaggagucgacaccguauccgucggaaacacccucuacuacgucaacaaacaagaaggacaaucccucuaugucaaaggcgaacccauuaucaacuucuacgacccccuaguuuuccccuccgacgaguucgacgcaagcauuucccaagucaacgaaaagaucaaucaaucccucgccuucauacgcaaaagcgacgaacuacuacacaacguaaacgccggcaaaagcaccaccaacaucaugaucacaacaaucaucaucgucaucaucgucauccuacucucacucaucgccguuggccuacuacucuacugcaaagcccgcuccacacccgucacccucucaaaagaccaacucuccggcaucaacaacaucgcauucagcaacugaggacuaguguccaccugucccuccugggcugcuggauugucucguuuuccugccaaauaaacaggaucagcgcuuuacagaucuaaaaaaaaaaaaaaaaaaaaaaaaaaaaaaaaaaaaaaaaaaaaaaaaaaaaaaaaaaaaaaaaugcaucccccccccccccccccccccccccccccccaaaggcucuuuucagagccaccagaauu

SEQ ID NO: 7749 - RNA, 1980 nt, Artificial Sequence
  mRNA product Design e-6 comprising derived and/or modified sequence from HRSV(A2)__F_DSCav1_mut8 (opt1)
gggagagcggcucggccauuuugucccagucaguccggaggcugcggcugcagaaguaccgccugcggaguaacugcaaagaagcuuaccauggagcugcucauccugaaggccaacgccaucaccaccauccugacggcggugaccuucugcuucgccagcggccagaacaucaccgaggaguucuaccaguccacgugcagcgccgucuccaagggguaccucggcgcccugcggaccggcugguacaccuccgugaucaccaucgagcugagcaacaucaaggagaucaagugcaacgggaccgacgccaaggugaagcucaucaagcaggagcuggacaaguacaagaacgcggucacggaccugcagcuccugaugcaguccaccccggcaaccggcuccggcuccgccaucgcgagcggcgucgccgugugcaaggugcugcaccucgagggggaggucaacaagaucaagagcgcccugcuguccaccaacaaggccguggugagccucuccggcugcggcgucagcgugcugaccuucaaggugcuggaccucaagaacuacaucgacaagcagcugcugcccauccugaacaagcagagcugcuccauccccaacaucgagacggugaucgaguuccagcagaagaacaaccggcuccuggagaucacccgcgaguucagcgugaacgccggggucaccacccccguguccacguacaugcugaccaacagcgagcuccugucccugaucaacgacaugccgaucaccaacgaccagaagaagcucaugagcaacaacgugcagaucguccggcagcaguccuacagcaucaugugcaucaucaaggaggaggugcuggcguacgugguccagcugccccucuacggcgugaucgacacccccugcuggaagcugcacacgagcccccugugcaccaccaacaccaaggagggguccaacaucugccucacgcgcaccgaccggggcugguacugcgacaacgccggcagcgucuccuucuucccgcaggccgagaccugcaaggugcagagcaaccgcguguucugcgacaccaugaacucccugacgcugcccagcgagguaaaccucugcaacgucgacaucuucaaccccaaguacgacugcaagaucaugaccuccaagaccgacgugagcuccagcgugaucaccucccugggggccaucgucagcugcuacggcaagacgaagugcaccgccagcaacaagugccgggggaucaucaagaccuucuccaacggcugcgacuacgugagcaacaagggcguggacaccguguccgucgggaacacccuguacuacgugaacaagcaggagggccagagccucuacgugaagggggagcccaucaucaacuucuacgacccgcuggucuuccccuccgacgaguucgacgcgagcaucucccaggugaacgagaagaucaaccagagccuggccuucauccgcaaguccgacgagcugcuccacaacgugaacgccggcaagagcacgaccaacaucaugaucaccaccaucaucaucgucaucaucgugauccugcugucccucaucgccguggggcugcugcucuacugcaaggcccggagcacgcccgucacccuguccaaggaccagcugagcggcaucaacaacaucgcguucuccaacugaggacuaguacuggcugcaucucccuuuccucuguccuccauccuucucccaggauggugaagggggaccugguacccagugauccccaccccaggauccuaaaucaugacuuaccugcuaauaaaaacucauuggaaaagugagaagaucuaaaaaaaaaaaaaaaaaaaaaaaaaaaaaaaaaaaaaaaaaaaaaaaaaaaaaaaaaaaaaaaaugcaucccccccccccccccccccccccccccccccaaaggcucuuuucagagccaccagaauu

SEQ ID NO: 7750 - RNA, 1980 nt, Artificial Sequence
  mRNA product Design e-6 comprising derived and/or modified sequence from HRSV(A2)__F_DSCav1_mut8 (opt1)
gggagagcggcucggccauuuugucccagucaguccggaggcugcggcugcagaaguaccgccugcggaguaacugcaaagaagcuuaccauggagcugcucauccugaaggccaacgccaucaccaccauccugacggcggugaccuucugcuucgccagcggccagaacaucaccgaggaguucuaccaguccacgugcagcgccgucuccaagggguaccucggcgcccugcgcaccgggugguacaccagcgugaucaccaucgagcuguccaacaucaaggagaucaagugcaacggcaccgacgccaaggugaagcucaucaagcaggagcuggacaaguacaagaacgcggucacggaccugcagcuccugaugcagagcacccccgccaccggguccggcagcgccaucgccuccggcguggcggugugcaagguccugcaccucgagggggaggugaacaagaucaagagcgcccugcuguccaccaacaaggccguggucagccucuccggcugcggggugagcgugcugacguucaagguccuggaccucaagaacuacaucgacaagcagcugcugccgauccucaacaagcaguccugcagcauccccaacaucgagaccgugaucgaguuccagcagaagaacaaccggcugcuggagaucacccgcgaguucuccgugaacgccggcgucaccacgcccgugagcaccuacaugcucaccaacuccgagcugcugagccucaucaacgacaugcccaucaccaacgaccagaagaagcugaugagcaacaacgugcagaucguccggcagcaguccuacagcaucaugugcaucaucaaggaggaggugcuggccuacgugguccagcucccgcuguacggggugaucgacacgcccugcuggaagcugcacaccagcccccucugcaccaccaacacgaaggagggcuccaacaucugccugacccgcaccgaccggggcugguacugcgacaacgcgggguccgugagcuucuucccccaggccgagaccugcaagguccaguccaaccgcguguucugcgacacgaugaacagccugacccucccguccgaggucaaccugugcaacguggacaucuucaaccccaaguacgacugcaagaucaugaccagcaagaccgacguguccagcuccgucaucacgagccugggcgccaucguguccugcuacgggaagaccaagugcaccgccagcaacaagugccggggcaucaucaagaccuucuccaacggcugcgacuacgugagcaacaagggggucgacacgguguccgugggcaacacccucuacuacgucaacaagcaggaggggcagagccuguacgugaagggcgagcccaucaucaacuucuacgacccccugguguucccgagcgacgaguucgacgccuccaucagccaggucaacgagaagaucaaccagucccucgcguucauccgcaagagcgacgagcugcugcacaacgugaacgccgggaaguccaccaccaacaucaugaucaccacgaucaucaucgugaucaucgucauccuccugagccugaucgccgugggccuccugcuguacugcaaggcccgguccacccccgugacccugagcaaggaccagcucuccggcaucaacaacaucgccuucagcaacugaggacuaguacuggcugcaucucccuuuccucuguccuccauccuucucccaggauggugaagggggaccugguacccagugauccccaccccaggauccuaaaucaugacuuaccugcuaauaaaaacucauuggaaaagugagaagaucuaaaaaaaaaaaaaaaaaaaaaaaaaaaaaaaaaaaaaaaaaaaaaaaaaaaaaaaaaaaaaaaaugcaucccccccccccccccccccccccccccccccaaaggcucuuuucagagccaccagaauu

SEQ ID NO: 7751 - RNA, 1980 nt, Artificial Sequence
  mRNA product Design e-6 comprising derived and/or modified sequence from HRSV(A2)__F_DSCav1_mut8 (opt2)
gggagagcggcucggccauuuugucccagucaguccggaggcugcggcugcagaaguaccgccugcggaguaacugcaaagaagcuuaccauggagcuccucauccucaaggccaacgccaucaccaccauccucaccgccgucaccuucugcuucgccuccggccagaacaucaccgaggaguucuaccaguccaccugcuccgccgucuccaagggcuaccucggcgcccuccgcaccggcugguacaccuccgucaucaccaucgagcucuccaacaucaaggagaucaagugcaacggcaccgacgccaaggucaagcucaucaagcaggagcucgacaaguacaagaacgccgucaccgaccuccagcuccucaugcaguccacccccgccaccggcuccggcuccgccaucgccuccggcgucgccgucugcaagguccuccaccucgagggcgaggucaacaagaucaaguccgcccuccucuccaccaacaaggccgucgucucccucuccggcugcggcgucuccguccucaccuucaagguccucgaccucaagaacuacaucgacaagcagcuccuccccauccucaacaagcaguccugcuccauccccaacaucgagaccgucaucgaguuccagcagaagaacaaccgccuccucgagaucacccgcgaguucuccgucaacgccggcgucaccacccccgucuccaccuacaugcucaccaacuccgagcuccucucccucaucaacgacaugcccaucaccaacgaccagaagaagcucauguccaacaacguccagaucguccgccagcaguccuacuccaucaugugcaucaucaaggaggagguccucgccuacgucguccagcucccccucuacggcgucaucgacacccccugcuggaagcuccacaccuccccccucugcaccaccaacaccaaggagggcuccaacaucugccucacccgcaccgaccgcggcugguacugcgacaacgccggcuccgucuccuucuucccccaggccgagaccugcaagguccaguccaaccgcgucuucugcgacaccaugaacucccucacccuccccuccgaggucaaccucugcaacgucgacaucuucaaccccaaguacgacugcaagaucaugaccuccaagaccgacgucuccuccuccgucaucaccucccucggcgccaucgucuccugcuacggcaagaccaagugcaccgccuccaacaagugccgcggcaucaucaagaccuucuccaacggcugcgacuacgucuccaacaagggcgucgacaccgucuccgucggcaacacccucuacuacgucaacaagcaggagggccagucccucuacgucaagggcgagcccaucaucaacuucuacgacccccucgucuuccccuccgacgaguucgacgccuccaucucccaggucaacgagaagaucaaccagucccucgccuucauccgcaaguccgacgagcuccuccacaacgucaacgccggcaaguccaccaccaacaucaugaucaccaccaucaucaucgucaucaucgucauccuccucucccucaucgccgucggccuccuccucuacugcaaggcccgcuccacccccgucacccucuccaaggaccagcucuccggcaucaacaacaucgccuucuccaacugaggacuaguacuggcugcaucucccuuuccucuguccuccauccuucucccaggauggugaagggggaccugguacccagugauccccaccccaggauccuaaaucaugacuuaccugcuaauaaaaacucauuggaaaagugagaagaucuaaaaaaaaaaaaaaaaaaaaaaaaaaaaaaaaaaaaaaaaaaaaaaaaaaaaaaaaaaaaaaaaugcaucccccccccccccccccccccccccccccccaaaggcucuuuucagagccaccagaauu

SEQ ID NO: 7752 - RNA, 1980 nt, Artificial Sequence
  mRNA product Design e-6 comprising derived and/or modified sequence from HRSV(A2)__F_DSCav1_mut8 (opt3)
gggagagcggcucggccauuuugucccagucaguccggaggcugcggcugcagaaguaccgccugcggaguaacugcaaagaagcuuaccauggagcugcucauccuuaaggccaacgcuauuaccacaauacugacugcagugacguucugcuuugccagcggccagaauaucaccgaagaguucuaccaauccacauguucugcggucucaaaaggguauuugggagcuuuaagaacugguugguacaccaguguuauuacaaucgaacugagcaacauuaaggagaucaaaugcaauggcaccgacgccaaggugaaacuaauaaagcaggaacucgauaaguauaaaaacgcaguaacugaccugcagcuucugaugcaguccacacccgccaccgggucuggaucggcuaucgcaucaggcguggccgucuguaagguguugcaccucgagggugagguuaauaaaauuaagagcgcucugcugaguacgaacaaagccguggucucccucucugggugcggagugagcguauuaacuuuuaagguucuggaucuuaagaauuacaucgacaaacaauugcugccuauucuaaacaagcaguccuguucaaucccaaauauagaaaccgugauugaguuccagcagaaaaacaauaggcuccuggaaaucacacgggaguuuagugucaacgcgggcgugacuaccccggugagcacauauaugcuuaccaauucugagcuguugucccucauuaacgauaugcccaucacgaaugaccaaaagaaacugaugucaaacaacguccagaucguucgccagcagagcuacaguauuaugugcauaaucaaggaagagguguuagcauauguagugcaacugccucucuacggcgucauugauacuccauguuggaaacuucauacaucuccccugugcaccacuaauacaaaggaaggguccaacaucuguuugacccgaacggaccguggaugguacugcgauaaugccgguagcgugucguucuuuccucaggcugagaccuguaagguucagucuaacagaguguucugcgacacaaugaacucccuaacucugccaucagaagucaaucucugcaauguggauauauuuaaccccaaauaugacuguaagauuaugaccaguaaaacagauguaagcuccucuguuaucacuagccugggcgccaucgugucaugcuacgggaagaccaaauguacagcaaguaauaagugcaggggaauuaucaagaccuucuccaacggcugugacuaugucagcaauaaagguguggacacugucucuguggggaacacgcuuuacuauguuaauaagcaagagggacagucacuguacgugaaaggcgagccuauuauaaacuuuuaugauccauugguauucccgagugacgaauuugaugcuagcaucucccaggucaaugagaagauuaaccagucucucgccuucauccggaaaucggacgaacuguuacacaacgugaaugcgggcaagagcacaaccaacaucaugauuacuaccauaaucauuguuaucauugugauccugcuaucccucauagccgucgggcugcuuuuguacugcaaggcacgcucaacacccgugacccugaguaaagaucaacucucuggaaucaauaacauugcuuucagcaauugaggacuaguacuggcugcaucucccuuuccucuguccuccauccuucucccaggauggugaagggggaccugguacccagugauccccaccccaggauccuaaaucaugacuuaccugcuaauaaaaacucauuggaaaagugagaagaucuaaaaaaaaaaaaaaaaaaaaaaaaaaaaaaaaaaaaaaaaaaaaaaaaaaaaaaaaaaaaaaaaugcaucccccccccccccccccccccccccccccccaaaggcucuuuucagagccaccagaauu

SEQ ID NO: 7753 - RNA, 1980 nt, Artificial Sequence
  mRNA product Design e-6 comprising derived and/or modified sequence from HRSV(A2)__F_DSCav1_mut8 (opt4)
gggagagcggcucggccauuuugucccagucaguccggaggcugcggcugcagaaguaccgccugcggaguaacugcaaagaagcuuaccauggagcugcugauccugaaggccaacgccaucaccaccauccugaccgccgugaccuucugcuucgccagcggccagaacaucaccgaggaguucuaccagagcaccugcagcgccgugagcaagggcuaccugggcgcccugagaaccggcugguacaccagcgugaucaccaucgagcugagcaacaucaaggagaucaagugcaacggcaccgacgccaaggugaagcugaucaagcaggagcuggacaaguacaagaacgccgugaccgaccugcagcugcugaugcagagcacccccgccaccggcagcggcagcgccaucgccagcggcguggccgugugcaaggugcugcaccuggagggcgaggugaacaagaucaagagcgcccugcugagcaccaacaaggccguggugagccugagcggcugcggcgugagcgugcugaccuucaaggugcuggaccugaagaacuacaucgacaagcagcugcugcccauccugaacaagcagagcugcagcauccccaacaucgagaccgugaucgaguuccagcagaagaacaacagacugcuggagaucaccagagaguucagcgugaacgccggcgugaccacccccgugagcaccuacaugcugaccaacagcgagcugcugagccugaucaacgacaugcccaucaccaacgaccagaagaagcugaugagcaacaacgugcagaucgugagacagcagagcuacagcaucaugugcaucaucaaggaggaggugcuggccuacguggugcagcugccccuguacggcgugaucgacacccccugcuggaagcugcacaccagcccccugugcaccaccaacaccaaggagggcagcaacaucugccugaccagaaccgacagaggcugguacugcgacaacgccggcagcgugagcuucuucccccaggccgagaccugcaaggugcagagcaacagaguguucugcgacaccaugaacagccugacccugcccagcgaggugaaccugugcaacguggacaucuucaaccccaaguacgacugcaagaucaugaccagcaagaccgacgugagcagcagcgugaucaccagccugggcgccaucgugagcugcuacggcaagaccaagugcaccgccagcaacaagugcagaggcaucaucaagaccuucagcaacggcugcgacuacgugagcaacaagggcguggacaccgugagcgugggcaacacccuguacuacgugaacaagcaggagggccagagccuguacgugaagggcgagcccaucaucaacuucuacgacccccugguguuccccagcgacgaguucgacgccagcaucagccaggugaacgagaagaucaaccagagccuggccuucaucagaaagagcgacgagcugcugcacaacgugaacgccggcaagagcaccaccaacaucaugaucaccaccaucaucaucgugaucaucgugauccugcugagccugaucgccgugggccugcugcuguacugcaaggccagaagcacccccgugacccugagcaaggaccagcugagcggcaucaacaacaucgccuucagcaacugaggacuaguacuggcugcaucucccuuuccucuguccuccauccuucucccaggauggugaagggggaccugguacccagugauccccaccccaggauccuaaaucaugacuuaccugcuaauaaaaacucauuggaaaagugagaagaucuaaaaaaaaaaaaaaaaaaaaaaaaaaaaaaaaaaaaaaaaaaaaaaaaaaaaaaaaaaaaaaaaugcaucccccccccccccccccccccccccccccccaaaggcucuuuucagagccaccagaauu

SEQ ID NO: 7754 - RNA, 1980 nt, Artificial Sequence
  mRNA product Design e-6 comprising derived and/or modified sequence from HRSV(A2)__F_DSCav1_mut8 (opt5)
gggagagcggcucggccauuuugucccagucaguccggaggcugcggcugcagaaguaccgccugcggaguaacugcaaagaagcuuaccauggagcugcucauccugaaggccaacgcuauuaccacaauccuuacggccgugaccuucugcuuugcgagcggccagaauauuacagaagaguucuaccaauccaccuguucugcugucagcaaaggguaucugggagcccucagaacaggcugguacaccuccguuaucacaauugaacugucuaacaucaaggagaucaaaugcaaugggaccgacgccaaggugaaacuuauuaagcaggaacuggauaaguauaaaaacgcugugacggaccuccagcugcugaugcagagcacccccgccacaggauccggcucugcuaucgccagcggggucgcgguguguaagguucuccaccuggagggagaggugaauaaaauuaaguccgcccuucugagcaccaacaaagcugucgugucucucuccggcugcggcguuagcgugcugacauuuaagguccuugaucugaagaauuacaucgacaaacaacuccugccuauucugaacaagcagucuuguuccaucccgaauauugaaaccgugaucgaguuccagcagaaaaacaaucggcuccuggaaaucacgcgcgaguuuagcgugaacgccggggucacaacccccguuucuacauauaugcuuaccaauuccgagcugcucagccugauuaacgauaugccuaucaccaaugaccaaaagaaacuuauguccaacaacgugcagauugugagacagcagucuuacagcaucaugugcauuaucaaggaagagguccuggcuuaugugguucaacucccccuguacggagugaucgauacaccuuguuggaaacugcauacgagcccccucugcaccacaaauaccaaggaaggcagcaacauuugucugacacggaccgaccgcgggugguacugcgauaaugccggaucugucuccuucuuuccucaggcggagacguguaaggugcagagcaacagaguuuucugcgacacaaugaacucucuuacccugccgagcgaagugaaucucugcaaugucgauaucuuuaaccccaaauaugacuguaagauuaugaccuccaaaacagaugugucuagcuccgucaucaccagccugggcgccauugugucuugcuacgggaagacaaaauguacggcuuccaauaagugccggggaaucaucaagaccuucagcaacggcugugacuauguuucuaauaaaggcguggacacagucuccguggggaacacccuuuacuauguuaauaagcaagagggacagagccuguacgugaaaggcgagccuauuaucaacuuuuaugauccccucgucuucccuuccgacgaauuugaugccucuauuagccaggugaaugagaagaucaaccagucccuggcuuucauucgcaaaucugacgaacugcuccacaacgugaaugccgggaaguccacaaccaacaucaugauuacgaccaucaucauuguuaucauugucauccugcuuucccugauugccgugggacuccugcuguacugcaaggcuagaagcacacccgugacccuuucuaaagaucaacucuccggcaucaauaacaucgcguucagcaauugaggacuaguacuggcugcaucucccuuuccucuguccuccauccuucucccaggauggugaagggggaccugguacccagugauccccaccccaggauccuaaaucaugacuuaccugcuaauaaaaacucauuggaaaagugagaagaucuaaaaaaaaaaaaaaaaaaaaaaaaaaaaaaaaaaaaaaaaaaaaaaaaaaaaaaaaaaaaaaaaugcaucccccccccccccccccccccccccccccccaaaggcucuuuucagagccaccagaauu

SEQ ID NO: 7755 - RNA, 1980 nt, Artificial Sequence
  mRNA product Design e-6 comprising derived and/or modified sequence from HRSV(A2)__F_DSCav1_mut8 (opt6)
gggagagcggcucggccauuuugucccagucaguccggaggcugcggcugcagaaguaccgccugcggaguaacugcaaagaagcuuaccauggaacuauuaauauuaaaagcaaacgcaaucacaacuauacuaacagcaguaacauucugcuuugccucaggucaaaacauaacagaggaauuuuaccaauccacaugcucugcuguaagcaaaggauaccucggagcauuaagaacuggaugguacaccucaguaauaacuauagaacuaucaaacauaaaagaaauaaaauguaauggcacagacgcaaaagugaaauuaaucaaacaagaacucgauaaauacaaaaaugccguaaccgaucuccaacuuuuaaugcaaagcacacccgcaacagguuccgggucagcaauagcaagcggaguugcaguaugcaaaguacuacacuuagaaggagaaguaaauaaaaucaaaucagccuuacuaucaacaaauaaagcaguuguaucacucucaggaugcggaguauccguacuaacauuuaaaguacuagaucuaaaaaacuacauagauaaacaacucuuaccaauacuaaauaaacaaucauguuccauacccaacauagaaaccguuaucgaauuucaacaaaaaaacaacagauuacuagaaaucacacgagaauuuucaguaaaugcuggagucacaacaccaguuaguacauacaugcucaccaauucagaacuacuaaguuuaauuaacgauaugccaauaacaaacgaccaaaaaaaacuaaugucaaauaacguacaaauaguaagacaacaaucauacucaaucaugugcauaauaaaagaagaaguacuagccuauguaguccaauuaccacucuacggcguaaucgacaccccaugcuggaaauuacacacaagcccauuaugcaccaccaacacaaaagaagguucaaacauuugcuuaaccagaaccgaucgaggaugguacugcgauaacgcaggaucugucuccuuuuucccacaagccgaaacaugcaaaguucaaucaaaccgaguuuucugugacacuaugaacucacucacacuuccaagcgaaguaaaccuaugcaacguagauauauuuaacccuaaauacgacugcaaaauaaugacaagcaaaacagacguuaguucaucaguaauuacaagucuaggcgcaauagugucaugcuacggaaaaacaaaaugcaccgcauccaauaaaugccgaggaaucauuaaaacauucucaaacggaugcgacuacgucagcaauaaaggaguagacacuguuucuguaggaaacacccuauacuauguaaacaaacaagaaggucaaucacuauacguaaagggagaaccaauuauaaauuuuuacgaccccuuaguauuuccaagugaugaauuugacgcaucuauaagucaaguuaacgaaaaaauuaaccaaucacuugcauuuauaagaaaaucagacgaacuacuccauaauguaaacgcagguaaaucaacaacaaacaucaugaucacaaccauaauaauaguaauaauuguaauauuacuaucacuaauagcaguaggauuacuacucuacugcaaagcuagaucuaccccggucacacucucaaaagaccaauuaucuggaauaaacaauauagcauucagcaacuaaggacuaguacuggcugcaucucccuuuccucuguccuccauccuucucccaggauggugaagggggaccugguacccagugauccccaccccaggauccuaaaucaugacuuaccugcuaauaaaaacucauuggaaaagugagaagaucuaaaaaaaaaaaaaaaaaaaaaaaaaaaaaaaaaaaaaaaaaaaaaaaaaaaaaaaaaaaaaaaaugcaucccccccccccccccccccccccccccccccaaaggcucuuuucagagccaccagaauu

SEQ ID NO: 7756 - RNA, 1980 nt, Artificial Sequence
  mRNA product Design e-6 comprising derived and/or modified sequence from HRSV(A2)__F_DSCav1_mut8 (opt11)
gggagagcggcucggccauuuugucccagucaguccggaggcugcggcugcagaaguaccgccugcggaguaacugcaaagaagcuuaccauggaacuccucauccuuaaagccaacgccauaaccaccauccucaccgccgucaccuucugcuucgcuucuggccaaaacauaaccgaagaguucuaccaauccacgugcucugccgugucaaaaggcuaccucggagcccuccgcacagggugguacacuuccgucaucaccaucgaacucucuaacaucaaagaaaucaagugcaacggcacagacgcgaaagucaagcucaucaaacaagaacuagacaaauacaaaaacgccguaacagaccuccaacuccuaaugcaguccacaccagccacaggcuccggcagcgccaucgccuccggcgucgcugucugcaaaguccuacaccucgaaggcgaagucaacaaaaucaagucagcccuccuuagcaccaacaaagcagucgucucuuuaagcgggugcggagucucuguccuaaccuuuaaaguacucgaccucaaaaacuacaucgacaaacaacuacuaccaauacuaaacaaacagagcugcuccauucccaacaucgaaaccguuaucgaguuccaacaaaagaacaaccgccuccucgaaaucacccgcgaguucuccgucaacgcaggcgucaccaccccagucuccaccuauaugcuaaccaacagcgaacuccucagccucaucaaugacaugccaaucaccaacgaccaaaagaaacucauguccaacaacguacagauaguccgccagcaguccuacagcaucaugugcaucaucaaagaagaagugcucgccuacgugguacaacucccucucuacggagucauugauacacccugcuggaaacuccacacaagcccccucugcacuacaaacaccaaagaaggcucuaacauaugccucacccgcacagaccgugguugguacugcgacaacgccggcuccguauccuucuuuccacaagcugaaaccugcaaaguucaaucaaaccgagucuucugcgacaccaugaacucccucacauugcccagcgaagucaaccucugcaacgucgacaucuucaaccccaaguacgacugcaaaaucaugaccuccaaaaccgacgucagcuccagcgugaucacaagccuaggcgcgaucgucagcugcuacggcaaaaccaaaugcacagccuccaacaaaugccgcggaaucauaaaaacauucaguaacggcugcgacuacguguccaauaaaggagucgacaccguauccgucggaaacacccucuacuacgucaacaaacaagaaggacaaucccucuaugucaaaggcgaacccauuaucaacuucuacgacccccuaguuuuccccuccgacgaguucgacgcaagcauuucccaagucaacgaaaagaucaaucaaucccucgccuucauacgcaaaagcgacgaacuacuacacaacguaaacgccggcaaaagcaccaccaacaucaugaucacaacaaucaucaucgucaucaucgucauccuacucucacucaucgccguuggccuacuacucuacugcaaagcccgcuccacacccgucacccucucaaaagaccaacucuccggcaucaacaacaucgcauucagcaacugaggacuaguacuggcugcaucucccuuuccucuguccuccauccuucucccaggauggugaagggggaccugguacccagugauccccaccccaggauccuaaaucaugacuuaccugcuaauaaaaacucauuggaaaagugagaagaucuaaaaaaaaaaaaaaaaaaaaaaaaaaaaaaaaaaaaaaaaaaaaaaaaaaaaaaaaaaaaaaaaugcaucccccccccccccccccccccccccccccccaaaggcucuuuucagagccaccagaauu

SEQ ID NO: 7757 - RNA, 2196 nt, Artificial Sequence
  mRNA product Design f-1 comprising derived and/or modified sequence from HRSV(A2)__F_DSCav1_mut8 (opt1)
gggagagcggcucggccauuuugucccagucaguccggaggcugcggcugcagaaguaccgccugcggaguaacugcaaagaagcuuaccauggagcugcucauccugaaggccaacgccaucaccaccauccugacggcggugaccuucugcuucgccagcggccagaacaucaccgaggaguucuaccaguccacgugcagcgccgucuccaagggguaccucggcgcccugcggaccggcugguacaccuccgugaucaccaucgagcugagcaacaucaaggagaucaagugcaacgggaccgacgccaaggugaagcucaucaagcaggagcuggacaaguacaagaacgcggucacggaccugcagcuccugaugcaguccaccccggcaaccggcuccggcuccgccaucgcgagcggcgucgccgugugcaaggugcugcaccucgagggggaggucaacaagaucaagagcgcccugcuguccaccaacaaggccguggugagccucuccggcugcggcgucagcgugcugaccuucaaggugcuggaccucaagaacuacaucgacaagcagcugcugcccauccugaacaagcagagcugcuccauccccaacaucgagacggugaucgaguuccagcagaagaacaaccggcuccuggagaucacccgcgaguucagcgugaacgccggggucaccacccccguguccacguacaugcugaccaacagcgagcuccugucccugaucaacgacaugccgaucaccaacgaccagaagaagcucaugagcaacaacgugcagaucguccggcagcaguccuacagcaucaugugcaucaucaaggaggaggugcuggcguacgugguccagcugccccucuacggcgugaucgacacccccugcuggaagcugcacacgagcccccugugcaccaccaacaccaaggagggguccaacaucugccucacgcgcaccgaccggggcugguacugcgacaacgccggcagcgucuccuucuucccgcaggccgagaccugcaaggugcagagcaaccgcguguucugcgacaccaugaacucccugacgcugcccagcgagguaaaccucugcaacgucgacaucuucaaccccaaguacgacugcaagaucaugaccuccaagaccgacgugagcuccagcgugaucaccucccugggggccaucgucagcugcuacggcaagacgaagugcaccgccagcaacaagugccgggggaucaucaagaccuucuccaacggcugcgacuacgugagcaacaagggcguggacaccguguccgucgggaacacccuguacuacgugaacaagcaggagggccagagccucuacgugaagggggagcccaucaucaacuucuacgacccgcuggucuuccccuccgacgaguucgacgcgagcaucucccaggugaacgagaagaucaaccagagccuggccuucauccgcaaguccgacgagcugcuccacaacgugaacgccggcaagagcacgaccaacaucaugaucaccaccaucaucaucgucaucaucgugauccugcugucccucaucgccguggggcugcugcucuacugcaaggcccggagcacgcccgucacccuguccaaggaccagcugagcggcaucaacaacaucgcguucuccaacugaggacuagugaagggaacacccaaauuuaauucagccuuaagcacaauuaauuaagagugaaacguaauuguacaagcaguuggucacccaccauagggcaugaucaacaccgcaaccuuuccuuuuucccccagugauucugaaaaaccccucuucccuucagcuugcuuagauguuccaaauuuaguaagcuuaaggcggccuacagaagaaaaagaaaaaaaaggccacaaaaguucccucucacuuucaguaaauaaaauaaaagcagcaacagaaauaaagaaauaaaugaaauucaaaaugaaauaaauauuguguugugcagcauuaaaaaaucaauaaaaauuaaaaaugagcaagaucuaaaaaaaaaaaaaaaaaaaaaaaaaaaaaaaaaaaaaaaaaaaaaaaaaaaaaaaaaaaaaaaaugcaucccccccccccccccccccccccccccccccaaaggcucuuuucagagccaccagaauu

SEQ ID NO: 7758 - RNA, 2196 nt, Artificial Sequence
  mRNA product Design f-1 comprising derived and/or modified sequence from HRSV(A2)__F_DSCav1_mut8 (opt1)
gggagagcggcucggccauuuugucccagucaguccggaggcugcggcugcagaaguaccgccugcggaguaacugcaaagaagcuuaccauggagcugcucauccugaaggccaacgccaucaccaccauccugacggcggugaccuucugcuucgccagcggccagaacaucaccgaggaguucuaccaguccacgugcagcgccgucuccaagggguaccucggcgcccugcgcaccgggugguacaccagcgugaucaccaucgagcuguccaacaucaaggagaucaagugcaacggcaccgacgccaaggugaagcucaucaagcaggagcuggacaaguacaagaacgcggucacggaccugcagcuccugaugcagagcacccccgccaccggguccggcagcgccaucgccuccggcguggcggugugcaagguccugcaccucgagggggaggugaacaagaucaagagcgcccugcuguccaccaacaaggccguggucagccucuccggcugcggggugagcgugcugacguucaagguccuggaccucaagaacuacaucgacaagcagcugcugccgauccucaacaagcaguccugcagcauccccaacaucgagaccgugaucgaguuccagcagaagaacaaccggcugcuggagaucacccgcgaguucuccgugaacgccggcgucaccacgcccgugagcaccuacaugcucaccaacuccgagcugcugagccucaucaacgacaugcccaucaccaacgaccagaagaagcugaugagcaacaacgugcagaucguccggcagcaguccuacagcaucaugugcaucaucaaggaggaggugcuggccuacgugguccagcucccgcuguacggggugaucgacacgcccugcuggaagcugcacaccagcccccucugcaccaccaacacgaaggagggcuccaacaucugccugacccgcaccgaccggggcugguacugcgacaacgcgggguccgugagcuucuucccccaggccgagaccugcaagguccaguccaaccgcguguucugcgacacgaugaacagccugacccucccguccgaggucaaccugugcaacguggacaucuucaaccccaaguacgacugcaagaucaugaccagcaagaccgacguguccagcuccgucaucacgagccugggcgccaucguguccugcuacgggaagaccaagugcaccgccagcaacaagugccggggcaucaucaagaccuucuccaacggcugcgacuacgugagcaacaagggggucgacacgguguccgugggcaacacccucuacuacgucaacaagcaggaggggcagagccuguacgugaagggcgagcccaucaucaacuucuacgacccccugguguucccgagcgacgaguucgacgccuccaucagccaggucaacgagaagaucaaccagucccucgcguucauccgcaagagcgacgagcugcugcacaacgugaacgccgggaaguccaccaccaacaucaugaucaccacgaucaucaucgugaucaucgucauccuccugagccugaucgccgugggccuccugcuguacugcaaggcccgguccacccccgugacccugagcaaggaccagcucuccggcaucaacaacaucgccuucagcaacugaggacuagugaagggaacacccaaauuuaauucagccuuaagcacaauuaauuaagagugaaacguaauuguacaagcaguuggucacccaccauagggcaugaucaacaccgcaaccuuuccuuuuucccccagugauucugaaaaaccccucuucccuucagcuugcuuagauguuccaaauuuaguaagcuuaaggcggccuacagaagaaaaagaaaaaaaaggccacaaaaguucccucucacuuucaguaaauaaaauaaaagcagcaacagaaauaaagaaauaaaugaaauucaaaaugaaauaaauauuguguugugcagcauuaaaaaaucaauaaaaauuaaaaaugagcaagaucuaaaaaaaaaaaaaaaaaaaaaaaaaaaaaaaaaaaaaaaaaaaaaaaaaaaaaaaaaaaaaaaaugcaucccccccccccccccccccccccccccccccaaaggcucuuuucagagccaccagaauu

SEQ ID NO: 7759 - RNA, 2196 nt, Artificial Sequence
  mRNA product Design f-1 comprising derived and/or modified sequence from HRSV(A2)__F_DSCav1_mut8 (opt2)
gggagagcggcucggccauuuugucccagucaguccggaggcugcggcugcagaaguaccgccugcggaguaacugcaaagaagcuuaccauggagcuccucauccucaaggccaacgccaucaccaccauccucaccgccgucaccuucugcuucgccuccggccagaacaucaccgaggaguucuaccaguccaccugcuccgccgucuccaagggcuaccucggcgcccuccgcaccggcugguacaccuccgucaucaccaucgagcucuccaacaucaaggagaucaagugcaacggcaccgacgccaaggucaagcucaucaagcaggagcucgacaaguacaagaacgccgucaccgaccuccagcuccucaugcaguccacccccgccaccggcuccggcuccgccaucgccuccggcgucgccgucugcaagguccuccaccucgagggcgaggucaacaagaucaaguccgcccuccucuccaccaacaaggccgucgucucccucuccggcugcggcgucuccguccucaccuucaagguccucgaccucaagaacuacaucgacaagcagcuccuccccauccucaacaagcaguccugcuccauccccaacaucgagaccgucaucgaguuccagcagaagaacaaccgccuccucgagaucacccgcgaguucuccgucaacgccggcgucaccacccccgucuccaccuacaugcucaccaacuccgagcuccucucccucaucaacgacaugcccaucaccaacgaccagaagaagcucauguccaacaacguccagaucguccgccagcaguccuacuccaucaugugcaucaucaaggaggagguccucgccuacgucguccagcucccccucuacggcgucaucgacacccccugcuggaagcuccacaccuccccccucugcaccaccaacaccaaggagggcuccaacaucugccucacccgcaccgaccgcggcugguacugcgacaacgccggcuccgucuccuucuucccccaggccgagaccugcaagguccaguccaaccgcgucuucugcgacaccaugaacucccucacccuccccuccgaggucaaccucugcaacgucgacaucuucaaccccaaguacgacugcaagaucaugaccuccaagaccgacgucuccuccuccgucaucaccucccucggcgccaucgucuccugcuacggcaagaccaagugcaccgccuccaacaagugccgcggcaucaucaagaccuucuccaacggcugcgacuacgucuccaacaagggcgucgacaccgucuccgucggcaacacccucuacuacgucaacaagcaggagggccagucccucuacgucaagggcgagcccaucaucaacuucuacgacccccucgucuuccccuccgacgaguucgacgccuccaucucccaggucaacgagaagaucaaccagucccucgccuucauccgcaaguccgacgagcuccuccacaacgucaacgccggcaaguccaccaccaacaucaugaucaccaccaucaucaucgucaucaucgucauccuccucucccucaucgccgucggccuccuccucuacugcaaggcccgcuccacccccgucacccucuccaaggaccagcucuccggcaucaacaacaucgccuucuccaacugaggacuagugaagggaacacccaaauuuaauucagccuuaagcacaauuaauuaagagugaaacguaauuguacaagcaguuggucacccaccauagggcaugaucaacaccgcaaccuuuccuuuuucccccagugauucugaaaaaccccucuucccuucagcuugcuuagauguuccaaauuuaguaagcuuaaggcggccuacagaagaaaaagaaaaaaaaggccacaaaaguucccucucacuuucaguaaauaaaauaaaagcagcaacagaaauaaagaaauaaaugaaauucaaaaugaaauaaauauuguguugugcagcauuaaaaaaucaauaaaaauuaaaaaugagcaagaucuaaaaaaaaaaaaaaaaaaaaaaaaaaaaaaaaaaaaaaaaaaaaaaaaaaaaaaaaaaaaaaaaugcaucccccccccccccccccccccccccccccccaaaggcucuuuucagagccaccagaauu

SEQ ID NO: 7760 - RNA, 2196 nt, Artificial Sequence
  mRNA product Design f-1 comprising derived and/or modified sequence from HRSV(A2)__F_DSCav1_mut8 (opt3)
gggagagcggcucggccauuuugucccagucaguccggaggcugcggcugcagaaguaccgccugcggaguaacugcaaagaagcuuaccauggagcugcucauccuuaaggccaacgcuauuaccacaauacugacugcagugacguucugcuuugccagcggccagaauaucaccgaagaguucuaccaauccacauguucugcggucucaaaaggguauuugggagcuuuaagaacugguugguacaccaguguuauuacaaucgaacugagcaacauuaaggagaucaaaugcaauggcaccgacgccaaggugaaacuaauaaagcaggaacucgauaaguauaaaaacgcaguaacugaccugcagcuucugaugcaguccacacccgccaccgggucuggaucggcuaucgcaucaggcguggccgucuguaagguguugcaccucgagggugagguuaauaaaauuaagagcgcucugcugaguacgaacaaagccguggucucccucucugggugcggagugagcguauuaacuuuuaagguucuggaucuuaagaauuacaucgacaaacaauugcugccuauucuaaacaagcaguccuguucaaucccaaauauagaaaccgugauugaguuccagcagaaaaacaauaggcuccuggaaaucacacgggaguuuagugucaacgcgggcgugacuaccccggugagcacauauaugcuuaccaauucugagcuguugucccucauuaacgauaugcccaucacgaaugaccaaaagaaacugaugucaaacaacguccagaucguucgccagcagagcuacaguauuaugugcauaaucaaggaagagguguuagcauauguagugcaacugccucucuacggcgucauugauacuccauguuggaaacuucauacaucuccccugugcaccacuaauacaaaggaaggguccaacaucuguuugacccgaacggaccguggaugguacugcgauaaugccgguagcgugucguucuuuccucaggcugagaccuguaagguucagucuaacagaguguucugcgacacaaugaacucccuaacucugccaucagaagucaaucucugcaauguggauauauuuaaccccaaauaugacuguaagauuaugaccaguaaaacagauguaagcuccucuguuaucacuagccugggcgccaucgugucaugcuacgggaagaccaaauguacagcaaguaauaagugcaggggaauuaucaagaccuucuccaacggcugugacuaugucagcaauaaagguguggacacugucucuguggggaacacgcuuuacuauguuaauaagcaagagggacagucacuguacgugaaaggcgagccuauuauaaacuuuuaugauccauugguauucccgagugacgaauuugaugcuagcaucucccaggucaaugagaagauuaaccagucucucgccuucauccggaaaucggacgaacuguuacacaacgugaaugcgggcaagagcacaaccaacaucaugauuacuaccauaaucauuguuaucauugugauccugcuaucccucauagccgucgggcugcuuuuguacugcaaggcacgcucaacacccgugacccugaguaaagaucaacucucuggaaucaauaacauugcuuucagcaauugaggacuagugaagggaacacccaaauuuaauucagccuuaagcacaauuaauuaagagugaaacguaauuguacaagcaguuggucacccaccauagggcaugaucaacaccgcaaccuuuccuuuuucccccagugauucugaaaaaccccucuucccuucagcuugcuuagauguuccaaauuuaguaagcuuaaggcggccuacagaagaaaaagaaaaaaaaggccacaaaaguucccucucacuuucaguaaauaaaauaaaagcagcaacagaaauaaagaaauaaaugaaauucaaaaugaaauaaauauuguguugugcagcauuaaaaaaucaauaaaaauuaaaaaugagcaagaucuaaaaaaaaaaaaaaaaaaaaaaaaaaaaaaaaaaaaaaaaaaaaaaaaaaaaaaaaaaaaaaaaugcaucccccccccccccccccccccccccccccccaaaggcucuuuucagagccaccagaauu

SEQ ID NO: 7761 - RNA, 2196 nt, Artificial Sequence
  mRNA product Design f-1 comprising derived and/or modified sequence from HRSV(A2)__F_DSCav1_mut8 (opt4)
gggagagcggcucggccauuuugucccagucaguccggaggcugcggcugcagaaguaccgccugcggaguaacugcaaagaagcuuaccauggagcugcugauccugaaggccaacgccaucaccaccauccugaccgccgugaccuucugcuucgccagcggccagaacaucaccgaggaguucuaccagagcaccugcagcgccgugagcaagggcuaccugggcgcccugagaaccggcugguacaccagcgugaucaccaucgagcugagcaacaucaaggagaucaagugcaacggcaccgacgccaaggugaagcugaucaagcaggagcuggacaaguacaagaacgccgugaccgaccugcagcugcugaugcagagcacccccgccaccggcagcggcagcgccaucgccagcggcguggccgugugcaaggugcugcaccuggagggcgaggugaacaagaucaagagcgcccugcugagcaccaacaaggccguggugagccugagcggcugcggcgugagcgugcugaccuucaaggugcuggaccugaagaacuacaucgacaagcagcugcugcccauccugaacaagcagagcugcagcauccccaacaucgagaccgugaucgaguuccagcagaagaacaacagacugcuggagaucaccagagaguucagcgugaacgccggcgugaccacccccgugagcaccuacaugcugaccaacagcgagcugcugagccugaucaacgacaugcccaucaccaacgaccagaagaagcugaugagcaacaacgugcagaucgugagacagcagagcuacagcaucaugugcaucaucaaggaggaggugcuggccuacguggugcagcugccccuguacggcgugaucgacacccccugcuggaagcugcacaccagcccccugugcaccaccaacaccaaggagggcagcaacaucugccugaccagaaccgacagaggcugguacugcgacaacgccggcagcgugagcuucuucccccaggccgagaccugcaaggugcagagcaacagaguguucugcgacaccaugaacagccugacccugcccagcgaggugaaccugugcaacguggacaucuucaaccccaaguacgacugcaagaucaugaccagcaagaccgacgugagcagcagcgugaucaccagccugggcgccaucgugagcugcuacggcaagaccaagugcaccgccagcaacaagugcagaggcaucaucaagaccuucagcaacggcugcgacuacgugagcaacaagggcguggacaccgugagcgugggcaacacccuguacuacgugaacaagcaggagggccagagccuguacgugaagggcgagcccaucaucaacuucuacgacccccugguguuccccagcgacgaguucgacgccagcaucagccaggugaacgagaagaucaaccagagccuggccuucaucagaaagagcgacgagcugcugcacaacgugaacgccggcaagagcaccaccaacaucaugaucaccaccaucaucaucgugaucaucgugauccugcugagccugaucgccgugggccugcugcuguacugcaaggccagaagcacccccgugacccugagcaaggaccagcugagcggcaucaacaacaucgccuucagcaacugaggacuagugaagggaacacccaaauuuaauucagccuuaagcacaauuaauuaagagugaaacguaauuguacaagcaguuggucacccaccauagggcaugaucaacaccgcaaccuuuccuuuuucccccagugauucugaaaaaccccucuucccuucagcuugcuuagauguuccaaauuuaguaagcuuaaggcggccuacagaagaaaaagaaaaaaaaggccacaaaaguucccucucacuuucaguaaauaaaauaaaagcagcaacagaaauaaagaaauaaaugaaauucaaaaugaaauaaauauuguguugugcagcauuaaaaaaucaauaaaaauuaaaaaugagcaagaucuaaaaaaaaaaaaaaaaaaaaaaaaaaaaaaaaaaaaaaaaaaaaaaaaaaaaaaaaaaaaaaaaugcaucccccccccccccccccccccccccccccccaaaggcucuuuucagagccaccagaauu

SEQ ID NO: 7762 - RNA, 2196 nt, Artificial Sequence
  mRNA product Design f-1 comprising derived and/or modified sequence from HRSV(A2)__F_DSCav1_mut8 (opt5)
gggagagcggcucggccauuuugucccagucaguccggaggcugcggcugcagaaguaccgccugcggaguaacugcaaagaagcuuaccauggagcugcucauccugaaggccaacgcuauuaccacaauccuuacggccgugaccuucugcuuugcgagcggccagaauauuacagaagaguucuaccaauccaccuguucugcugucagcaaaggguaucugggagcccucagaacaggcugguacaccuccguuaucacaauugaacugucuaacaucaaggagaucaaaugcaaugggaccgacgccaaggugaaacuuauuaagcaggaacuggauaaguauaaaaacgcugugacggaccuccagcugcugaugcagagcacccccgccacaggauccggcucugcuaucgccagcggggucgcgguguguaagguucuccaccuggagggagaggugaauaaaauuaaguccgcccuucugagcaccaacaaagcugucgugucucucuccggcugcggcguuagcgugcugacauuuaagguccuugaucugaagaauuacaucgacaaacaacuccugccuauucugaacaagcagucuuguuccaucccgaauauugaaaccgugaucgaguuccagcagaaaaacaaucggcuccuggaaaucacgcgcgaguuuagcgugaacgccggggucacaacccccguuucuacauauaugcuuaccaauuccgagcugcucagccugauuaacgauaugccuaucaccaaugaccaaaagaaacuuauguccaacaacgugcagauugugagacagcagucuuacagcaucaugugcauuaucaaggaagagguccuggcuuaugugguucaacucccccuguacggagugaucgauacaccuuguuggaaacugcauacgagcccccucugcaccacaaauaccaaggaaggcagcaacauuugucugacacggaccgaccgcgggugguacugcgauaaugccggaucugucuccuucuuuccucaggcggagacguguaaggugcagagcaacagaguuuucugcgacacaaugaacucucuuacccugccgagcgaagugaaucucugcaaugucgauaucuuuaaccccaaauaugacuguaagauuaugaccuccaaaacagaugugucuagcuccgucaucaccagccugggcgccauugugucuugcuacgggaagacaaaauguacggcuuccaauaagugccggggaaucaucaagaccuucagcaacggcugugacuauguuucuaauaaaggcguggacacagucuccguggggaacacccuuuacuauguuaauaagcaagagggacagagccuguacgugaaaggcgagccuauuaucaacuuuuaugauccccucgucuucccuuccgacgaauuugaugccucuauuagccaggugaaugagaagaucaaccagucccuggcuuucauucgcaaaucugacgaacugcuccacaacgugaaugccgggaaguccacaaccaacaucaugauuacgaccaucaucauuguuaucauugucauccugcuuucccugauugccgugggacuccugcuguacugcaaggcuagaagcacacccgugacccuuucuaaagaucaacucuccggcaucaauaacaucgcguucagcaauugaggacuagugaagggaacacccaaauuuaauucagccuuaagcacaauuaauuaagagugaaacguaauuguacaagcaguuggucacccaccauagggcaugaucaacaccgcaaccuuuccuuuuucccccagugauucugaaaaaccccucuucccuucagcuugcuuagauguuccaaauuuaguaagcuuaaggcggccuacagaagaaaaagaaaaaaaaggccacaaaaguucccucucacuuucaguaaauaaaauaaaagcagcaacagaaauaaagaaauaaaugaaauucaaaaugaaauaaauauuguguugugcagcauuaaaaaaucaauaaaaauuaaaaaugagcaagaucuaaaaaaaaaaaaaaaaaaaaaaaaaaaaaaaaaaaaaaaaaaaaaaaaaaaaaaaaaaaaaaaaugcaucccccccccccccccccccccccccccccccaaaggcucuuuucagagccaccagaauu

SEQ ID NO: 7763 - RNA, 2196 nt, Artificial Sequence
  mRNA product Design f-1 comprising derived and/or modified sequence from HRSV(A2)__F_DSCav1_mut8 (opt6)
gggagagcggcucggccauuuugucccagucaguccggaggcugcggcugcagaaguaccgccugcggaguaacugcaaagaagcuuaccauggaacuauuaauauuaaaagcaaacgcaaucacaacuauacuaacagcaguaacauucugcuuugccucaggucaaaacauaacagaggaauuuuaccaauccacaugcucugcuguaagcaaaggauaccucggagcauuaagaacuggaugguacaccucaguaauaacuauagaacuaucaaacauaaaagaaauaaaauguaauggcacagacgcaaaagugaaauuaaucaaacaagaacucgauaaauacaaaaaugccguaaccgaucuccaacuuuuaaugcaaagcacacccgcaacagguuccgggucagcaauagcaagcggaguugcaguaugcaaaguacuacacuuagaaggagaaguaaauaaaaucaaaucagccuuacuaucaacaaauaaagcaguuguaucacucucaggaugcggaguauccguacuaacauuuaaaguacuagaucuaaaaaacuacauagauaaacaacucuuaccaauacuaaauaaacaaucauguuccauacccaacauagaaaccguuaucgaauuucaacaaaaaaacaacagauuacuagaaaucacacgagaauuuucaguaaaugcuggagucacaacaccaguuaguacauacaugcucaccaauucagaacuacuaaguuuaauuaacgauaugccaauaacaaacgaccaaaaaaaacuaaugucaaauaacguacaaauaguaagacaacaaucauacucaaucaugugcauaauaaaagaagaaguacuagccuauguaguccaauuaccacucuacggcguaaucgacaccccaugcuggaaauuacacacaagcccauuaugcaccaccaacacaaaagaagguucaaacauuugcuuaaccagaaccgaucgaggaugguacugcgauaacgcaggaucugucuccuuuuucccacaagccgaaacaugcaaaguucaaucaaaccgaguuuucugugacacuaugaacucacucacacuuccaagcgaaguaaaccuaugcaacguagauauauuuaacccuaaauacgacugcaaaauaaugacaagcaaaacagacguuaguucaucaguaauuacaagucuaggcgcaauagugucaugcuacggaaaaacaaaaugcaccgcauccaauaaaugccgaggaaucauuaaaacauucucaaacggaugcgacuacgucagcaauaaaggaguagacacuguuucuguaggaaacacccuauacuauguaaacaaacaagaaggucaaucacuauacguaaagggagaaccaauuauaaauuuuuacgaccccuuaguauuuccaagugaugaauuugacgcaucuauaagucaaguuaacgaaaaaauuaaccaaucacuugcauuuauaagaaaaucagacgaacuacuccauaauguaaacgcagguaaaucaacaacaaacaucaugaucacaaccauaauaauaguaauaauuguaauauuacuaucacuaauagcaguaggauuacuacucuacugcaaagcuagaucuaccccggucacacucucaaaagaccaauuaucuggaauaaacaauauagcauucagcaacuaaggacuagugaagggaacacccaaauuuaauucagccuuaagcacaauuaauuaagagugaaacguaauuguacaagcaguuggucacccaccauagggcaugaucaacaccgcaaccuuuccuuuuucccccagugauucugaaaaaccccucuucccuucagcuugcuuagauguuccaaauuuaguaagcuuaaggcggccuacagaagaaaaagaaaaaaaaggccacaaaaguucccucucacuuucaguaaauaaaauaaaagcagcaacagaaauaaagaaauaaaugaaauucaaaaugaaauaaauauuguguugugcagcauuaaaaaaucaauaaaaauuaaaaaugagcaagaucuaaaaaaaaaaaaaaaaaaaaaaaaaaaaaaaaaaaaaaaaaaaaaaaaaaaaaaaaaaaaaaaaugcaucccccccccccccccccccccccccccccccaaaggcucuuuucagagccaccagaauu

SEQ ID NO: 7764 - RNA, 2196 nt, Artificial Sequence
  mRNA product Design f-1 comprising derived and/or modified sequence from HRSV(A2)__F_DSCav1_mut8 (opt11)
gggagagcggcucggccauuuugucccagucaguccggaggcugcggcugcagaaguaccgccugcggaguaacugcaaagaagcuuaccauggaacuccucauccuuaaagccaacgccauaaccaccauccucaccgccgucaccuucugcuucgcuucuggccaaaacauaaccgaagaguucuaccaauccacgugcucugccgugucaaaaggcuaccucggagcccuccgcacagggugguacacuuccgucaucaccaucgaacucucuaacaucaaagaaaucaagugcaacggcacagacgcgaaagucaagcucaucaaacaagaacuagacaaauacaaaaacgccguaacagaccuccaacuccuaaugcaguccacaccagccacaggcuccggcagcgccaucgccuccggcgucgcugucugcaaaguccuacaccucgaaggcgaagucaacaaaaucaagucagcccuccuuagcaccaacaaagcagucgucucuuuaagcgggugcggagucucuguccuaaccuuuaaaguacucgaccucaaaaacuacaucgacaaacaacuacuaccaauacuaaacaaacagagcugcuccauucccaacaucgaaaccguuaucgaguuccaacaaaagaacaaccgccuccucgaaaucacccgcgaguucuccgucaacgcaggcgucaccaccccagucuccaccuauaugcuaaccaacagcgaacuccucagccucaucaaugacaugccaaucaccaacgaccaaaagaaacucauguccaacaacguacagauaguccgccagcaguccuacagcaucaugugcaucaucaaagaagaagugcucgccuacgugguacaacucccucucuacggagucauugauacacccugcuggaaacuccacacaagcccccucugcacuacaaacaccaaagaaggcucuaacauaugccucacccgcacagaccgugguugguacugcgacaacgccggcuccguauccuucuuuccacaagcugaaaccugcaaaguucaaucaaaccgagucuucugcgacaccaugaacucccucacauugcccagcgaagucaaccucugcaacgucgacaucuucaaccccaaguacgacugcaaaaucaugaccuccaaaaccgacgucagcuccagcgugaucacaagccuaggcgcgaucgucagcugcuacggcaaaaccaaaugcacagccuccaacaaaugccgcggaaucauaaaaacauucaguaacggcugcgacuacguguccaauaaaggagucgacaccguauccgucggaaacacccucuacuacgucaacaaacaagaaggacaaucccucuaugucaaaggcgaacccauuaucaacuucuacgacccccuaguuuuccccuccgacgaguucgacgcaagcauuucccaagucaacgaaaagaucaaucaaucccucgccuucauacgcaaaagcgacgaacuacuacacaacguaaacgccggcaaaagcaccaccaacaucaugaucacaacaaucaucaucgucaucaucgucauccuacucucacucaucgccguuggccuacuacucuacugcaaagcccgcuccacacccgucacccucucaaaagaccaacucuccggcaucaacaacaucgcauucagcaacugaggacuagugaagggaacacccaaauuuaauucagccuuaagcacaauuaauuaagagugaaacguaauuguacaagcaguuggucacccaccauagggcaugaucaacaccgcaaccuuuccuuuuucccccagugauucugaaaaaccccucuucccuucagcuugcuuagauguuccaaauuuaguaagcuuaaggcggccuacagaagaaaaagaaaaaaaaggccacaaaaguucccucucacuuucaguaaauaaaauaaaagcagcaacagaaauaaagaaauaaaugaaauucaaaaugaaauaaauauuguguugugcagcauuaaaaaaucaauaaaaauuaaaaaugagcaagaucuaaaaaaaaaaaaaaaaaaaaaaaaaaaaaaaaaaaaaaaaaaaaaaaaaaaaaaaaaaaaaaaaugcaucccccccccccccccccccccccccccccccaaaggcucuuuucagagccaccagaauu

SEQ ID NO: 7765 - RNA, 1976 nt, Artificial Sequence
  mRNA product Design f-2 comprising derived and/or modified sequence from HRSV(A2)__F_DSCav1_mut8 (opt1)
gggagagcggcucggccauuuugucccagucaguccggaggcugcggcugcagaaguaccgccugcggaguaacugcaaagaagcuuaccauggagcugcucauccugaaggccaacgccaucaccaccauccugacggcggugaccuucugcuucgccagcggccagaacaucaccgaggaguucuaccaguccacgugcagcgccgucuccaagggguaccucggcgcccugcggaccggcugguacaccuccgugaucaccaucgagcugagcaacaucaaggagaucaagugcaacgggaccgacgccaaggugaagcucaucaagcaggagcuggacaaguacaagaacgcggucacggaccugcagcuccugaugcaguccaccccggcaaccggcuccggcuccgccaucgcgagcggcgucgccgugugcaaggugcugcaccucgagggggaggucaacaagaucaagagcgcccugcuguccaccaacaaggccguggugagccucuccggcugcggcgucagcgugcugaccuucaaggugcuggaccucaagaacuacaucgacaagcagcugcugcccauccugaacaagcagagcugcuccauccccaacaucgagacggugaucgaguuccagcagaagaacaaccggcuccuggagaucacccgcgaguucagcgugaacgccggggucaccacccccguguccacguacaugcugaccaacagcgagcuccugucccugaucaacgacaugccgaucaccaacgaccagaagaagcucaugagcaacaacgugcagaucguccggcagcaguccuacagcaucaugugcaucaucaaggaggaggugcuggcguacgugguccagcugccccucuacggcgugaucgacacccccugcuggaagcugcacacgagcccccugugcaccaccaacaccaaggagggguccaacaucugccucacgcgcaccgaccggggcugguacugcgacaacgccggcagcgucuccuucuucccgcaggccgagaccugcaaggugcagagcaaccgcguguucugcgacaccaugaacucccugacgcugcccagcgagguaaaccucugcaacgucgacaucuucaaccccaaguacgacugcaagaucaugaccuccaagaccgacgugagcuccagcgugaucaccucccugggggccaucgucagcugcuacggcaagacgaagugcaccgccagcaacaagugccgggggaucaucaagaccuucuccaacggcugcgacuacgugagcaacaagggcguggacaccguguccgucgggaacacccuguacuacgugaacaagcaggagggccagagccucuacgugaagggggagcccaucaucaacuucuacgacccgcuggucuuccccuccgacgaguucgacgcgagcaucucccaggugaacgagaagaucaaccagagccuggccuucauccgcaaguccgacgagcugcuccacaacgugaacgccggcaagagcacgaccaacaucaugaucaccaccaucaucaucgucaucaucgugauccugcugucccucaucgccguggggcugcugcucuacugcaaggcccggagcacgcccgucacccuguccaaggaccagcugagcggcaucaacaacaucgcguucuccaacugaggacuaguggaagcauuuuccuggcugauuaaaagaaauuacucagcuauggucaucuguuccuguuagaaggcuaugcagcauauuauauacuaugcgcauguuaugaaaugcauaauaaaaaauuuuaaaaaaucuaaaagaucuaaaaaaaaaaaaaaaaaaaaaaaaaaaaaaaaaaaaaaaaaaaaaaaaaaaaaaaaaaaaaaaaugcaucccccccccccccccccccccccccccccccaaaggcucuuuucagagccaccagaauu

SEQ ID NO: 7766 - RNA, 1976 nt, Artificial Sequence
  mRNA product Design f-2 comprising derived and/or modified sequence from HRSV(A2)__F_DSCav1_mut8 (opt1)
gggagagcggcucggccauuuugucccagucaguccggaggcugcggcugcagaaguaccgccugcggaguaacugcaaagaagcuuaccauggagcugcucauccugaaggccaacgccaucaccaccauccugacggcggugaccuucugcuucgccagcggccagaacaucaccgaggaguucuaccaguccacgugcagcgccgucuccaagggguaccucggcgcccugcgcaccgggugguacaccagcgugaucaccaucgagcuguccaacaucaaggagaucaagugcaacggcaccgacgccaaggugaagcucaucaagcaggagcuggacaaguacaagaacgcggucacggaccugcagcuccugaugcagagcacccccgccaccggguccggcagcgccaucgccuccggcguggcggugugcaagguccugcaccucgagggggaggugaacaagaucaagagcgcccugcuguccaccaacaaggccguggucagccucuccggcugcggggugagcgugcugacguucaagguccuggaccucaagaacuacaucgacaagcagcugcugccgauccucaacaagcaguccugcagcauccccaacaucgagaccgugaucgaguuccagcagaagaacaaccggcugcuggagaucacccgcgaguucuccgugaacgccggcgucaccacgcccgugagcaccuacaugcucaccaacuccgagcugcugagccucaucaacgacaugcccaucaccaacgaccagaagaagcugaugagcaacaacgugcagaucguccggcagcaguccuacagcaucaugugcaucaucaaggaggaggugcuggccuacgugguccagcucccgcuguacggggugaucgacacgcccugcuggaagcugcacaccagcccccucugcaccaccaacacgaaggagggcuccaacaucugccugacccgcaccgaccggggcugguacugcgacaacgcgggguccgugagcuucuucccccaggccgagaccugcaagguccaguccaaccgcguguucugcgacacgaugaacagccugacccucccguccgaggucaaccugugcaacguggacaucuucaaccccaaguacgacugcaagaucaugaccagcaagaccgacguguccagcuccgucaucacgagccugggcgccaucguguccugcuacgggaagaccaagugcaccgccagcaacaagugccggggcaucaucaagaccuucuccaacggcugcgacuacgugagcaacaagggggucgacacgguguccgugggcaacacccucuacuacgucaacaagcaggaggggcagagccuguacgugaagggcgagcccaucaucaacuucuacgacccccugguguucccgagcgacgaguucgacgccuccaucagccaggucaacgagaagaucaaccagucccucgcguucauccgcaagagcgacgagcugcugcacaacgugaacgccgggaaguccaccaccaacaucaugaucaccacgaucaucaucgugaucaucgucauccuccugagccugaucgccgugggccuccugcuguacugcaaggcccgguccacccccgugacccugagcaaggaccagcucuccggcaucaacaacaucgccuucagcaacugaggacuaguggaagcauuuuccuggcugauuaaaagaaauuacucagcuauggucaucuguuccuguuagaaggcuaugcagcauauuauauacuaugcgcauguuaugaaaugcauaauaaaaaauuuuaaaaaaucuaaaagaucuaaaaaaaaaaaaaaaaaaaaaaaaaaaaaaaaaaaaaaaaaaaaaaaaaaaaaaaaaaaaaaaaugcaucccccccccccccccccccccccccccccccaaaggcucuuuucagagccaccagaauu

SEQ ID NO: 7767 - RNA, 1976 nt, Artificial Sequence
  mRNA product Design f-2 comprising derived and/or modified sequence from HRSV(A2)__F_DSCav1_mut8 (opt2)
gggagagcggcucggccauuuugucccagucaguccggaggcugcggcugcagaaguaccgccugcggaguaacugcaaagaagcuuaccauggagcuccucauccucaaggccaacgccaucaccaccauccucaccgccgucaccuucugcuucgccuccggccagaacaucaccgaggaguucuaccaguccaccugcuccgccgucuccaagggcuaccucggcgcccuccgcaccggcugguacaccuccgucaucaccaucgagcucuccaacaucaaggagaucaagugcaacggcaccgacgccaaggucaagcucaucaagcaggagcucgacaaguacaagaacgccgucaccgaccuccagcuccucaugcaguccacccccgccaccggcuccggcuccgccaucgccuccggcgucgccgucugcaagguccuccaccucgagggcgaggucaacaagaucaaguccgcccuccucuccaccaacaaggccgucgucucccucuccggcugcggcgucuccguccucaccuucaagguccucgaccucaagaacuacaucgacaagcagcuccuccccauccucaacaagcaguccugcuccauccccaacaucgagaccgucaucgaguuccagcagaagaacaaccgccuccucgagaucacccgcgaguucuccgucaacgccggcgucaccacccccgucuccaccuacaugcucaccaacuccgagcuccucucccucaucaacgacaugcccaucaccaacgaccagaagaagcucauguccaacaacguccagaucguccgccagcaguccuacuccaucaugugcaucaucaaggaggagguccucgccuacgucguccagcucccccucuacggcgucaucgacacccccugcuggaagcuccacaccuccccccucugcaccaccaacaccaaggagggcuccaacaucugccucacccgcaccgaccgcggcugguacugcgacaacgccggcuccgucuccuucuucccccaggccgagaccugcaagguccaguccaaccgcgucuucugcgacaccaugaacucccucacccuccccuccgaggucaaccucugcaacgucgacaucuucaaccccaaguacgacugcaagaucaugaccuccaagaccgacgucuccuccuccgucaucaccucccucggcgccaucgucuccugcuacggcaagaccaagugcaccgccuccaacaagugccgcggcaucaucaagaccuucuccaacggcugcgacuacgucuccaacaagggcgucgacaccgucuccgucggcaacacccucuacuacgucaacaagcaggagggccagucccucuacgucaagggcgagcccaucaucaacuucuacgacccccucgucuuccccuccgacgaguucgacgccuccaucucccaggucaacgagaagaucaaccagucccucgccuucauccgcaaguccgacgagcuccuccacaacgucaacgccggcaaguccaccaccaacaucaugaucaccaccaucaucaucgucaucaucgucauccuccucucccucaucgccgucggccuccuccucuacugcaaggcccgcuccacccccgucacccucuccaaggaccagcucuccggcaucaacaacaucgccuucuccaacugaggacuaguggaagcauuuuccuggcugauuaaaagaaauuacucagcuauggucaucuguuccuguuagaaggcuaugcagcauauuauauacuaugcgcauguuaugaaaugcauaauaaaaaauuuuaaaaaaucuaaaagaucuaaaaaaaaaaaaaaaaaaaaaaaaaaaaaaaaaaaaaaaaaaaaaaaaaaaaaaaaaaaaaaaaugcaucccccccccccccccccccccccccccccccaaaggcucuuuucagagccaccagaauu

SEQ ID NO: 7768 - RNA, 1976 nt, Artificial Sequence
  mRNA product Design f-2 comprising derived and/or modified sequence from HRSV(A2)__F_DSCav1_mut8 (opt3)
gggagagcggcucggccauuuugucccagucaguccggaggcugcggcugcagaaguaccgccugcggaguaacugcaaagaagcuuaccauggagcugcucauccuuaaggccaacgcuauuaccacaauacugacugcagugacguucugcuuugccagcggccagaauaucaccgaagaguucuaccaauccacauguucugcggucucaaaaggguauuugggagcuuuaagaacugguugguacaccaguguuauuacaaucgaacugagcaacauuaaggagaucaaaugcaauggcaccgacgccaaggugaaacuaauaaagcaggaacucgauaaguauaaaaacgcaguaacugaccugcagcuucugaugcaguccacacccgccaccgggucuggaucggcuaucgcaucaggcguggccgucuguaagguguugcaccucgagggugagguuaauaaaauuaagagcgcucugcugaguacgaacaaagccguggucucccucucugggugcggagugagcguauuaacuuuuaagguucuggaucuuaagaauuacaucgacaaacaauugcugccuauucuaaacaagcaguccuguucaaucccaaauauagaaaccgugauugaguuccagcagaaaaacaauaggcuccuggaaaucacacgggaguuuagugucaacgcgggcgugacuaccccggugagcacauauaugcuuaccaauucugagcuguugucccucauuaacgauaugcccaucacgaaugaccaaaagaaacugaugucaaacaacguccagaucguucgccagcagagcuacaguauuaugugcauaaucaaggaagagguguuagcauauguagugcaacugccucucuacggcgucauugauacuccauguuggaaacuucauacaucuccccugugcaccacuaauacaaaggaaggguccaacaucuguuugacccgaacggaccguggaugguacugcgauaaugccgguagcgugucguucuuuccucaggcugagaccuguaagguucagucuaacagaguguucugcgacacaaugaacucccuaacucugccaucagaagucaaucucugcaauguggauauauuuaaccccaaauaugacuguaagauuaugaccaguaaaacagauguaagcuccucuguuaucacuagccugggcgccaucgugucaugcuacgggaagaccaaauguacagcaaguaauaagugcaggggaauuaucaagaccuucuccaacggcugugacuaugucagcaauaaagguguggacacugucucuguggggaacacgcuuuacuauguuaauaagcaagagggacagucacuguacgugaaaggcgagccuauuauaaacuuuuaugauccauugguauucccgagugacgaauuugaugcuagcaucucccaggucaaugagaagauuaaccagucucucgccuucauccggaaaucggacgaacuguuacacaacgugaaugcgggcaagagcacaaccaacaucaugauuacuaccauaaucauuguuaucauugugauccugcuaucccucauagccgucgggcugcuuuuguacugcaaggcacgcucaacacccgugacccugaguaaagaucaacucucuggaaucaauaacauugcuuucagcaauugaggacuaguggaagcauuuuccuggcugauuaaaagaaauuacucagcuauggucaucuguuccuguuagaaggcuaugcagcauauuauauacuaugcgcauguuaugaaaugcauaauaaaaaauuuuaaaaaaucuaaaagaucuaaaaaaaaaaaaaaaaaaaaaaaaaaaaaaaaaaaaaaaaaaaaaaaaaaaaaaaaaaaaaaaaugcaucccccccccccccccccccccccccccccccaaaggcucuuuucagagccaccagaauu

SEQ ID NO: 7769 - RNA, 1976 nt, Artificial Sequence
  mRNA product Design f-2 comprising derived and/or modified sequence from HRSV(A2)__F_DSCav1_mut8 (opt4)
gggagagcggcucggccauuuugucccagucaguccggaggcugcggcugcagaaguaccgccugcggaguaacugcaaagaagcuuaccauggagcugcugauccugaaggccaacgccaucaccaccauccugaccgccgugaccuucugcuucgccagcggccagaacaucaccgaggaguucuaccagagcaccugcagcgccgugagcaagggcuaccugggcgcccugagaaccggcugguacaccagcgugaucaccaucgagcugagcaacaucaaggagaucaagugcaacggcaccgacgccaaggugaagcugaucaagcaggagcuggacaaguacaagaacgccgugaccgaccugcagcugcugaugcagagcacccccgccaccggcagcggcagcgccaucgccagcggcguggccgugugcaaggugcugcaccuggagggcgaggugaacaagaucaagagcgcccugcugagcaccaacaaggccguggugagccugagcggcugcggcgugagcgugcugaccuucaaggugcuggaccugaagaacuacaucgacaagcagcugcugcccauccugaacaagcagagcugcagcauccccaacaucgagaccgugaucgaguuccagcagaagaacaacagacugcuggagaucaccagagaguucagcgugaacgccggcgugaccacccccgugagcaccuacaugcugaccaacagcgagcugcugagccugaucaacgacaugcccaucaccaacgaccagaagaagcugaugagcaacaacgugcagaucgugagacagcagagcuacagcaucaugugcaucaucaaggaggaggugcuggccuacguggugcagcugccccuguacggcgugaucgacacccccugcuggaagcugcacaccagcccccugugcaccaccaacaccaaggagggcagcaacaucugccugaccagaaccgacagaggcugguacugcgacaacgccggcagcgugagcuucuucccccaggccgagaccugcaaggugcagagcaacagaguguucugcgacaccaugaacagccugacccugcccagcgaggugaaccugugcaacguggacaucuucaaccccaaguacgacugcaagaucaugaccagcaagaccgacgugagcagcagcgugaucaccagccugggcgccaucgugagcugcuacggcaagaccaagugcaccgccagcaacaagugcagaggcaucaucaagaccuucagcaacggcugcgacuacgugagcaacaagggcguggacaccgugagcgugggcaacacccuguacuacgugaacaagcaggagggccagagccuguacgugaagggcgagcccaucaucaacuucuacgacccccugguguuccccagcgacgaguucgacgccagcaucagccaggugaacgagaagaucaaccagagccuggccuucaucagaaagagcgacgagcugcugcacaacgugaacgccggcaagagcaccaccaacaucaugaucaccaccaucaucaucgugaucaucgugauccugcugagccugaucgccgugggccugcugcuguacugcaaggccagaagcacccccgugacccugagcaaggaccagcugagcggcaucaacaacaucgccuucagcaacugaggacuaguggaagcauuuuccuggcugauuaaaagaaauuacucagcuauggucaucuguuccuguuagaaggcuaugcagcauauuauauacuaugcgcauguuaugaaaugcauaauaaaaaauuuuaaaaaaucuaaaagaucuaaaaaaaaaaaaaaaaaaaaaaaaaaaaaaaaaaaaaaaaaaaaaaaaaaaaaaaaaaaaaaaaugcaucccccccccccccccccccccccccccccccaaaggcucuuuucagagccaccagaauu

SEQ ID NO: 7770 - RNA, 1976 nt, Artificial Sequence
  mRNA product Design f-2 comprising derived and/or modified sequence from HRSV(A2)__F_DSCav1_mut8 (opt5)
gggagagcggcucggccauuuugucccagucaguccggaggcugcggcugcagaaguaccgccugcggaguaacugcaaagaagcuuaccauggagcugcucauccugaaggccaacgcuauuaccacaauccuuacggccgugaccuucugcuuugcgagcggccagaauauuacagaagaguucuaccaauccaccuguucugcugucagcaaaggguaucugggagcccucagaacaggcugguacaccuccguuaucacaauugaacugucuaacaucaaggagaucaaaugcaaugggaccgacgccaaggugaaacuuauuaagcaggaacuggauaaguauaaaaacgcugugacggaccuccagcugcugaugcagagcacccccgccacaggauccggcucugcuaucgccagcggggucgcgguguguaagguucuccaccuggagggagaggugaauaaaauuaaguccgcccuucugagcaccaacaaagcugucgugucucucuccggcugcggcguuagcgugcugacauuuaagguccuugaucugaagaauuacaucgacaaacaacuccugccuauucugaacaagcagucuuguuccaucccgaauauugaaaccgugaucgaguuccagcagaaaaacaaucggcuccuggaaaucacgcgcgaguuuagcgugaacgccggggucacaacccccguuucuacauauaugcuuaccaauuccgagcugcucagccugauuaacgauaugccuaucaccaaugaccaaaagaaacuuauguccaacaacgugcagauugugagacagcagucuuacagcaucaugugcauuaucaaggaagagguccuggcuuaugugguucaacucccccuguacggagugaucgauacaccuuguuggaaacugcauacgagcccccucugcaccacaaauaccaaggaaggcagcaacauuugucugacacggaccgaccgcgggugguacugcgauaaugccggaucugucuccuucuuuccucaggcggagacguguaaggugcagagcaacagaguuuucugcgacacaaugaacucucuuacccugccgagcgaagugaaucucugcaaugucgauaucuuuaaccccaaauaugacuguaagauuaugaccuccaaaacagaugugucuagcuccgucaucaccagccugggcgccauugugucuugcuacgggaagacaaaauguacggcuuccaauaagugccggggaaucaucaagaccuucagcaacggcugugacuauguuucuaauaaaggcguggacacagucuccguggggaacacccuuuacuauguuaauaagcaagagggacagagccuguacgugaaaggcgagccuauuaucaacuuuuaugauccccucgucuucccuuccgacgaauuugaugccucuauuagccaggugaaugagaagaucaaccagucccuggcuuucauucgcaaaucugacgaacugcuccacaacgugaaugccgggaaguccacaaccaacaucaugauuacgaccaucaucauuguuaucauugucauccugcuuucccugauugccgugggacuccugcuguacugcaaggcuagaagcacacccgugacccuuucuaaagaucaacucuccggcaucaauaacaucgcguucagcaauugaggacuaguggaagcauuuuccuggcugauuaaaagaaauuacucagcuauggucaucuguuccuguuagaaggcuaugcagcauauuauauacuaugcgcauguuaugaaaugcauaauaaaaaauuuuaaaaaaucuaaaagaucuaaaaaaaaaaaaaaaaaaaaaaaaaaaaaaaaaaaaaaaaaaaaaaaaaaaaaaaaaaaaaaaaugcaucccccccccccccccccccccccccccccccaaaggcucuuuucagagccaccagaauu

SEQ ID NO: 7771 - RNA, 1976 nt, Artificial Sequence
  mRNA product Design f-2 comprising derived and/or modified sequence from HRSV(A2)__F_DSCav1_mut8 (opt6)
gggagagcggcucggccauuuugucccagucaguccggaggcugcggcugcagaaguaccgccugcggaguaacugcaaagaagcuuaccauggaacuauuaauauuaaaagcaaacgcaaucacaacuauacuaacagcaguaacauucugcuuugccucaggucaaaacauaacagaggaauuuuaccaauccacaugcucugcuguaagcaaaggauaccucggagcauuaagaacuggaugguacaccucaguaauaacuauagaacuaucaaacauaaaagaaauaaaauguaauggcacagacgcaaaagugaaauuaaucaaacaagaacucgauaaauacaaaaaugccguaaccgaucuccaacuuuuaaugcaaagcacacccgcaacagguuccgggucagcaauagcaagcggaguugcaguaugcaaaguacuacacuuagaaggagaaguaaauaaaaucaaaucagccuuacuaucaacaaauaaagcaguuguaucacucucaggaugcggaguauccguacuaacauuuaaaguacuagaucuaaaaaacuacauagauaaacaacucuuaccaauacuaaauaaacaaucauguuccauacccaacauagaaaccguuaucgaauuucaacaaaaaaacaacagauuacuagaaaucacacgagaauuuucaguaaaugcuggagucacaacaccaguuaguacauacaugcucaccaauucagaacuacuaaguuuaauuaacgauaugccaauaacaaacgaccaaaaaaaacuaaugucaaauaacguacaaauaguaagacaacaaucauacucaaucaugugcauaauaaaagaagaaguacuagccuauguaguccaauuaccacucuacggcguaaucgacaccccaugcuggaaauuacacacaagcccauuaugcaccaccaacacaaaagaagguucaaacauuugcuuaaccagaaccgaucgaggaugguacugcgauaacgcaggaucugucuccuuuuucccacaagccgaaacaugcaaaguucaaucaaaccgaguuuucugugacacuaugaacucacucacacuuccaagcgaaguaaaccuaugcaacguagauauauuuaacccuaaauacgacugcaaaauaaugacaagcaaaacagacguuaguucaucaguaauuacaagucuaggcgcaauagugucaugcuacggaaaaacaaaaugcaccgcauccaauaaaugccgaggaaucauuaaaacauucucaaacggaugcgacuacgucagcaauaaaggaguagacacuguuucuguaggaaacacccuauacuauguaaacaaacaagaaggucaaucacuauacguaaagggagaaccaauuauaaauuuuuacgaccccuuaguauuuccaagugaugaauuugacgcaucuauaagucaaguuaacgaaaaaauuaaccaaucacuugcauuuauaagaaaaucagacgaacuacuccauaauguaaacgcagguaaaucaacaacaaacaucaugaucacaaccauaauaauaguaauaauuguaauauuacuaucacuaauagcaguaggauuacuacucuacugcaaagcuagaucuaccccggucacacucucaaaagaccaauuaucuggaauaaacaauauagcauucagcaacuaaggacuaguggaagcauuuuccuggcugauuaaaagaaauuacucagcuauggucaucuguuccuguuagaaggcuaugcagcauauuauauacuaugcgcauguuaugaaaugcauaauaaaaaauuuuaaaaaaucuaaaagaucuaaaaaaaaaaaaaaaaaaaaaaaaaaaaaaaaaaaaaaaaaaaaaaaaaaaaaaaaaaaaaaaaugcaucccccccccccccccccccccccccccccccaaaggcucuuuucagagccaccagaauu

SEQ ID NO: 7772 - RNA, 1976 nt, Artificial Sequence
  mRNA product Design f-2 comprising derived and/or modified sequence from HRSV(A2)__F_DSCav1_mut8 (opt11)
gggagagcggcucggccauuuugucccagucaguccggaggcugcggcugcagaaguaccgccugcggaguaacugcaaagaagcuuaccauggaacuccucauccuuaaagccaacgccauaaccaccauccucaccgccgucaccuucugcuucgcuucuggccaaaacauaaccgaagaguucuaccaauccacgugcucugccgugucaaaaggcuaccucggagcccuccgcacagggugguacacuuccgucaucaccaucgaacucucuaacaucaaagaaaucaagugcaacggcacagacgcgaaagucaagcucaucaaacaagaacuagacaaauacaaaaacgccguaacagaccuccaacuccuaaugcaguccacaccagccacaggcuccggcagcgccaucgccuccggcgucgcugucugcaaaguccuacaccucgaaggcgaagucaacaaaaucaagucagcccuccuuagcaccaacaaagcagucgucucuuuaagcgggugcggagucucuguccuaaccuuuaaaguacucgaccucaaaaacuacaucgacaaacaacuacuaccaauacuaaacaaacagagcugcuccauucccaacaucgaaaccguuaucgaguuccaacaaaagaacaaccgccuccucgaaaucacccgcgaguucuccgucaacgcaggcgucaccaccccagucuccaccuauaugcuaaccaacagcgaacuccucagccucaucaaugacaugccaaucaccaacgaccaaaagaaacucauguccaacaacguacagauaguccgccagcaguccuacagcaucaugugcaucaucaaagaagaagugcucgccuacgugguacaacucccucucuacggagucauugauacacccugcuggaaacuccacacaagcccccucugcacuacaaacaccaaagaaggcucuaacauaugccucacccgcacagaccgugguugguacugcgacaacgccggcuccguauccuucuuuccacaagcugaaaccugcaaaguucaaucaaaccgagucuucugcgacaccaugaacucccucacauugcccagcgaagucaaccucugcaacgucgacaucuucaaccccaaguacgacugcaaaaucaugaccuccaaaaccgacgucagcuccagcgugaucacaagccuaggcgcgaucgucagcugcuacggcaaaaccaaaugcacagccuccaacaaaugccgcggaaucauaaaaacauucaguaacggcugcgacuacguguccaauaaaggagucgacaccguauccgucggaaacacccucuacuacgucaacaaacaagaaggacaaucccucuaugucaaaggcgaacccauuaucaacuucuacgacccccuaguuuuccccuccgacgaguucgacgcaagcauuucccaagucaacgaaaagaucaaucaaucccucgccuucauacgcaaaagcgacgaacuacuacacaacguaaacgccggcaaaagcaccaccaacaucaugaucacaacaaucaucaucgucaucaucgucauccuacucucacucaucgccguuggccuacuacucuacugcaaagcccgcuccacacccgucacccucucaaaagaccaacucuccggcaucaacaacaucgcauucagcaacugaggacuaguggaagcauuuuccuggcugauuaaaagaaauuacucagcuauggucaucuguuccuguuagaaggcuaugcagcauauuauauacuaugcgcauguuaugaaaugcauaauaaaaaauuuuaaaaaaucuaaaagaucuaaaaaaaaaaaaaaaaaaaaaaaaaaaaaaaaaaaaaaaaaaaaaaaaaaaaaaaaaaaaaaaaugcaucccccccccccccccccccccccccccccccaaaggcucuuuucagagccaccagaauu

SEQ ID NO: 7773 - RNA, 1967 nt, Artificial Sequence
  mRNA product Design f-3 comprising derived and/or modified sequence from HRSV(A2)__F_DSCav1_mut8 (opt1)
gggagagucccgcagucggcguccagcggcucugcuuguucgugugugugucguugcaggccuuauucaagcuuaccauggagcugcucauccugaaggccaacgccaucaccaccauccugacggcggugaccuucugcuucgccagcggccagaacaucaccgaggaguucuaccaguccacgugcagcgccgucuccaagggguaccucggcgcccugcggaccggcugguacaccuccgugaucaccaucgagcugagcaacaucaaggagaucaagugcaacgggaccgacgccaaggugaagcucaucaagcaggagcuggacaaguacaagaacgcggucacggaccugcagcuccugaugcaguccaccccggcaaccggcuccggcuccgccaucgcgagcggcgucgccgugugcaaggugcugcaccucgagggggaggucaacaagaucaagagcgcccugcuguccaccaacaaggccguggugagccucuccggcugcggcgucagcgugcugaccuucaaggugcuggaccucaagaacuacaucgacaagcagcugcugcccauccugaacaagcagagcugcuccauccccaacaucgagacggugaucgaguuccagcagaagaacaaccggcuccuggagaucacccgcgaguucagcgugaacgccggggucaccacccccguguccacguacaugcugaccaacagcgagcuccugucccugaucaacgacaugccgaucaccaacgaccagaagaagcucaugagcaacaacgugcagaucguccggcagcaguccuacagcaucaugugcaucaucaaggaggaggugcuggcguacgugguccagcugccccucuacggcgugaucgacacccccugcuggaagcugcacacgagcccccugugcaccaccaacaccaaggagggguccaacaucugccucacgcgcaccgaccggggcugguacugcgacaacgccggcagcgucuccuucuucccgcaggccgagaccugcaaggugcagagcaaccgcguguucugcgacaccaugaacucccugacgcugcccagcgagguaaaccucugcaacgucgacaucuucaaccccaaguacgacugcaagaucaugaccuccaagaccgacgugagcuccagcgugaucaccucccugggggccaucgucagcugcuacggcaagacgaagugcaccgccagcaacaagugccgggggaucaucaagaccuucuccaacggcugcgacuacgugagcaacaagggcguggacaccguguccgucgggaacacccuguacuacgugaacaagcaggagggccagagccucuacgugaagggggagcccaucaucaacuucuacgacccgcuggucuuccccuccgacgaguucgacgcgagcaucucccaggugaacgagaagaucaaccagagccuggccuucauccgcaaguccgacgagcugcuccacaacgugaacgccggcaagagcacgaccaacaucaugaucaccaccaucaucaucgucaucaucgugauccugcugucccucaucgccguggggcugcugcucuacugcaaggcccggagcacgcccgucacccuguccaaggaccagcugagcggcaucaacaacaucgcguucuccaacugaggacuaguacuggcugcaucucccuuuccucuguccuccauccuucucccaggauggugaagggggaccugguacccagugauccccaccccaggauccuaaaucaugacuuaccugcuaauaaaaacucauuggaaaagugagaagaucuaaaaaaaaaaaaaaaaaaaaaaaaaaaaaaaaaaaaaaaaaaaaaaaaaaaaaaaaaaaaaaaaugcaucccccccccccccccccccccccccccccccaaaggcucuuuucagagccaccagaauu

SEQ ID NO: 7774 - RNA, 1967 nt, Artificial Sequence
  mRNA product Design f-3 comprising derived and/or modified sequence from HRSV(A2)__F_DSCav1_mut8 (opt1)
gggagagucccgcagucggcguccagcggcucugcuuguucgugugugugucguugcaggccuuauucaagcuuaccauggagcugcucauccugaaggccaacgccaucaccaccauccugacggcggugaccuucugcuucgccagcggccagaacaucaccgaggaguucuaccaguccacgugcagcgccgucuccaagggguaccucggcgcccugcgcaccgggugguacaccagcgugaucaccaucgagcuguccaacaucaaggagaucaagugcaacggcaccgacgccaaggugaagcucaucaagcaggagcuggacaaguacaagaacgcggucacggaccugcagcuccugaugcagagcacccccgccaccggguccggcagcgccaucgccuccggcguggcggugugcaagguccugcaccucgagggggaggugaacaagaucaagagcgcccugcuguccaccaacaaggccguggucagccucuccggcugcggggugagcgugcugacguucaagguccuggaccucaagaacuacaucgacaagcagcugcugccgauccucaacaagcaguccugcagcauccccaacaucgagaccgugaucgaguuccagcagaagaacaaccggcugcuggagaucacccgcgaguucuccgugaacgccggcgucaccacgcccgugagcaccuacaugcucaccaacuccgagcugcugagccucaucaacgacaugcccaucaccaacgaccagaagaagcugaugagcaacaacgugcagaucguccggcagcaguccuacagcaucaugugcaucaucaaggaggaggugcuggccuacgugguccagcucccgcuguacggggugaucgacacgcccugcuggaagcugcacaccagcccccucugcaccaccaacacgaaggagggcuccaacaucugccugacccgcaccgaccggggcugguacugcgacaacgcgggguccgugagcuucuucccccaggccgagaccugcaagguccaguccaaccgcguguucugcgacacgaugaacagccugacccucccguccgaggucaaccugugcaacguggacaucuucaaccccaaguacgacugcaagaucaugaccagcaagaccgacguguccagcuccgucaucacgagccugggcgccaucguguccugcuacgggaagaccaagugcaccgccagcaacaagugccggggcaucaucaagaccuucuccaacggcugcgacuacgugagcaacaagggggucgacacgguguccgugggcaacacccucuacuacgucaacaagcaggaggggcagagccuguacgugaagggcgagcccaucaucaacuucuacgacccccugguguucccgagcgacgaguucgacgccuccaucagccaggucaacgagaagaucaaccagucccucgcguucauccgcaagagcgacgagcugcugcacaacgugaacgccgggaaguccaccaccaacaucaugaucaccacgaucaucaucgugaucaucgucauccuccugagccugaucgccgugggccuccugcuguacugcaaggcccgguccacccccgugacccugagcaaggaccagcucuccggcaucaacaacaucgccuucagcaacugaggacuaguacuggcugcaucucccuuuccucuguccuccauccuucucccaggauggugaagggggaccugguacccagugauccccaccccaggauccuaaaucaugacuuaccugcuaauaaaaacucauuggaaaagugagaagaucuaaaaaaaaaaaaaaaaaaaaaaaaaaaaaaaaaaaaaaaaaaaaaaaaaaaaaaaaaaaaaaaaugcaucccccccccccccccccccccccccccccccaaaggcucuuuucagagccaccagaauu

SEQ ID NO: 7775 - RNA, 1967 nt, Artificial Sequence
  mRNA product Design f-3 comprising derived and/or modified sequence from HRSV(A2)__F_DSCav1_mut8 (opt2)
gggagagucccgcagucggcguccagcggcucugcuuguucgugugugugucguugcaggccuuauucaagcuuaccauggagcuccucauccucaaggccaacgccaucaccaccauccucaccgccgucaccuucugcuucgccuccggccagaacaucaccgaggaguucuaccaguccaccugcuccgccgucuccaagggcuaccucggcgcccuccgcaccggcugguacaccuccgucaucaccaucgagcucuccaacaucaaggagaucaagugcaacggcaccgacgccaaggucaagcucaucaagcaggagcucgacaaguacaagaacgccgucaccgaccuccagcuccucaugcaguccacccccgccaccggcuccggcuccgccaucgccuccggcgucgccgucugcaagguccuccaccucgagggcgaggucaacaagaucaaguccgcccuccucuccaccaacaaggccgucgucucccucuccggcugcggcgucuccguccucaccuucaagguccucgaccucaagaacuacaucgacaagcagcuccuccccauccucaacaagcaguccugcuccauccccaacaucgagaccgucaucgaguuccagcagaagaacaaccgccuccucgagaucacccgcgaguucuccgucaacgccggcgucaccacccccgucuccaccuacaugcucaccaacuccgagcuccucucccucaucaacgacaugcccaucaccaacgaccagaagaagcucauguccaacaacguccagaucguccgccagcaguccuacuccaucaugugcaucaucaaggaggagguccucgccuacgucguccagcucccccucuacggcgucaucgacacccccugcuggaagcuccacaccuccccccucugcaccaccaacaccaaggagggcuccaacaucugccucacccgcaccgaccgcggcugguacugcgacaacgccggcuccgucuccuucuucccccaggccgagaccugcaagguccaguccaaccgcgucuucugcgacaccaugaacucccucacccuccccuccgaggucaaccucugcaacgucgacaucuucaaccccaaguacgacugcaagaucaugaccuccaagaccgacgucuccuccuccgucaucaccucccucggcgccaucgucuccugcuacggcaagaccaagugcaccgccuccaacaagugccgcggcaucaucaagaccuucuccaacggcugcgacuacgucuccaacaagggcgucgacaccgucuccgucggcaacacccucuacuacgucaacaagcaggagggccagucccucuacgucaagggcgagcccaucaucaacuucuacgacccccucgucuuccccuccgacgaguucgacgccuccaucucccaggucaacgagaagaucaaccagucccucgccuucauccgcaaguccgacgagcuccuccacaacgucaacgccggcaaguccaccaccaacaucaugaucaccaccaucaucaucgucaucaucgucauccuccucucccucaucgccgucggccuccuccucuacugcaaggcccgcuccacccccgucacccucuccaaggaccagcucuccggcaucaacaacaucgccuucuccaacugaggacuaguacuggcugcaucucccuuuccucuguccuccauccuucucccaggauggugaagggggaccugguacccagugauccccaccccaggauccuaaaucaugacuuaccugcuaauaaaaacucauuggaaaagugagaagaucuaaaaaaaaaaaaaaaaaaaaaaaaaaaaaaaaaaaaaaaaaaaaaaaaaaaaaaaaaaaaaaaaugcaucccccccccccccccccccccccccccccccaaaggcucuuuucagagccaccagaauu

SEQ ID NO: 7776 - RNA, 1967 nt, Artificial Sequence
  mRNA product Design f-3 comprising derived and/or modified sequence from HRSV(A2)__F_DSCav1_mut8 (opt3)
gggagagucccgcagucggcguccagcggcucugcuuguucgugugugugucguugcaggccuuauucaagcuuaccauggagcugcucauccuuaaggccaacgcuauuaccacaauacugacugcagugacguucugcuuugccagcggccagaauaucaccgaagaguucuaccaauccacauguucugcggucucaaaaggguauuugggagcuuuaagaacugguugguacaccaguguuauuacaaucgaacugagcaacauuaaggagaucaaaugcaauggcaccgacgccaaggugaaacuaauaaagcaggaacucgauaaguauaaaaacgcaguaacugaccugcagcuucugaugcaguccacacccgccaccgggucuggaucggcuaucgcaucaggcguggccgucuguaagguguugcaccucgagggugagguuaauaaaauuaagagcgcucugcugaguacgaacaaagccguggucucccucucugggugcggagugagcguauuaacuuuuaagguucuggaucuuaagaauuacaucgacaaacaauugcugccuauucuaaacaagcaguccuguucaaucccaaauauagaaaccgugauugaguuccagcagaaaaacaauaggcuccuggaaaucacacgggaguuuagugucaacgcgggcgugacuaccccggugagcacauauaugcuuaccaauucugagcuguugucccucauuaacgauaugcccaucacgaaugaccaaaagaaacugaugucaaacaacguccagaucguucgccagcagagcuacaguauuaugugcauaaucaaggaagagguguuagcauauguagugcaacugccucucuacggcgucauugauacuccauguuggaaacuucauacaucuccccugugcaccacuaauacaaaggaaggguccaacaucuguuugacccgaacggaccguggaugguacugcgauaaugccgguagcgugucguucuuuccucaggcugagaccuguaagguucagucuaacagaguguucugcgacacaaugaacucccuaacucugccaucagaagucaaucucugcaauguggauauauuuaaccccaaauaugacuguaagauuaugaccaguaaaacagauguaagcuccucuguuaucacuagccugggcgccaucgugucaugcuacgggaagaccaaauguacagcaaguaauaagugcaggggaauuaucaagaccuucuccaacggcugugacuaugucagcaauaaagguguggacacugucucuguggggaacacgcuuuacuauguuaauaagcaagagggacagucacuguacgugaaaggcgagccuauuauaaacuuuuaugauccauugguauucccgagugacgaauuugaugcuagcaucucccaggucaaugagaagauuaaccagucucucgccuucauccggaaaucggacgaacuguuacacaacgugaaugcgggcaagagcacaaccaacaucaugauuacuaccauaaucauuguuaucauugugauccugcuaucccucauagccgucgggcugcuuuuguacugcaaggcacgcucaacacccgugacccugaguaaagaucaacucucuggaaucaauaacauugcuuucagcaauugaggacuaguacuggcugcaucucccuuuccucuguccuccauccuucucccaggauggugaagggggaccugguacccagugauccccaccccaggauccuaaaucaugacuuaccugcuaauaaaaacucauuggaaaagugagaagaucuaaaaaaaaaaaaaaaaaaaaaaaaaaaaaaaaaaaaaaaaaaaaaaaaaaaaaaaaaaaaaaaaugcaucccccccccccccccccccccccccccccccaaaggcucuuuucagagccaccagaauu

SEQ ID NO: 7777 - RNA, 1967 nt, Artificial Sequence
  mRNA product Design f-3 comprising derived and/or modified sequence from HRSV(A2)__F_DSCav1_mut8 (opt4)
gggagagucccgcagucggcguccagcggcucugcuuguucgugugugugucguugcaggccuuauucaagcuuaccauggagcugcugauccugaaggccaacgccaucaccaccauccugaccgccgugaccuucugcuucgccagcggccagaacaucaccgaggaguucuaccagagcaccugcagcgccgugagcaagggcuaccugggcgcccugagaaccggcugguacaccagcgugaucaccaucgagcugagcaacaucaaggagaucaagugcaacggcaccgacgccaaggugaagcugaucaagcaggagcuggacaaguacaagaacgccgugaccgaccugcagcugcugaugcagagcacccccgccaccggcagcggcagcgccaucgccagcggcguggccgugugcaaggugcugcaccuggagggcgaggugaacaagaucaagagcgcccugcugagcaccaacaaggccguggugagccugagcggcugcggcgugagcgugcugaccuucaaggugcuggaccugaagaacuacaucgacaagcagcugcugcccauccugaacaagcagagcugcagcauccccaacaucgagaccgugaucgaguuccagcagaagaacaacagacugcuggagaucaccagagaguucagcgugaacgccggcgugaccacccccgugagcaccuacaugcugaccaacagcgagcugcugagccugaucaacgacaugcccaucaccaacgaccagaagaagcugaugagcaacaacgugcagaucgugagacagcagagcuacagcaucaugugcaucaucaaggaggaggugcuggccuacguggugcagcugccccuguacggcgugaucgacacccccugcuggaagcugcacaccagcccccugugcaccaccaacaccaaggagggcagcaacaucugccugaccagaaccgacagaggcugguacugcgacaacgccggcagcgugagcuucuucccccaggccgagaccugcaaggugcagagcaacagaguguucugcgacaccaugaacagccugacccugcccagcgaggugaaccugugcaacguggacaucuucaaccccaaguacgacugcaagaucaugaccagcaagaccgacgugagcagcagcgugaucaccagccugggcgccaucgugagcugcuacggcaagaccaagugcaccgccagcaacaagugcagaggcaucaucaagaccuucagcaacggcugcgacuacgugagcaacaagggcguggacaccgugagcgugggcaacacccuguacuacgugaacaagcaggagggccagagccuguacgugaagggcgagcccaucaucaacuucuacgacccccugguguuccccagcgacgaguucgacgccagcaucagccaggugaacgagaagaucaaccagagccuggccuucaucagaaagagcgacgagcugcugcacaacgugaacgccggcaagagcaccaccaacaucaugaucaccaccaucaucaucgugaucaucgugauccugcugagccugaucgccgugggccugcugcuguacugcaaggccagaagcacccccgugacccugagcaaggaccagcugagcggcaucaacaacaucgccuucagcaacugaggacuaguacuggcugcaucucccuuuccucuguccuccauccuucucccaggauggugaagggggaccugguacccagugauccccaccccaggauccuaaaucaugacuuaccugcuaauaaaaacucauuggaaaagugagaagaucuaaaaaaaaaaaaaaaaaaaaaaaaaaaaaaaaaaaaaaaaaaaaaaaaaaaaaaaaaaaaaaaaugcaucccccccccccccccccccccccccccccccaaaggcucuuuucagagccaccagaauu

SEQ ID NO: 7778 - RNA, 1967 nt, Artificial Sequence
  mRNA product Design f-3 comprising derived and/or modified sequence from HRSV(A2)__F_DSCav1_mut8 (opt5)
gggagagucccgcagucggcguccagcggcucugcuuguucgugugugugucguugcaggccuuauucaagcuuaccauggagcugcucauccugaaggccaacgcuauuaccacaauccuuacggccgugaccuucugcuuugcgagcggccagaauauuacagaagaguucuaccaauccaccuguucugcugucagcaaaggguaucugggagcccucagaacaggcugguacaccuccguuaucacaauugaacugucuaacaucaaggagaucaaaugcaaugggaccgacgccaaggugaaacuuauuaagcaggaacuggauaaguauaaaaacgcugugacggaccuccagcugcugaugcagagcacccccgccacaggauccggcucugcuaucgccagcggggucgcgguguguaagguucuccaccuggagggagaggugaauaaaauuaaguccgcccuucugagcaccaacaaagcugucgugucucucuccggcugcggcguuagcgugcugacauuuaagguccuugaucugaagaauuacaucgacaaacaacuccugccuauucugaacaagcagucuuguuccaucccgaauauugaaaccgugaucgaguuccagcagaaaaacaaucggcuccuggaaaucacgcgcgaguuuagcgugaacgccggggucacaacccccguuucuacauauaugcuuaccaauuccgagcugcucagccugauuaacgauaugccuaucaccaaugaccaaaagaaacuuauguccaacaacgugcagauugugagacagcagucuuacagcaucaugugcauuaucaaggaagagguccuggcuuaugugguucaacucccccuguacggagugaucgauacaccuuguuggaaacugcauacgagcccccucugcaccacaaauaccaaggaaggcagcaacauuugucugacacggaccgaccgcgggugguacugcgauaaugccggaucugucuccuucuuuccucaggcggagacguguaaggugcagagcaacagaguuuucugcgacacaaugaacucucuuacccugccgagcgaagugaaucucugcaaugucgauaucuuuaaccccaaauaugacuguaagauuaugaccuccaaaacagaugugucuagcuccgucaucaccagccugggcgccauugugucuugcuacgggaagacaaaauguacggcuuccaauaagugccggggaaucaucaagaccuucagcaacggcugugacuauguuucuaauaaaggcguggacacagucuccguggggaacacccuuuacuauguuaauaagcaagagggacagagccuguacgugaaaggcgagccuauuaucaacuuuuaugauccccucgucuucccuuccgacgaauuugaugccucuauuagccaggugaaugagaagaucaaccagucccuggcuuucauucgcaaaucugacgaacugcuccacaacgugaaugccgggaaguccacaaccaacaucaugauuacgaccaucaucauuguuaucauugucauccugcuuucccugauugccgugggacuccugcuguacugcaaggcuagaagcacacccgugacccuuucuaaagaucaacucuccggcaucaauaacaucgcguucagcaauugaggacuaguacuggcugcaucucccuuuccucuguccuccauccuucucccaggauggugaagggggaccugguacccagugauccccaccccaggauccuaaaucaugacuuaccugcuaauaaaaacucauuggaaaagugagaagaucuaaaaaaaaaaaaaaaaaaaaaaaaaaaaaaaaaaaaaaaaaaaaaaaaaaaaaaaaaaaaaaaaugcaucccccccccccccccccccccccccccccccaaaggcucuuuucagagccaccagaauu

SEQ ID NO: 7779 - RNA, 1967 nt, Artificial Sequence
  mRNA product Design f-3 comprising derived and/or modified sequence from HRSV(A2)__F_DSCav1_mut8 (opt6)
gggagagucccgcagucggcguccagcggcucugcuuguucgugugugugucguugcaggccuuauucaagcuuaccauggaacuauuaauauuaaaagcaaacgcaaucacaacuauacuaacagcaguaacauucugcuuugccucaggucaaaacauaacagaggaauuuuaccaauccacaugcucugcuguaagcaaaggauaccucggagcauuaagaacuggaugguacaccucaguaauaacuauagaacuaucaaacauaaaagaaauaaaauguaauggcacagacgcaaaagugaaauuaaucaaacaagaacucgauaaauacaaaaaugccguaaccgaucuccaacuuuuaaugcaaagcacacccgcaacagguuccgggucagcaauagcaagcggaguugcaguaugcaaaguacuacacuuagaaggagaaguaaauaaaaucaaaucagccuuacuaucaacaaauaaagcaguuguaucacucucaggaugcggaguauccguacuaacauuuaaaguacuagaucuaaaaaacuacauagauaaacaacucuuaccaauacuaaauaaacaaucauguuccauacccaacauagaaaccguuaucgaauuucaacaaaaaaacaacagauuacuagaaaucacacgagaauuuucaguaaaugcuggagucacaacaccaguuaguacauacaugcucaccaauucagaacuacuaaguuuaauuaacgauaugccaauaacaaacgaccaaaaaaaacuaaugucaaauaacguacaaauaguaagacaacaaucauacucaaucaugugcauaauaaaagaagaaguacuagccuauguaguccaauuaccacucuacggcguaaucgacaccccaugcuggaaauuacacacaagcccauuaugcaccaccaacacaaaagaagguucaaacauuugcuuaaccagaaccgaucgaggaugguacugcgauaacgcaggaucugucuccuuuuucccacaagccgaaacaugcaaaguucaaucaaaccgaguuuucugugacacuaugaacucacucacacuuccaagcgaaguaaaccuaugcaacguagauauauuuaacccuaaauacgacugcaaaauaaugacaagcaaaacagacguuaguucaucaguaauuacaagucuaggcgcaauagugucaugcuacggaaaaacaaaaugcaccgcauccaauaaaugccgaggaaucauuaaaacauucucaaacggaugcgacuacgucagcaauaaaggaguagacacuguuucuguaggaaacacccuauacuauguaaacaaacaagaaggucaaucacuauacguaaagggagaaccaauuauaaauuuuuacgaccccuuaguauuuccaagugaugaauuugacgcaucuauaagucaaguuaacgaaaaaauuaaccaaucacuugcauuuauaagaaaaucagacgaacuacuccauaauguaaacgcagguaaaucaacaacaaacaucaugaucacaaccauaauaauaguaauaauuguaauauuacuaucacuaauagcaguaggauuacuacucuacugcaaagcuagaucuaccccggucacacucucaaaagaccaauuaucuggaauaaacaauauagcauucagcaacuaaggacuaguacuggcugcaucucccuuuccucuguccuccauccuucucccaggauggugaagggggaccugguacccagugauccccaccccaggauccuaaaucaugacuuaccugcuaauaaaaacucauuggaaaagugagaagaucuaaaaaaaaaaaaaaaaaaaaaaaaaaaaaaaaaaaaaaaaaaaaaaaaaaaaaaaaaaaaaaaaugcaucccccccccccccccccccccccccccccccaaaggcucuuuucagagccaccagaauu

SEQ ID NO: 7780 - RNA, 1967 nt, Artificial Sequence
  mRNA product Design f-3 comprising derived and/or modified sequence from HRSV(A2)__F_DSCav1_mut8 (opt11)
gggagagucccgcagucggcguccagcggcucugcuuguucgugugugugucguugcaggccuuauucaagcuuaccauggaacuccucauccuuaaagccaacgccauaaccaccauccucaccgccgucaccuucugcuucgcuucuggccaaaacauaaccgaagaguucuaccaauccacgugcucugccgugucaaaaggcuaccucggagcccuccgcacagggugguacacuuccgucaucaccaucgaacucucuaacaucaaagaaaucaagugcaacggcacagacgcgaaagucaagcucaucaaacaagaacuagacaaauacaaaaacgccguaacagaccuccaacuccuaaugcaguccacaccagccacaggcuccggcagcgccaucgccuccggcgucgcugucugcaaaguccuacaccucgaaggcgaagucaacaaaaucaagucagcccuccuuagcaccaacaaagcagucgucucuuuaagcgggugcggagucucuguccuaaccuuuaaaguacucgaccucaaaaacuacaucgacaaacaacuacuaccaauacuaaacaaacagagcugcuccauucccaacaucgaaaccguuaucgaguuccaacaaaagaacaaccgccuccucgaaaucacccgcgaguucuccgucaacgcaggcgucaccaccccagucuccaccuauaugcuaaccaacagcgaacuccucagccucaucaaugacaugccaaucaccaacgaccaaaagaaacucauguccaacaacguacagauaguccgccagcaguccuacagcaucaugugcaucaucaaagaagaagugcucgccuacgugguacaacucccucucuacggagucauugauacacccugcuggaaacuccacacaagcccccucugcacuacaaacaccaaagaaggcucuaacauaugccucacccgcacagaccgugguugguacugcgacaacgccggcuccguauccuucuuuccacaagcugaaaccugcaaaguucaaucaaaccgagucuucugcgacaccaugaacucccucacauugcccagcgaagucaaccucugcaacgucgacaucuucaaccccaaguacgacugcaaaaucaugaccuccaaaaccgacgucagcuccagcgugaucacaagccuaggcgcgaucgucagcugcuacggcaaaaccaaaugcacagccuccaacaaaugccgcggaaucauaaaaacauucaguaacggcugcgacuacguguccaauaaaggagucgacaccguauccgucggaaacacccucuacuacgucaacaaacaagaaggacaaucccucuaugucaaaggcgaacccauuaucaacuucuacgacccccuaguuuuccccuccgacgaguucgacgcaagcauuucccaagucaacgaaaagaucaaucaaucccucgccuucauacgcaaaagcgacgaacuacuacacaacguaaacgccggcaaaagcaccaccaacaucaugaucacaacaaucaucaucgucaucaucgucauccuacucucacucaucgccguuggccuacuacucuacugcaaagcccgcuccacacccgucacccucucaaaagaccaacucuccggcaucaacaacaucgcauucagcaacugaggacuaguacuggcugcaucucccuuuccucuguccuccauccuucucccaggauggugaagggggaccugguacccagugauccccaccccaggauccuaaaucaugacuuaccugcuaauaaaaacucauuggaaaagugagaagaucuaaaaaaaaaaaaaaaaaaaaaaaaaaaaaaaaaaaaaaaaaaaaaaaaaaaaaaaaaaaaaaaaugcaucccccccccccccccccccccccccccccccaaaggcucuuuucagagccaccagaauu

SEQ ID NO: 7781 - RNA, 2183 nt, Artificial Sequence
  mRNA product Design f-4 comprising derived and/or modified sequence from HRSV(A2)__F_DSCav1_mut8 (opt1)
gggagagucccgcagucggcguccagcggcucugcuuguucgugugugugucguugcaggccuuauucaagcuuaccauggagcugcucauccugaaggccaacgccaucaccaccauccugacggcggugaccuucugcuucgccagcggccagaacaucaccgaggaguucuaccaguccacgugcagcgccgucuccaagggguaccucggcgcccugcggaccggcugguacaccuccgugaucaccaucgagcugagcaacaucaaggagaucaagugcaacgggaccgacgccaaggugaagcucaucaagcaggagcuggacaaguacaagaacgcggucacggaccugcagcuccugaugcaguccaccccggcaaccggcuccggcuccgccaucgcgagcggcgucgccgugugcaaggugcugcaccucgagggggaggucaacaagaucaagagcgcccugcuguccaccaacaaggccguggugagccucuccggcugcggcgucagcgugcugaccuucaaggugcuggaccucaagaacuacaucgacaagcagcugcugcccauccugaacaagcagagcugcuccauccccaacaucgagacggugaucgaguuccagcagaagaacaaccggcuccuggagaucacccgcgaguucagcgugaacgccggggucaccacccccguguccacguacaugcugaccaacagcgagcuccugucccugaucaacgacaugccgaucaccaacgaccagaagaagcucaugagcaacaacgugcagaucguccggcagcaguccuacagcaucaugugcaucaucaaggaggaggugcuggcguacgugguccagcugccccucuacggcgugaucgacacccccugcuggaagcugcacacgagcccccugugcaccaccaacaccaaggagggguccaacaucugccucacgcgcaccgaccggggcugguacugcgacaacgccggcagcgucuccuucuucccgcaggccgagaccugcaaggugcagagcaaccgcguguucugcgacaccaugaacucccugacgcugcccagcgagguaaaccucugcaacgucgacaucuucaaccccaaguacgacugcaagaucaugaccuccaagaccgacgugagcuccagcgugaucaccucccugggggccaucgucagcugcuacggcaagacgaagugcaccgccagcaacaagugccgggggaucaucaagaccuucuccaacggcugcgacuacgugagcaacaagggcguggacaccguguccgucgggaacacccuguacuacgugaacaagcaggagggccagagccucuacgugaagggggagcccaucaucaacuucuacgacccgcuggucuuccccuccgacgaguucgacgcgagcaucucccaggugaacgagaagaucaaccagagccuggccuucauccgcaaguccgacgagcugcuccacaacgugaacgccggcaagagcacgaccaacaucaugaucaccaccaucaucaucgucaucaucgugauccugcugucccucaucgccguggggcugcugcucuacugcaaggcccggagcacgcccgucacccuguccaaggaccagcugagcggcaucaacaacaucgcguucuccaacugaggacuagugaagggaacacccaaauuuaauucagccuuaagcacaauuaauuaagagugaaacguaauuguacaagcaguuggucacccaccauagggcaugaucaacaccgcaaccuuuccuuuuucccccagugauucugaaaaaccccucuucccuucagcuugcuuagauguuccaaauuuaguaagcuuaaggcggccuacagaagaaaaagaaaaaaaaggccacaaaaguucccucucacuuucaguaaauaaaauaaaagcagcaacagaaauaaagaaauaaaugaaauucaaaaugaaauaaauauuguguugugcagcauuaaaaaaucaauaaaaauuaaaaaugagcaagaucuaaaaaaaaaaaaaaaaaaaaaaaaaaaaaaaaaaaaaaaaaaaaaaaaaaaaaaaaaaaaaaaaugcaucccccccccccccccccccccccccccccccaaaggcucuuuucagagccaccagaauu

SEQ ID NO: 7782 - RNA, 2183 nt, Artificial Sequence
  mRNA product Design f-4 comprising derived and/or modified sequence from HRSV(A2)__F_DSCav1_mut8 (opt1)
gggagagucccgcagucggcguccagcggcucugcuuguucgugugugugucguugcaggccuuauucaagcuuaccauggagcugcucauccugaaggccaacgccaucaccaccauccugacggcggugaccuucugcuucgccagcggccagaacaucaccgaggaguucuaccaguccacgugcagcgccgucuccaagggguaccucggcgcccugcgcaccgggugguacaccagcgugaucaccaucgagcuguccaacaucaaggagaucaagugcaacggcaccgacgccaaggugaagcucaucaagcaggagcuggacaaguacaagaacgcggucacggaccugcagcuccugaugcagagcacccccgccaccggguccggcagcgccaucgccuccggcguggcggugugcaagguccugcaccucgagggggaggugaacaagaucaagagcgcccugcuguccaccaacaaggccguggucagccucuccggcugcggggugagcgugcugacguucaagguccuggaccucaagaacuacaucgacaagcagcugcugccgauccucaacaagcaguccugcagcauccccaacaucgagaccgugaucgaguuccagcagaagaacaaccggcugcuggagaucacccgcgaguucuccgugaacgccggcgucaccacgcccgugagcaccuacaugcucaccaacuccgagcugcugagccucaucaacgacaugcccaucaccaacgaccagaagaagcugaugagcaacaacgugcagaucguccggcagcaguccuacagcaucaugugcaucaucaaggaggaggugcuggccuacgugguccagcucccgcuguacggggugaucgacacgcccugcuggaagcugcacaccagcccccucugcaccaccaacacgaaggagggcuccaacaucugccugacccgcaccgaccggggcugguacugcgacaacgcgggguccgugagcuucuucccccaggccgagaccugcaagguccaguccaaccgcguguucugcgacacgaugaacagccugacccucccguccgaggucaaccugugcaacguggacaucuucaaccccaaguacgacugcaagaucaugaccagcaagaccgacguguccagcuccgucaucacgagccugggcgccaucguguccugcuacgggaagaccaagugcaccgccagcaacaagugccggggcaucaucaagaccuucuccaacggcugcgacuacgugagcaacaagggggucgacacgguguccgugggcaacacccucuacuacgucaacaagcaggaggggcagagccuguacgugaagggcgagcccaucaucaacuucuacgacccccugguguucccgagcgacgaguucgacgccuccaucagccaggucaacgagaagaucaaccagucccucgcguucauccgcaagagcgacgagcugcugcacaacgugaacgccgggaaguccaccaccaacaucaugaucaccacgaucaucaucgugaucaucgucauccuccugagccugaucgccgugggccuccugcuguacugcaaggcccgguccacccccgugacccugagcaaggaccagcucuccggcaucaacaacaucgccuucagcaacugaggacuagugaagggaacacccaaauuuaauucagccuuaagcacaauuaauuaagagugaaacguaauuguacaagcaguuggucacccaccauagggcaugaucaacaccgcaaccuuuccuuuuucccccagugauucugaaaaaccccucuucccuucagcuugcuuagauguuccaaauuuaguaagcuuaaggcggccuacagaagaaaaagaaaaaaaaggccacaaaaguucccucucacuuucaguaaauaaaauaaaagcagcaacagaaauaaagaaauaaaugaaauucaaaaugaaauaaauauuguguugugcagcauuaaaaaaucaauaaaaauuaaaaaugagcaagaucuaaaaaaaaaaaaaaaaaaaaaaaaaaaaaaaaaaaaaaaaaaaaaaaaaaaaaaaaaaaaaaaaugcaucccccccccccccccccccccccccccccccaaaggcucuuuucagagccaccagaauu

SEQ ID NO: 7783 - RNA, 2183 nt, Artificial Sequence
  mRNA product Design f-4 comprising derived and/or modified sequence from HRSV(A2)__F_DSCav1_mut8 (opt2)
gggagagucccgcagucggcguccagcggcucugcuuguucgugugugugucguugcaggccuuauucaagcuuaccauggagcuccucauccucaaggccaacgccaucaccaccauccucaccgccgucaccuucugcuucgccuccggccagaacaucaccgaggaguucuaccaguccaccugcuccgccgucuccaagggcuaccucggcgcccuccgcaccggcugguacaccuccgucaucaccaucgagcucuccaacaucaaggagaucaagugcaacggcaccgacgccaaggucaagcucaucaagcaggagcucgacaaguacaagaacgccgucaccgaccuccagcuccucaugcaguccacccccgccaccggcuccggcuccgccaucgccuccggcgucgccgucugcaagguccuccaccucgagggcgaggucaacaagaucaaguccgcccuccucuccaccaacaaggccgucgucucccucuccggcugcggcgucuccguccucaccuucaagguccucgaccucaagaacuacaucgacaagcagcuccuccccauccucaacaagcaguccugcuccauccccaacaucgagaccgucaucgaguuccagcagaagaacaaccgccuccucgagaucacccgcgaguucuccgucaacgccggcgucaccacccccgucuccaccuacaugcucaccaacuccgagcuccucucccucaucaacgacaugcccaucaccaacgaccagaagaagcucauguccaacaacguccagaucguccgccagcaguccuacuccaucaugugcaucaucaaggaggagguccucgccuacgucguccagcucccccucuacggcgucaucgacacccccugcuggaagcuccacaccuccccccucugcaccaccaacaccaaggagggcuccaacaucugccucacccgcaccgaccgcggcugguacugcgacaacgccggcuccgucuccuucuucccccaggccgagaccugcaagguccaguccaaccgcgucuucugcgacaccaugaacucccucacccuccccuccgaggucaaccucugcaacgucgacaucuucaaccccaaguacgacugcaagaucaugaccuccaagaccgacgucuccuccuccgucaucaccucccucggcgccaucgucuccugcuacggcaagaccaagugcaccgccuccaacaagugccgcggcaucaucaagaccuucuccaacggcugcgacuacgucuccaacaagggcgucgacaccgucuccgucggcaacacccucuacuacgucaacaagcaggagggccagucccucuacgucaagggcgagcccaucaucaacuucuacgacccccucgucuuccccuccgacgaguucgacgccuccaucucccaggucaacgagaagaucaaccagucccucgccuucauccgcaaguccgacgagcuccuccacaacgucaacgccggcaaguccaccaccaacaucaugaucaccaccaucaucaucgucaucaucgucauccuccucucccucaucgccgucggccuccuccucuacugcaaggcccgcuccacccccgucacccucuccaaggaccagcucuccggcaucaacaacaucgccuucuccaacugaggacuagugaagggaacacccaaauuuaauucagccuuaagcacaauuaauuaagagugaaacguaauuguacaagcaguuggucacccaccauagggcaugaucaacaccgcaaccuuuccuuuuucccccagugauucugaaaaaccccucuucccuucagcuugcuuagauguuccaaauuuaguaagcuuaaggcggccuacagaagaaaaagaaaaaaaaggccacaaaaguucccucucacuuucaguaaauaaaauaaaagcagcaacagaaauaaagaaauaaaugaaauucaaaaugaaauaaauauuguguugugcagcauuaaaaaaucaauaaaaauuaaaaaugagcaagaucuaaaaaaaaaaaaaaaaaaaaaaaaaaaaaaaaaaaaaaaaaaaaaaaaaaaaaaaaaaaaaaaaugcaucccccccccccccccccccccccccccccccaaaggcucuuuucagagccaccagaauu

SEQ ID NO: 7784 - RNA, 2183 nt, Artificial Sequence
  mRNA product Design f-4 comprising derived and/or modified sequence from HRSV(A2)__F_DSCav1_mut8 (opt3)
gggagagucccgcagucggcguccagcggcucugcuuguucgugugugugucguugcaggccuuauucaagcuuaccauggagcugcucauccuuaaggccaacgcuauuaccacaauacugacugcagugacguucugcuuugccagcggccagaauaucaccgaagaguucuaccaauccacauguucugcggucucaaaaggguauuugggagcuuuaagaacugguugguacaccaguguuauuacaaucgaacugagcaacauuaaggagaucaaaugcaauggcaccgacgccaaggugaaacuaauaaagcaggaacucgauaaguauaaaaacgcaguaacugaccugcagcuucugaugcaguccacacccgccaccgggucuggaucggcuaucgcaucaggcguggccgucuguaagguguugcaccucgagggugagguuaauaaaauuaagagcgcucugcugaguacgaacaaagccguggucucccucucugggugcggagugagcguauuaacuuuuaagguucuggaucuuaagaauuacaucgacaaacaauugcugccuauucuaaacaagcaguccuguucaaucccaaauauagaaaccgugauugaguuccagcagaaaaacaauaggcuccuggaaaucacacgggaguuuagugucaacgcgggcgugacuaccccggugagcacauauaugcuuaccaauucugagcuguugucccucauuaacgauaugcccaucacgaaugaccaaaagaaacugaugucaaacaacguccagaucguucgccagcagagcuacaguauuaugugcauaaucaaggaagagguguuagcauauguagugcaacugccucucuacggcgucauugauacuccauguuggaaacuucauacaucuccccugugcaccacuaauacaaaggaaggguccaacaucuguuugacccgaacggaccguggaugguacugcgauaaugccgguagcgugucguucuuuccucaggcugagaccuguaagguucagucuaacagaguguucugcgacacaaugaacucccuaacucugccaucagaagucaaucucugcaauguggauauauuuaaccccaaauaugacuguaagauuaugaccaguaaaacagauguaagcuccucuguuaucacuagccugggcgccaucgugucaugcuacgggaagaccaaauguacagcaaguaauaagugcaggggaauuaucaagaccuucuccaacggcugugacuaugucagcaauaaagguguggacacugucucuguggggaacacgcuuuacuauguuaauaagcaagagggacagucacuguacgugaaaggcgagccuauuauaaacuuuuaugauccauugguauucccgagugacgaauuugaugcuagcaucucccaggucaaugagaagauuaaccagucucucgccuucauccggaaaucggacgaacuguuacacaacgugaaugcgggcaagagcacaaccaacaucaugauuacuaccauaaucauuguuaucauugugauccugcuaucccucauagccgucgggcugcuuuuguacugcaaggcacgcucaacacccgugacccugaguaaagaucaacucucuggaaucaauaacauugcuuucagcaauugaggacuagugaagggaacacccaaauuuaauucagccuuaagcacaauuaauuaagagugaaacguaauuguacaagcaguuggucacccaccauagggcaugaucaacaccgcaaccuuuccuuuuucccccagugauucugaaaaaccccucuucccuucagcuugcuuagauguuccaaauuuaguaagcuuaaggcggccuacagaagaaaaagaaaaaaaaggccacaaaaguucccucucacuuucaguaaauaaaauaaaagcagcaacagaaauaaagaaauaaaugaaauucaaaaugaaauaaauauuguguugugcagcauuaaaaaaucaauaaaaauuaaaaaugagcaagaucuaaaaaaaaaaaaaaaaaaaaaaaaaaaaaaaaaaaaaaaaaaaaaaaaaaaaaaaaaaaaaaaaugcaucccccccccccccccccccccccccccccccaaaggcucuuuucagagccaccagaauu

SEQ ID NO: 7785 - RNA, 2183 nt, Artificial Sequence
  mRNA product Design f-4 comprising derived and/or modified sequence from HRSV(A2)__F_DSCav1_mut8 (opt4)
gggagagucccgcagucggcguccagcggcucugcuuguucgugugugugucguugcaggccuuauucaagcuuaccauggagcugcugauccugaaggccaacgccaucaccaccauccugaccgccgugaccuucugcuucgccagcggccagaacaucaccgaggaguucuaccagagcaccugcagcgccgugagcaagggcuaccugggcgcccugagaaccggcugguacaccagcgugaucaccaucgagcugagcaacaucaaggagaucaagugcaacggcaccgacgccaaggugaagcugaucaagcaggagcuggacaaguacaagaacgccgugaccgaccugcagcugcugaugcagagcacccccgccaccggcagcggcagcgccaucgccagcggcguggccgugugcaaggugcugcaccuggagggcgaggugaacaagaucaagagcgcccugcugagcaccaacaaggccguggugagccugagcggcugcggcgugagcgugcugaccuucaaggugcuggaccugaagaacuacaucgacaagcagcugcugcccauccugaacaagcagagcugcagcauccccaacaucgagaccgugaucgaguuccagcagaagaacaacagacugcuggagaucaccagagaguucagcgugaacgccggcgugaccacccccgugagcaccuacaugcugaccaacagcgagcugcugagccugaucaacgacaugcccaucaccaacgaccagaagaagcugaugagcaacaacgugcagaucgugagacagcagagcuacagcaucaugugcaucaucaaggaggaggugcuggccuacguggugcagcugccccuguacggcgugaucgacacccccugcuggaagcugcacaccagcccccugugcaccaccaacaccaaggagggcagcaacaucugccugaccagaaccgacagaggcugguacugcgacaacgccggcagcgugagcuucuucccccaggccgagaccugcaaggugcagagcaacagaguguucugcgacaccaugaacagccugacccugcccagcgaggugaaccugugcaacguggacaucuucaaccccaaguacgacugcaagaucaugaccagcaagaccgacgugagcagcagcgugaucaccagccugggcgccaucgugagcugcuacggcaagaccaagugcaccgccagcaacaagugcagaggcaucaucaagaccuucagcaacggcugcgacuacgugagcaacaagggcguggacaccgugagcgugggcaacacccuguacuacgugaacaagcaggagggccagagccuguacgugaagggcgagcccaucaucaacuucuacgacccccugguguuccccagcgacgaguucgacgccagcaucagccaggugaacgagaagaucaaccagagccuggccuucaucagaaagagcgacgagcugcugcacaacgugaacgccggcaagagcaccaccaacaucaugaucaccaccaucaucaucgugaucaucgugauccugcugagccugaucgccgugggccugcugcuguacugcaaggccagaagcacccccgugacccugagcaaggaccagcugagcggcaucaacaacaucgccuucagcaacugaggacuagugaagggaacacccaaauuuaauucagccuuaagcacaauuaauuaagagugaaacguaauuguacaagcaguuggucacccaccauagggcaugaucaacaccgcaaccuuuccuuuuucccccagugauucugaaaaaccccucuucccuucagcuugcuuagauguuccaaauuuaguaagcuuaaggcggccuacagaagaaaaagaaaaaaaaggccacaaaaguucccucucacuuucaguaaauaaaauaaaagcagcaacagaaauaaagaaauaaaugaaauucaaaaugaaauaaauauuguguugugcagcauuaaaaaaucaauaaaaauuaaaaaugagcaagaucuaaaaaaaaaaaaaaaaaaaaaaaaaaaaaaaaaaaaaaaaaaaaaaaaaaaaaaaaaaaaaaaaugcaucccccccccccccccccccccccccccccccaaaggcucuuuucagagccaccagaauu

SEQ ID NO: 7786 - RNA, 2183 nt, Artificial Sequence
  mRNA product Design f-4 comprising derived and/or modified sequence from HRSV(A2)__F_DSCav1_mut8 (opt5)
gggagagucccgcagucggcguccagcggcucugcuuguucgugugugugucguugcaggccuuauucaagcuuaccauggagcugcucauccugaaggccaacgcuauuaccacaauccuuacggccgugaccuucugcuuugcgagcggccagaauauuacagaagaguucuaccaauccaccuguucugcugucagcaaaggguaucugggagcccucagaacaggcugguacaccuccguuaucacaauugaacugucuaacaucaaggagaucaaaugcaaugggaccgacgccaaggugaaacuuauuaagcaggaacuggauaaguauaaaaacgcugugacggaccuccagcugcugaugcagagcacccccgccacaggauccggcucugcuaucgccagcggggucgcgguguguaagguucuccaccuggagggagaggugaauaaaauuaaguccgcccuucugagcaccaacaaagcugucgugucucucuccggcugcggcguuagcgugcugacauuuaagguccuugaucugaagaauuacaucgacaaacaacuccugccuauucugaacaagcagucuuguuccaucccgaauauugaaaccgugaucgaguuccagcagaaaaacaaucggcuccuggaaaucacgcgcgaguuuagcgugaacgccggggucacaacccccguuucuacauauaugcuuaccaauuccgagcugcucagccugauuaacgauaugccuaucaccaaugaccaaaagaaacuuauguccaacaacgugcagauugugagacagcagucuuacagcaucaugugcauuaucaaggaagagguccuggcuuaugugguucaacucccccuguacggagugaucgauacaccuuguuggaaacugcauacgagcccccucugcaccacaaauaccaaggaaggcagcaacauuugucugacacggaccgaccgcgggugguacugcgauaaugccggaucugucuccuucuuuccucaggcggagacguguaaggugcagagcaacagaguuuucugcgacacaaugaacucucuuacccugccgagcgaagugaaucucugcaaugucgauaucuuuaaccccaaauaugacuguaagauuaugaccuccaaaacagaugugucuagcuccgucaucaccagccugggcgccauugugucuugcuacgggaagacaaaauguacggcuuccaauaagugccggggaaucaucaagaccuucagcaacggcugugacuauguuucuaauaaaggcguggacacagucuccguggggaacacccuuuacuauguuaauaagcaagagggacagagccuguacgugaaaggcgagccuauuaucaacuuuuaugauccccucgucuucccuuccgacgaauuugaugccucuauuagccaggugaaugagaagaucaaccagucccuggcuuucauucgcaaaucugacgaacugcuccacaacgugaaugccgggaaguccacaaccaacaucaugauuacgaccaucaucauuguuaucauugucauccugcuuucccugauugccgugggacuccugcuguacugcaaggcuagaagcacacccgugacccuuucuaaagaucaacucuccggcaucaauaacaucgcguucagcaauugaggacuagugaagggaacacccaaauuuaauucagccuuaagcacaauuaauuaagagugaaacguaauuguacaagcaguuggucacccaccauagggcaugaucaacaccgcaaccuuuccuuuuucccccagugauucugaaaaaccccucuucccuucagcuugcuuagauguuccaaauuuaguaagcuuaaggcggccuacagaagaaaaagaaaaaaaaggccacaaaaguucccucucacuuucaguaaauaaaauaaaagcagcaacagaaauaaagaaauaaaugaaauucaaaaugaaauaaauauuguguugugcagcauuaaaaaaucaauaaaaauuaaaaaugagcaagaucuaaaaaaaaaaaaaaaaaaaaaaaaaaaaaaaaaaaaaaaaaaaaaaaaaaaaaaaaaaaaaaaaugcaucccccccccccccccccccccccccccccccaaaggcucuuuucagagccaccagaauu

SEQ ID NO: 7787 - RNA, 2183 nt, Artificial Sequence
  mRNA product Design f-4 comprising derived and/or modified sequence from HRSV(A2)__F_DSCav1_mut8 (opt6)
gggagagucccgcagucggcguccagcggcucugcuuguucgugugugugucguugcaggccuuauucaagcuuaccauggaacuauuaauauuaaaagcaaacgcaaucacaacuauacuaacagcaguaacauucugcuuugccucaggucaaaacauaacagaggaauuuuaccaauccacaugcucugcuguaagcaaaggauaccucggagcauuaagaacuggaugguacaccucaguaauaacuauagaacuaucaaacauaaaagaaauaaaauguaauggcacagacgcaaaagugaaauuaaucaaacaagaacucgauaaauacaaaaaugccguaaccgaucuccaacuuuuaaugcaaagcacacccgcaacagguuccgggucagcaauagcaagcggaguugcaguaugcaaaguacuacacuuagaaggagaaguaaauaaaaucaaaucagccuuacuaucaacaaauaaagcaguuguaucacucucaggaugcggaguauccguacuaacauuuaaaguacuagaucuaaaaaacuacauagauaaacaacucuuaccaauacuaaauaaacaaucauguuccauacccaacauagaaaccguuaucgaauuucaacaaaaaaacaacagauuacuagaaaucacacgagaauuuucaguaaaugcuggagucacaacaccaguuaguacauacaugcucaccaauucagaacuacuaaguuuaauuaacgauaugccaauaacaaacgaccaaaaaaaacuaaugucaaauaacguacaaauaguaagacaacaaucauacucaaucaugugcauaauaaaagaagaaguacuagccuauguaguccaauuaccacucuacggcguaaucgacaccccaugcuggaaauuacacacaagcccauuaugcaccaccaacacaaaagaagguucaaacauuugcuuaaccagaaccgaucgaggaugguacugcgauaacgcaggaucugucuccuuuuucccacaagccgaaacaugcaaaguucaaucaaaccgaguuuucugugacacuaugaacucacucacacuuccaagcgaaguaaaccuaugcaacguagauauauuuaacccuaaauacgacugcaaaauaaugacaagcaaaacagacguuaguucaucaguaauuacaagucuaggcgcaauagugucaugcuacggaaaaacaaaaugcaccgcauccaauaaaugccgaggaaucauuaaaacauucucaaacggaugcgacuacgucagcaauaaaggaguagacacuguuucuguaggaaacacccuauacuauguaaacaaacaagaaggucaaucacuauacguaaagggagaaccaauuauaaauuuuuacgaccccuuaguauuuccaagugaugaauuugacgcaucuauaagucaaguuaacgaaaaaauuaaccaaucacuugcauuuauaagaaaaucagacgaacuacuccauaauguaaacgcagguaaaucaacaacaaacaucaugaucacaaccauaauaauaguaauaauuguaauauuacuaucacuaauagcaguaggauuacuacucuacugcaaagcuagaucuaccccggucacacucucaaaagaccaauuaucuggaauaaacaauauagcauucagcaacuaaggacuagugaagggaacacccaaauuuaauucagccuuaagcacaauuaauuaagagugaaacguaauuguacaagcaguuggucacccaccauagggcaugaucaacaccgcaaccuuuccuuuuucccccagugauucugaaaaaccccucuucccuucagcuugcuuagauguuccaaauuuaguaagcuuaaggcggccuacagaagaaaaagaaaaaaaaggccacaaaaguucccucucacuuucaguaaauaaaauaaaagcagcaacagaaauaaagaaauaaaugaaauucaaaaugaaauaaauauuguguugugcagcauuaaaaaaucaauaaaaauuaaaaaugagcaagaucuaaaaaaaaaaaaaaaaaaaaaaaaaaaaaaaaaaaaaaaaaaaaaaaaaaaaaaaaaaaaaaaaugcaucccccccccccccccccccccccccccccccaaaggcucuuuucagagccaccagaauu

SEQ ID NO: 7788 - RNA, 2183 nt, Artificial Sequence
  mRNA product Design f-4 comprising derived and/or modified sequence from HRSV(A2)__F_DSCav1_mut8 (opt11)
gggagagucccgcagucggcguccagcggcucugcuuguucgugugugugucguugcaggccuuauucaagcuuaccauggaacuccucauccuuaaagccaacgccauaaccaccauccucaccgccgucaccuucugcuucgcuucuggccaaaacauaaccgaagaguucuaccaauccacgugcucugccgugucaaaaggcuaccucggagcccuccgcacagggugguacacuuccgucaucaccaucgaacucucuaacaucaaagaaaucaagugcaacggcacagacgcgaaagucaagcucaucaaacaagaacuagacaaauacaaaaacgccguaacagaccuccaacuccuaaugcaguccacaccagccacaggcuccggcagcgccaucgccuccggcgucgcugucugcaaaguccuacaccucgaaggcgaagucaacaaaaucaagucagcccuccuuagcaccaacaaagcagucgucucuuuaagcgggugcggagucucuguccuaaccuuuaaaguacucgaccucaaaaacuacaucgacaaacaacuacuaccaauacuaaacaaacagagcugcuccauucccaacaucgaaaccguuaucgaguuccaacaaaagaacaaccgccuccucgaaaucacccgcgaguucuccgucaacgcaggcgucaccaccccagucuccaccuauaugcuaaccaacagcgaacuccucagccucaucaaugacaugccaaucaccaacgaccaaaagaaacucauguccaacaacguacagauaguccgccagcaguccuacagcaucaugugcaucaucaaagaagaagugcucgccuacgugguacaacucccucucuacggagucauugauacacccugcuggaaacuccacacaagcccccucugcacuacaaacaccaaagaaggcucuaacauaugccucacccgcacagaccgugguugguacugcgacaacgccggcuccguauccuucuuuccacaagcugaaaccugcaaaguucaaucaaaccgagucuucugcgacaccaugaacucccucacauugcccagcgaagucaaccucugcaacgucgacaucuucaaccccaaguacgacugcaaaaucaugaccuccaaaaccgacgucagcuccagcgugaucacaagccuaggcgcgaucgucagcugcuacggcaaaaccaaaugcacagccuccaacaaaugccgcggaaucauaaaaacauucaguaacggcugcgacuacguguccaauaaaggagucgacaccguauccgucggaaacacccucuacuacgucaacaaacaagaaggacaaucccucuaugucaaaggcgaacccauuaucaacuucuacgacccccuaguuuuccccuccgacgaguucgacgcaagcauuucccaagucaacgaaaagaucaaucaaucccucgccuucauacgcaaaagcgacgaacuacuacacaacguaaacgccggcaaaagcaccaccaacaucaugaucacaacaaucaucaucgucaucaucgucauccuacucucacucaucgccguuggccuacuacucuacugcaaagcccgcuccacacccgucacccucucaaaagaccaacucuccggcaucaacaacaucgcauucagcaacugaggacuagugaagggaacacccaaauuuaauucagccuuaagcacaauuaauuaagagugaaacguaauuguacaagcaguuggucacccaccauagggcaugaucaacaccgcaaccuuuccuuuuucccccagugauucugaaaaaccccucuucccuucagcuugcuuagauguuccaaauuuaguaagcuuaaggcggccuacagaagaaaaagaaaaaaaaggccacaaaaguucccucucacuuucaguaaauaaaauaaaagcagcaacagaaauaaagaaauaaaugaaauucaaaaugaaauaaauauuguguugugcagcauuaaaaaaucaauaaaaauuaaaaaugagcaagaucuaaaaaaaaaaaaaaaaaaaaaaaaaaaaaaaaaaaaaaaaaaaaaaaaaaaaaaaaaaaaaaaaugcaucccccccccccccccccccccccccccccccaaaggcucuuuucagagccaccagaauu

SEQ ID NO: 7789 - RNA, 1959 nt, Artificial Sequence
  mRNA product Design f-5 comprising derived and/or modified sequence from HRSV(A2)__F_DSCav1_mut8 (opt1)
gggagacuuucccauucuguagcagaauuugguguugccuguggucuuggucccgcggagaagcuuaccauggagcugcucauccugaaggccaacgccaucaccaccauccugacggcggugaccuucugcuucgccagcggccagaacaucaccgaggaguucuaccaguccacgugcagcgccgucuccaagggguaccucggcgcccugcggaccggcugguacaccuccgugaucaccaucgagcugagcaacaucaaggagaucaagugcaacgggaccgacgccaaggugaagcucaucaagcaggagcuggacaaguacaagaacgcggucacggaccugcagcuccugaugcaguccaccccggcaaccggcuccggcuccgccaucgcgagcggcgucgccgugugcaaggugcugcaccucgagggggaggucaacaagaucaagagcgcccugcuguccaccaacaaggccguggugagccucuccggcugcggcgucagcgugcugaccuucaaggugcuggaccucaagaacuacaucgacaagcagcugcugcccauccugaacaagcagagcugcuccauccccaacaucgagacggugaucgaguuccagcagaagaacaaccggcuccuggagaucacccgcgaguucagcgugaacgccggggucaccacccccguguccacguacaugcugaccaacagcgagcuccugucccugaucaacgacaugccgaucaccaacgaccagaagaagcucaugagcaacaacgugcagaucguccggcagcaguccuacagcaucaugugcaucaucaaggaggaggugcuggcguacgugguccagcugccccucuacggcgugaucgacacccccugcuggaagcugcacacgagcccccugugcaccaccaacaccaaggagggguccaacaucugccucacgcgcaccgaccggggcugguacugcgacaacgccggcagcgucuccuucuucccgcaggccgagaccugcaaggugcagagcaaccgcguguucugcgacaccaugaacucccugacgcugcccagcgagguaaaccucugcaacgucgacaucuucaaccccaaguacgacugcaagaucaugaccuccaagaccgacgugagcuccagcgugaucaccucccugggggccaucgucagcugcuacggcaagacgaagugcaccgccagcaacaagugccgggggaucaucaagaccuucuccaacggcugcgacuacgugagcaacaagggcguggacaccguguccgucgggaacacccuguacuacgugaacaagcaggagggccagagccucuacgugaagggggagcccaucaucaacuucuacgacccgcuggucuuccccuccgacgaguucgacgcgagcaucucccaggugaacgagaagaucaaccagagccuggccuucauccgcaaguccgacgagcugcuccacaacgugaacgccggcaagagcacgaccaacaucaugaucaccaccaucaucaucgucaucaucgugauccugcugucccucaucgccguggggcugcugcucuacugcaaggcccggagcacgcccgucacccuguccaaggaccagcugagcggcaucaacaacaucgcguucuccaacugaggacuaguacuggcugcaucucccuuuccucuguccuccauccuucucccaggauggugaagggggaccugguacccagugauccccaccccaggauccuaaaucaugacuuaccugcuaauaaaaacucauuggaaaagugagaagaucuaaaaaaaaaaaaaaaaaaaaaaaaaaaaaaaaaaaaaaaaaaaaaaaaaaaaaaaaaaaaaaaaugcaucccccccccccccccccccccccccccccccaaaggcucuuuucagagccaccagaauu

SEQ ID NO: 7790 - RNA, 1959 nt, Artificial Sequence
  mRNA product Design f-5 comprising derived and/or modified sequence from HRSV(A2)__F_DSCav1_mut8 (opt1)
gggagacuuucccauucuguagcagaauuugguguugccuguggucuuggucccgcggagaagcuuaccauggagcugcucauccugaaggccaacgccaucaccaccauccugacggcggugaccuucugcuucgccagcggccagaacaucaccgaggaguucuaccaguccacgugcagcgccgucuccaagggguaccucggcgcccugcgcaccgggugguacaccagcgugaucaccaucgagcuguccaacaucaaggagaucaagugcaacggcaccgacgccaaggugaagcucaucaagcaggagcuggacaaguacaagaacgcggucacggaccugcagcuccugaugcagagcacccccgccaccggguccggcagcgccaucgccuccggcguggcggugugcaagguccugcaccucgagggggaggugaacaagaucaagagcgcccugcuguccaccaacaaggccguggucagccucuccggcugcggggugagcgugcugacguucaagguccuggaccucaagaacuacaucgacaagcagcugcugccgauccucaacaagcaguccugcagcauccccaacaucgagaccgugaucgaguuccagcagaagaacaaccggcugcuggagaucacccgcgaguucuccgugaacgccggcgucaccacgcccgugagcaccuacaugcucaccaacuccgagcugcugagccucaucaacgacaugcccaucaccaacgaccagaagaagcugaugagcaacaacgugcagaucguccggcagcaguccuacagcaucaugugcaucaucaaggaggaggugcuggccuacgugguccagcucccgcuguacggggugaucgacacgcccugcuggaagcugcacaccagcccccucugcaccaccaacacgaaggagggcuccaacaucugccugacccgcaccgaccggggcugguacugcgacaacgcgggguccgugagcuucuucccccaggccgagaccugcaagguccaguccaaccgcguguucugcgacacgaugaacagccugacccucccguccgaggucaaccugugcaacguggacaucuucaaccccaaguacgacugcaagaucaugaccagcaagaccgacguguccagcuccgucaucacgagccugggcgccaucguguccugcuacgggaagaccaagugcaccgccagcaacaagugccggggcaucaucaagaccuucuccaacggcugcgacuacgugagcaacaagggggucgacacgguguccgugggcaacacccucuacuacgucaacaagcaggaggggcagagccuguacgugaagggcgagcccaucaucaacuucuacgacccccugguguucccgagcgacgaguucgacgccuccaucagccaggucaacgagaagaucaaccagucccucgcguucauccgcaagagcgacgagcugcugcacaacgugaacgccgggaaguccaccaccaacaucaugaucaccacgaucaucaucgugaucaucgucauccuccugagccugaucgccgugggccuccugcuguacugcaaggcccgguccacccccgugacccugagcaaggaccagcucuccggcaucaacaacaucgccuucagcaacugaggacuaguacuggcugcaucucccuuuccucuguccuccauccuucucccaggauggugaagggggaccugguacccagugauccccaccccaggauccuaaaucaugacuuaccugcuaauaaaaacucauuggaaaagugagaagaucuaaaaaaaaaaaaaaaaaaaaaaaaaaaaaaaaaaaaaaaaaaaaaaaaaaaaaaaaaaaaaaaaugcaucccccccccccccccccccccccccccccccaaaggcucuuuucagagccaccagaauu

SEQ ID NO: 7791 - RNA, 1959 nt, Artificial Sequence
  mRNA product Design f-5 comprising derived and/or modified sequence from HRSV(A2)__F_DSCav1_mut8 (opt2)
gggagacuuucccauucuguagcagaauuugguguugccuguggucuuggucccgcggagaagcuuaccauggagcuccucauccucaaggccaacgccaucaccaccauccucaccgccgucaccuucugcuucgccuccggccagaacaucaccgaggaguucuaccaguccaccugcuccgccgucuccaagggcuaccucggcgcccuccgcaccggcugguacaccuccgucaucaccaucgagcucuccaacaucaaggagaucaagugcaacggcaccgacgccaaggucaagcucaucaagcaggagcucgacaaguacaagaacgccgucaccgaccuccagcuccucaugcaguccacccccgccaccggcuccggcuccgccaucgccuccggcgucgccgucugcaagguccuccaccucgagggcgaggucaacaagaucaaguccgcccuccucuccaccaacaaggccgucgucucccucuccggcugcggcgucuccguccucaccuucaagguccucgaccucaagaacuacaucgacaagcagcuccuccccauccucaacaagcaguccugcuccauccccaacaucgagaccgucaucgaguuccagcagaagaacaaccgccuccucgagaucacccgcgaguucuccgucaacgccggcgucaccacccccgucuccaccuacaugcucaccaacuccgagcuccucucccucaucaacgacaugcccaucaccaacgaccagaagaagcucauguccaacaacguccagaucguccgccagcaguccuacuccaucaugugcaucaucaaggaggagguccucgccuacgucguccagcucccccucuacggcgucaucgacacccccugcuggaagcuccacaccuccccccucugcaccaccaacaccaaggagggcuccaacaucugccucacccgcaccgaccgcggcugguacugcgacaacgccggcuccgucuccuucuucccccaggccgagaccugcaagguccaguccaaccgcgucuucugcgacaccaugaacucccucacccuccccuccgaggucaaccucugcaacgucgacaucuucaaccccaaguacgacugcaagaucaugaccuccaagaccgacgucuccuccuccgucaucaccucccucggcgccaucgucuccugcuacggcaagaccaagugcaccgccuccaacaagugccgcggcaucaucaagaccuucuccaacggcugcgacuacgucuccaacaagggcgucgacaccgucuccgucggcaacacccucuacuacgucaacaagcaggagggccagucccucuacgucaagggcgagcccaucaucaacuucuacgacccccucgucuuccccuccgacgaguucgacgccuccaucucccaggucaacgagaagaucaaccagucccucgccuucauccgcaaguccgacgagcuccuccacaacgucaacgccggcaaguccaccaccaacaucaugaucaccaccaucaucaucgucaucaucgucauccuccucucccucaucgccgucggccuccuccucuacugcaaggcccgcuccacccccgucacccucuccaaggaccagcucuccggcaucaacaacaucgccuucuccaacugaggacuaguacuggcugcaucucccuuuccucuguccuccauccuucucccaggauggugaagggggaccugguacccagugauccccaccccaggauccuaaaucaugacuuaccugcuaauaaaaacucauuggaaaagugagaagaucuaaaaaaaaaaaaaaaaaaaaaaaaaaaaaaaaaaaaaaaaaaaaaaaaaaaaaaaaaaaaaaaaugcaucccccccccccccccccccccccccccccccaaaggcucuuuucagagccaccagaauu

SEQ ID NO: 7792 - RNA, 1959 nt, Artificial Sequence
  mRNA product Design f-5 comprising derived and/or modified sequence from HRSV(A2)__F_DSCav1_mut8 (opt3)
gggagacuuucccauucuguagcagaauuugguguugccuguggucuuggucccgcggagaagcuuaccauggagcugcucauccuuaaggccaacgcuauuaccacaauacugacugcagugacguucugcuuugccagcggccagaauaucaccgaagaguucuaccaauccacauguucugcggucucaaaaggguauuugggagcuuuaagaacugguugguacaccaguguuauuacaaucgaacugagcaacauuaaggagaucaaaugcaauggcaccgacgccaaggugaaacuaauaaagcaggaacucgauaaguauaaaaacgcaguaacugaccugcagcuucugaugcaguccacacccgccaccgggucuggaucggcuaucgcaucaggcguggccgucuguaagguguugcaccucgagggugagguuaauaaaauuaagagcgcucugcugaguacgaacaaagccguggucucccucucugggugcggagugagcguauuaacuuuuaagguucuggaucuuaagaauuacaucgacaaacaauugcugccuauucuaaacaagcaguccuguucaaucccaaauauagaaaccgugauugaguuccagcagaaaaacaauaggcuccuggaaaucacacgggaguuuagugucaacgcgggcgugacuaccccggugagcacauauaugcuuaccaauucugagcuguugucccucauuaacgauaugcccaucacgaaugaccaaaagaaacugaugucaaacaacguccagaucguucgccagcagagcuacaguauuaugugcauaaucaaggaagagguguuagcauauguagugcaacugccucucuacggcgucauugauacuccauguuggaaacuucauacaucuccccugugcaccacuaauacaaaggaaggguccaacaucuguuugacccgaacggaccguggaugguacugcgauaaugccgguagcgugucguucuuuccucaggcugagaccuguaagguucagucuaacagaguguucugcgacacaaugaacucccuaacucugccaucagaagucaaucucugcaauguggauauauuuaaccccaaauaugacuguaagauuaugaccaguaaaacagauguaagcuccucuguuaucacuagccugggcgccaucgugucaugcuacgggaagaccaaauguacagcaaguaauaagugcaggggaauuaucaagaccuucuccaacggcugugacuaugucagcaauaaagguguggacacugucucuguggggaacacgcuuuacuauguuaauaagcaagagggacagucacuguacgugaaaggcgagccuauuauaaacuuuuaugauccauugguauucccgagugacgaauuugaugcuagcaucucccaggucaaugagaagauuaaccagucucucgccuucauccggaaaucggacgaacuguuacacaacgugaaugcgggcaagagcacaaccaacaucaugauuacuaccauaaucauuguuaucauugugauccugcuaucccucauagccgucgggcugcuuuuguacugcaaggcacgcucaacacccgugacccugaguaaagaucaacucucuggaaucaauaacauugcuuucagcaauugaggacuaguacuggcugcaucucccuuuccucuguccuccauccuucucccaggauggugaagggggaccugguacccagugauccccaccccaggauccuaaaucaugacuuaccugcuaauaaaaacucauuggaaaagugagaagaucuaaaaaaaaaaaaaaaaaaaaaaaaaaaaaaaaaaaaaaaaaaaaaaaaaaaaaaaaaaaaaaaaugcaucccccccccccccccccccccccccccccccaaaggcucuuuucagagccaccagaauu

SEQ ID NO: 7793 - RNA, 1959 nt, Artificial Sequence
  mRNA product Design f-5 comprising derived and/or modified sequence from HRSV(A2)__F_DSCav1_mut8 (opt4)
gggagacuuucccauucuguagcagaauuugguguugccuguggucuuggucccgcggagaagcuuaccauggagcugcugauccugaaggccaacgccaucaccaccauccugaccgccgugaccuucugcuucgccagcggccagaacaucaccgaggaguucuaccagagcaccugcagcgccgugagcaagggcuaccugggcgcccugagaaccggcugguacaccagcgugaucaccaucgagcugagcaacaucaaggagaucaagugcaacggcaccgacgccaaggugaagcugaucaagcaggagcuggacaaguacaagaacgccgugaccgaccugcagcugcugaugcagagcacccccgccaccggcagcggcagcgccaucgccagcggcguggccgugugcaaggugcugcaccuggagggcgaggugaacaagaucaagagcgcccugcugagcaccaacaaggccguggugagccugagcggcugcggcgugagcgugcugaccuucaaggugcuggaccugaagaacuacaucgacaagcagcugcugcccauccugaacaagcagagcugcagcauccccaacaucgagaccgugaucgaguuccagcagaagaacaacagacugcuggagaucaccagagaguucagcgugaacgccggcgugaccacccccgugagcaccuacaugcugaccaacagcgagcugcugagccugaucaacgacaugcccaucaccaacgaccagaagaagcugaugagcaacaacgugcagaucgugagacagcagagcuacagcaucaugugcaucaucaaggaggaggugcuggccuacguggugcagcugccccuguacggcgugaucgacacccccugcuggaagcugcacaccagcccccugugcaccaccaacaccaaggagggcagcaacaucugccugaccagaaccgacagaggcugguacugcgacaacgccggcagcgugagcuucuucccccaggccgagaccugcaaggugcagagcaacagaguguucugcgacaccaugaacagccugacccugcccagcgaggugaaccugugcaacguggacaucuucaaccccaaguacgacugcaagaucaugaccagcaagaccgacgugagcagcagcgugaucaccagccugggcgccaucgugagcugcuacggcaagaccaagugcaccgccagcaacaagugcagaggcaucaucaagaccuucagcaacggcugcgacuacgugagcaacaagggcguggacaccgugagcgugggcaacacccuguacuacgugaacaagcaggagggccagagccuguacgugaagggcgagcccaucaucaacuucuacgacccccugguguuccccagcgacgaguucgacgccagcaucagccaggugaacgagaagaucaaccagagccuggccuucaucagaaagagcgacgagcugcugcacaacgugaacgccggcaagagcaccaccaacaucaugaucaccaccaucaucaucgugaucaucgugauccugcugagccugaucgccgugggccugcugcuguacugcaaggccagaagcacccccgugacccugagcaaggaccagcugagcggcaucaacaacaucgccuucagcaacugaggacuaguacuggcugcaucucccuuuccucuguccuccauccuucucccaggauggugaagggggaccugguacccagugauccccaccccaggauccuaaaucaugacuuaccugcuaauaaaaacucauuggaaaagugagaagaucuaaaaaaaaaaaaaaaaaaaaaaaaaaaaaaaaaaaaaaaaaaaaaaaaaaaaaaaaaaaaaaaaugcaucccccccccccccccccccccccccccccccaaaggcucuuuucagagccaccagaauu

SEQ ID NO: 7794 - RNA, 1959 nt, Artificial Sequence
  mRNA product Design f-5 comprising derived and/or modified sequence from HRSV(A2)__F_DSCav1_mut8 (opt5)
gggagacuuucccauucuguagcagaauuugguguugccuguggucuuggucccgcggagaagcuuaccauggagcugcucauccugaaggccaacgcuauuaccacaauccuuacggccgugaccuucugcuuugcgagcggccagaauauuacagaagaguucuaccaauccaccuguucugcugucagcaaaggguaucugggagcccucagaacaggcugguacaccuccguuaucacaauugaacugucuaacaucaaggagaucaaaugcaaugggaccgacgccaaggugaaacuuauuaagcaggaacuggauaaguauaaaaacgcugugacggaccuccagcugcugaugcagagcacccccgccacaggauccggcucugcuaucgccagcggggucgcgguguguaagguucuccaccuggagggagaggugaauaaaauuaaguccgcccuucugagcaccaacaaagcugucgugucucucuccggcugcggcguuagcgugcugacauuuaagguccuugaucugaagaauuacaucgacaaacaacuccugccuauucugaacaagcagucuuguuccaucccgaauauugaaaccgugaucgaguuccagcagaaaaacaaucggcuccuggaaaucacgcgcgaguuuagcgugaacgccggggucacaacccccguuucuacauauaugcuuaccaauuccgagcugcucagccugauuaacgauaugccuaucaccaaugaccaaaagaaacuuauguccaacaacgugcagauugugagacagcagucuuacagcaucaugugcauuaucaaggaagagguccuggcuuaugugguucaacucccccuguacggagugaucgauacaccuuguuggaaacugcauacgagcccccucugcaccacaaauaccaaggaaggcagcaacauuugucugacacggaccgaccgcgggugguacugcgauaaugccggaucugucuccuucuuuccucaggcggagacguguaaggugcagagcaacagaguuuucugcgacacaaugaacucucuuacccugccgagcgaagugaaucucugcaaugucgauaucuuuaaccccaaauaugacuguaagauuaugaccuccaaaacagaugugucuagcuccgucaucaccagccugggcgccauugugucuugcuacgggaagacaaaauguacggcuuccaauaagugccggggaaucaucaagaccuucagcaacggcugugacuauguuucuaauaaaggcguggacacagucuccguggggaacacccuuuacuauguuaauaagcaagagggacagagccuguacgugaaaggcgagccuauuaucaacuuuuaugauccccucgucuucccuuccgacgaauuugaugccucuauuagccaggugaaugagaagaucaaccagucccuggcuuucauucgcaaaucugacgaacugcuccacaacgugaaugccgggaaguccacaaccaacaucaugauuacgaccaucaucauuguuaucauugucauccugcuuucccugauugccgugggacuccugcuguacugcaaggcuagaagcacacccgugacccuuucuaaagaucaacucuccggcaucaauaacaucgcguucagcaauugaggacuaguacuggcugcaucucccuuuccucuguccuccauccuucucccaggauggugaagggggaccugguacccagugauccccaccccaggauccuaaaucaugacuuaccugcuaauaaaaacucauuggaaaagugagaagaucuaaaaaaaaaaaaaaaaaaaaaaaaaaaaaaaaaaaaaaaaaaaaaaaaaaaaaaaaaaaaaaaaugcaucccccccccccccccccccccccccccccccaaaggcucuuuucagagccaccagaauu

SEQ ID NO: 7795 - RNA, 1959 nt, Artificial Sequence
  mRNA product Design f-5 comprising derived and/or modified sequence from HRSV(A2)__F_DSCav1_mut8 (opt6)
gggagacuuucccauucuguagcagaauuugguguugccuguggucuuggucccgcggagaagcuuaccauggaacuauuaauauuaaaagcaaacgcaaucacaacuauacuaacagcaguaacauucugcuuugccucaggucaaaacauaacagaggaauuuuaccaauccacaugcucugcuguaagcaaaggauaccucggagcauuaagaacuggaugguacaccucaguaauaacuauagaacuaucaaacauaaaagaaauaaaauguaauggcacagacgcaaaagugaaauuaaucaaacaagaacucgauaaauacaaaaaugccguaaccgaucuccaacuuuuaaugcaaagcacacccgcaacagguuccgggucagcaauagcaagcggaguugcaguaugcaaaguacuacacuuagaaggagaaguaaauaaaaucaaaucagccuuacuaucaacaaauaaagcaguuguaucacucucaggaugcggaguauccguacuaacauuuaaaguacuagaucuaaaaaacuacauagauaaacaacucuuaccaauacuaaauaaacaaucauguuccauacccaacauagaaaccguuaucgaauuucaacaaaaaaacaacagauuacuagaaaucacacgagaauuuucaguaaaugcuggagucacaacaccaguuaguacauacaugcucaccaauucagaacuacuaaguuuaauuaacgauaugccaauaacaaacgaccaaaaaaaacuaaugucaaauaacguacaaauaguaagacaacaaucauacucaaucaugugcauaauaaaagaagaaguacuagccuauguaguccaauuaccacucuacggcguaaucgacaccccaugcuggaaauuacacacaagcccauuaugcaccaccaacacaaaagaagguucaaacauuugcuuaaccagaaccgaucgaggaugguacugcgauaacgcaggaucugucuccuuuuucccacaagccgaaacaugcaaaguucaaucaaaccgaguuuucugugacacuaugaacucacucacacuuccaagcgaaguaaaccuaugcaacguagauauauuuaacccuaaauacgacugcaaaauaaugacaagcaaaacagacguuaguucaucaguaauuacaagucuaggcgcaauagugucaugcuacggaaaaacaaaaugcaccgcauccaauaaaugccgaggaaucauuaaaacauucucaaacggaugcgacuacgucagcaauaaaggaguagacacuguuucuguaggaaacacccuauacuauguaaacaaacaagaaggucaaucacuauacguaaagggagaaccaauuauaaauuuuuacgaccccuuaguauuuccaagugaugaauuugacgcaucuauaagucaaguuaacgaaaaaauuaaccaaucacuugcauuuauaagaaaaucagacgaacuacuccauaauguaaacgcagguaaaucaacaacaaacaucaugaucacaaccauaauaauaguaauaauuguaauauuacuaucacuaauagcaguaggauuacuacucuacugcaaagcuagaucuaccccggucacacucucaaaagaccaauuaucuggaauaaacaauauagcauucagcaacuaaggacuaguacuggcugcaucucccuuuccucuguccuccauccuucucccaggauggugaagggggaccugguacccagugauccccaccccaggauccuaaaucaugacuuaccugcuaauaaaaacucauuggaaaagugagaagaucuaaaaaaaaaaaaaaaaaaaaaaaaaaaaaaaaaaaaaaaaaaaaaaaaaaaaaaaaaaaaaaaaugcaucccccccccccccccccccccccccccccccaaaggcucuuuucagagccaccagaauu

SEQ ID NO: 7796 - RNA, 1959 nt, Artificial Sequence
  mRNA product Design f-5 comprising derived and/or modified sequence from HRSV(A2)__F_DSCav1_mut8 (opt11)
gggagacuuucccauucuguagcagaauuugguguugccuguggucuuggucccgcggagaagcuuaccauggaacuccucauccuuaaagccaacgccauaaccaccauccucaccgccgucaccuucugcuucgcuucuggccaaaacauaaccgaagaguucuaccaauccacgugcucugccgugucaaaaggcuaccucggagcccuccgcacagggugguacacuuccgucaucaccaucgaacucucuaacaucaaagaaaucaagugcaacggcacagacgcgaaagucaagcucaucaaacaagaacuagacaaauacaaaaacgccguaacagaccuccaacuccuaaugcaguccacaccagccacaggcuccggcagcgccaucgccuccggcgucgcugucugcaaaguccuacaccucgaaggcgaagucaacaaaaucaagucagcccuccuuagcaccaacaaagcagucgucucuuuaagcgggugcggagucucuguccuaaccuuuaaaguacucgaccucaaaaacuacaucgacaaacaacuacuaccaauacuaaacaaacagagcugcuccauucccaacaucgaaaccguuaucgaguuccaacaaaagaacaaccgccuccucgaaaucacccgcgaguucuccgucaacgcaggcgucaccaccccagucuccaccuauaugcuaaccaacagcgaacuccucagccucaucaaugacaugccaaucaccaacgaccaaaagaaacucauguccaacaacguacagauaguccgccagcaguccuacagcaucaugugcaucaucaaagaagaagugcucgccuacgugguacaacucccucucuacggagucauugauacacccugcuggaaacuccacacaagcccccucugcacuacaaacaccaaagaaggcucuaacauaugccucacccgcacagaccgugguugguacugcgacaacgccggcuccguauccuucuuuccacaagcugaaaccugcaaaguucaaucaaaccgagucuucugcgacaccaugaacucccucacauugcccagcgaagucaaccucugcaacgucgacaucuucaaccccaaguacgacugcaaaaucaugaccuccaaaaccgacgucagcuccagcgugaucacaagccuaggcgcgaucgucagcugcuacggcaaaaccaaaugcacagccuccaacaaaugccgcggaaucauaaaaacauucaguaacggcugcgacuacguguccaauaaaggagucgacaccguauccgucggaaacacccucuacuacgucaacaaacaagaaggacaaucccucuaugucaaaggcgaacccauuaucaacuucuacgacccccuaguuuuccccuccgacgaguucgacgcaagcauuucccaagucaacgaaaagaucaaucaaucccucgccuucauacgcaaaagcgacgaacuacuacacaacguaaacgccggcaaaagcaccaccaacaucaugaucacaacaaucaucaucgucaucaucgucauccuacucucacucaucgccguuggccuacuacucuacugcaaagcccgcuccacacccgucacccucucaaaagaccaacucuccggcaucaacaacaucgcauucagcaacugaggacuaguacuggcugcaucucccuuuccucuguccuccauccuucucccaggauggugaagggggaccugguacccagugauccccaccccaggauccuaaaucaugacuuaccugcuaauaaaaacucauuggaaaagugagaagaucuaaaaaaaaaaaaaaaaaaaaaaaaaaaaaaaaaaaaaaaaaaaaaaaaaaaaaaaaaaaaaaaaugcaucccccccccccccccccccccccccccccccaaaggcucuuuucagagccaccagaauu

SEQ ID NO: 7797 - RNA, 1955 nt, Artificial Sequence
  mRNA product Design g-1 comprising derived and/or modified sequence from HRSV(A2)__F_DSCav1_mut8 (opt1)
gggagacuuucccauucuguagcagaauuugguguugccuguggucuuggucccgcggagaagcuuaccauggagcugcucauccugaaggccaacgccaucaccaccauccugacggcggugaccuucugcuucgccagcggccagaacaucaccgaggaguucuaccaguccacgugcagcgccgucuccaagggguaccucggcgcccugcggaccggcugguacaccuccgugaucaccaucgagcugagcaacaucaaggagaucaagugcaacgggaccgacgccaaggugaagcucaucaagcaggagcuggacaaguacaagaacgcggucacggaccugcagcuccugaugcaguccaccccggcaaccggcuccggcuccgccaucgcgagcggcgucgccgugugcaaggugcugcaccucgagggggaggucaacaagaucaagagcgcccugcuguccaccaacaaggccguggugagccucuccggcugcggcgucagcgugcugaccuucaaggugcuggaccucaagaacuacaucgacaagcagcugcugcccauccugaacaagcagagcugcuccauccccaacaucgagacggugaucgaguuccagcagaagaacaaccggcuccuggagaucacccgcgaguucagcgugaacgccggggucaccacccccguguccacguacaugcugaccaacagcgagcuccugucccugaucaacgacaugccgaucaccaacgaccagaagaagcucaugagcaacaacgugcagaucguccggcagcaguccuacagcaucaugugcaucaucaaggaggaggugcuggcguacgugguccagcugccccucuacggcgugaucgacacccccugcuggaagcugcacacgagcccccugugcaccaccaacaccaaggagggguccaacaucugccucacgcgcaccgaccggggcugguacugcgacaacgccggcagcgucuccuucuucccgcaggccgagaccugcaaggugcagagcaaccgcguguucugcgacaccaugaacucccugacgcugcccagcgagguaaaccucugcaacgucgacaucuucaaccccaaguacgacugcaagaucaugaccuccaagaccgacgugagcuccagcgugaucaccucccugggggccaucgucagcugcuacggcaagacgaagugcaccgccagcaacaagugccgggggaucaucaagaccuucuccaacggcugcgacuacgugagcaacaagggcguggacaccguguccgucgggaacacccuguacuacgugaacaagcaggagggccagagccucuacgugaagggggagcccaucaucaacuucuacgacccgcuggucuuccccuccgacgaguucgacgcgagcaucucccaggugaacgagaagaucaaccagagccuggccuucauccgcaaguccgacgagcugcuccacaacgugaacgccggcaagagcacgaccaacaucaugaucaccaccaucaucaucgucaucaucgugauccugcugucccucaucgccguggggcugcugcucuacugcaaggcccggagcacgcccgucacccuguccaaggaccagcugagcggcaucaacaacaucgcguucuccaacugaggacuaguggaagcauuuuccuggcugauuaaaagaaauuacucagcuauggucaucuguuccuguuagaaggcuaugcagcauauuauauacuaugcgcauguuaugaaaugcauaauaaaaaauuuuaaaaaaucuaaaagaucuaaaaaaaaaaaaaaaaaaaaaaaaaaaaaaaaaaaaaaaaaaaaaaaaaaaaaaaaaaaaaaaaugcaucccccccccccccccccccccccccccccccaaaggcucuuuucagagccaccagaauu

SEQ ID NO: 7798 - RNA, 1955 nt, Artificial Sequence
  mRNA product Design g-1 comprising derived and/or modified sequence from HRSV(A2)__F_DSCav1_mut8 (opt1)
gggagacuuucccauucuguagcagaauuugguguugccuguggucuuggucccgcggagaagcuuaccauggagcugcucauccugaaggccaacgccaucaccaccauccugacggcggugaccuucugcuucgccagcggccagaacaucaccgaggaguucuaccaguccacgugcagcgccgucuccaagggguaccucggcgcccugcgcaccgggugguacaccagcgugaucaccaucgagcuguccaacaucaaggagaucaagugcaacggcaccgacgccaaggugaagcucaucaagcaggagcuggacaaguacaagaacgcggucacggaccugcagcuccugaugcagagcacccccgccaccggguccggcagcgccaucgccuccggcguggcggugugcaagguccugcaccucgagggggaggugaacaagaucaagagcgcccugcuguccaccaacaaggccguggucagccucuccggcugcggggugagcgugcugacguucaagguccuggaccucaagaacuacaucgacaagcagcugcugccgauccucaacaagcaguccugcagcauccccaacaucgagaccgugaucgaguuccagcagaagaacaaccggcugcuggagaucacccgcgaguucuccgugaacgccggcgucaccacgcccgugagcaccuacaugcucaccaacuccgagcugcugagccucaucaacgacaugcccaucaccaacgaccagaagaagcugaugagcaacaacgugcagaucguccggcagcaguccuacagcaucaugugcaucaucaaggaggaggugcuggccuacgugguccagcucccgcuguacggggugaucgacacgcccugcuggaagcugcacaccagcccccucugcaccaccaacacgaaggagggcuccaacaucugccugacccgcaccgaccggggcugguacugcgacaacgcgggguccgugagcuucuucccccaggccgagaccugcaagguccaguccaaccgcguguucugcgacacgaugaacagccugacccucccguccgaggucaaccugugcaacguggacaucuucaaccccaaguacgacugcaagaucaugaccagcaagaccgacguguccagcuccgucaucacgagccugggcgccaucguguccugcuacgggaagaccaagugcaccgccagcaacaagugccggggcaucaucaagaccuucuccaacggcugcgacuacgugagcaacaagggggucgacacgguguccgugggcaacacccucuacuacgucaacaagcaggaggggcagagccuguacgugaagggcgagcccaucaucaacuucuacgacccccugguguucccgagcgacgaguucgacgccuccaucagccaggucaacgagaagaucaaccagucccucgcguucauccgcaagagcgacgagcugcugcacaacgugaacgccgggaaguccaccaccaacaucaugaucaccacgaucaucaucgugaucaucgucauccuccugagccugaucgccgugggccuccugcuguacugcaaggcccgguccacccccgugacccugagcaaggaccagcucuccggcaucaacaacaucgccuucagcaacugaggacuaguggaagcauuuuccuggcugauuaaaagaaauuacucagcuauggucaucuguuccuguuagaaggcuaugcagcauauuauauacuaugcgcauguuaugaaaugcauaauaaaaaauuuuaaaaaaucuaaaagaucuaaaaaaaaaaaaaaaaaaaaaaaaaaaaaaaaaaaaaaaaaaaaaaaaaaaaaaaaaaaaaaaaugcaucccccccccccccccccccccccccccccccaaaggcucuuuucagagccaccagaauu

SEQ ID NO: 7799 - RNA, 1955 nt, Artificial Sequence
  mRNA product Design g-1 comprising derived and/or modified sequence from HRSV(A2)__F_DSCav1_mut8 (opt2)
gggagacuuucccauucuguagcagaauuugguguugccuguggucuuggucccgcggagaagcuuaccauggagcuccucauccucaaggccaacgccaucaccaccauccucaccgccgucaccuucugcuucgccuccggccagaacaucaccgaggaguucuaccaguccaccugcuccgccgucuccaagggcuaccucggcgcccuccgcaccggcugguacaccuccgucaucaccaucgagcucuccaacaucaaggagaucaagugcaacggcaccgacgccaaggucaagcucaucaagcaggagcucgacaaguacaagaacgccgucaccgaccuccagcuccucaugcaguccacccccgccaccggcuccggcuccgccaucgccuccggcgucgccgucugcaagguccuccaccucgagggcgaggucaacaagaucaaguccgcccuccucuccaccaacaaggccgucgucucccucuccggcugcggcgucuccguccucaccuucaagguccucgaccucaagaacuacaucgacaagcagcuccuccccauccucaacaagcaguccugcuccauccccaacaucgagaccgucaucgaguuccagcagaagaacaaccgccuccucgagaucacccgcgaguucuccgucaacgccggcgucaccacccccgucuccaccuacaugcucaccaacuccgagcuccucucccucaucaacgacaugcccaucaccaacgaccagaagaagcucauguccaacaacguccagaucguccgccagcaguccuacuccaucaugugcaucaucaaggaggagguccucgccuacgucguccagcucccccucuacggcgucaucgacacccccugcuggaagcuccacaccuccccccucugcaccaccaacaccaaggagggcuccaacaucugccucacccgcaccgaccgcggcugguacugcgacaacgccggcuccgucuccuucuucccccaggccgagaccugcaagguccaguccaaccgcgucuucugcgacaccaugaacucccucacccuccccuccgaggucaaccucugcaacgucgacaucuucaaccccaaguacgacugcaagaucaugaccuccaagaccgacgucuccuccuccgucaucaccucccucggcgccaucgucuccugcuacggcaagaccaagugcaccgccuccaacaagugccgcggcaucaucaagaccuucuccaacggcugcgacuacgucuccaacaagggcgucgacaccgucuccgucggcaacacccucuacuacgucaacaagcaggagggccagucccucuacgucaagggcgagcccaucaucaacuucuacgacccccucgucuuccccuccgacgaguucgacgccuccaucucccaggucaacgagaagaucaaccagucccucgccuucauccgcaaguccgacgagcuccuccacaacgucaacgccggcaaguccaccaccaacaucaugaucaccaccaucaucaucgucaucaucgucauccuccucucccucaucgccgucggccuccuccucuacugcaaggcccgcuccacccccgucacccucuccaaggaccagcucuccggcaucaacaacaucgccuucuccaacugaggacuaguggaagcauuuuccuggcugauuaaaagaaauuacucagcuauggucaucuguuccuguuagaaggcuaugcagcauauuauauacuaugcgcauguuaugaaaugcauaauaaaaaauuuuaaaaaaucuaaaagaucuaaaaaaaaaaaaaaaaaaaaaaaaaaaaaaaaaaaaaaaaaaaaaaaaaaaaaaaaaaaaaaaaugcaucccccccccccccccccccccccccccccccaaaggcucuuuucagagccaccagaauu

SEQ ID NO: 7800 - RNA, 1955 nt, Artificial Sequence
  mRNA product Design g-1 comprising derived and/or modified sequence from HRSV(A2)__F_DSCav1_mut8 (opt3)
gggagacuuucccauucuguagcagaauuugguguugccuguggucuuggucccgcggagaagcuuaccauggagcugcucauccuuaaggccaacgcuauuaccacaauacugacugcagugacguucugcuuugccagcggccagaauaucaccgaagaguucuaccaauccacauguucugcggucucaaaaggguauuugggagcuuuaagaacugguugguacaccaguguuauuacaaucgaacugagcaacauuaaggagaucaaaugcaauggcaccgacgccaaggugaaacuaauaaagcaggaacucgauaaguauaaaaacgcaguaacugaccugcagcuucugaugcaguccacacccgccaccgggucuggaucggcuaucgcaucaggcguggccgucuguaagguguugcaccucgagggugagguuaauaaaauuaagagcgcucugcugaguacgaacaaagccguggucucccucucugggugcggagugagcguauuaacuuuuaagguucuggaucuuaagaauuacaucgacaaacaauugcugccuauucuaaacaagcaguccuguucaaucccaaauauagaaaccgugauugaguuccagcagaaaaacaauaggcuccuggaaaucacacgggaguuuagugucaacgcgggcgugacuaccccggugagcacauauaugcuuaccaauucugagcuguugucccucauuaacgauaugcccaucacgaaugaccaaaagaaacugaugucaaacaacguccagaucguucgccagcagagcuacaguauuaugugcauaaucaaggaagagguguuagcauauguagugcaacugccucucuacggcgucauugauacuccauguuggaaacuucauacaucuccccugugcaccacuaauacaaaggaaggguccaacaucuguuugacccgaacggaccguggaugguacugcgauaaugccgguagcgugucguucuuuccucaggcugagaccuguaagguucagucuaacagaguguucugcgacacaaugaacucccuaacucugccaucagaagucaaucucugcaauguggauauauuuaaccccaaauaugacuguaagauuaugaccaguaaaacagauguaagcuccucuguuaucacuagccugggcgccaucgugucaugcuacgggaagaccaaauguacagcaaguaauaagugcaggggaauuaucaagaccuucuccaacggcugugacuaugucagcaauaaagguguggacacugucucuguggggaacacgcuuuacuauguuaauaagcaagagggacagucacuguacgugaaaggcgagccuauuauaaacuuuuaugauccauugguauucccgagugacgaauuugaugcuagcaucucccaggucaaugagaagauuaaccagucucucgccuucauccggaaaucggacgaacuguuacacaacgugaaugcgggcaagagcacaaccaacaucaugauuacuaccauaaucauuguuaucauugugauccugcuaucccucauagccgucgggcugcuuuuguacugcaaggcacgcucaacacccgugacccugaguaaagaucaacucucuggaaucaauaacauugcuuucagcaauugaggacuaguggaagcauuuuccuggcugauuaaaagaaauuacucagcuauggucaucuguuccuguuagaaggcuaugcagcauauuauauacuaugcgcauguuaugaaaugcauaauaaaaaauuuuaaaaaaucuaaaagaucuaaaaaaaaaaaaaaaaaaaaaaaaaaaaaaaaaaaaaaaaaaaaaaaaaaaaaaaaaaaaaaaaugcaucccccccccccccccccccccccccccccccaaaggcucuuuucagagccaccagaauu

SEQ ID NO: 7801 - RNA, 1955 nt, Artificial Sequence
  mRNA product Design g-1 comprising derived and/or modified sequence from HRSV(A2)__F_DSCav1_mut8 (opt4)
gggagacuuucccauucuguagcagaauuugguguugccuguggucuuggucccgcggagaagcuuaccauggagcugcugauccugaaggccaacgccaucaccaccauccugaccgccgugaccuucugcuucgccagcggccagaacaucaccgaggaguucuaccagagcaccugcagcgccgugagcaagggcuaccugggcgcccugagaaccggcugguacaccagcgugaucaccaucgagcugagcaacaucaaggagaucaagugcaacggcaccgacgccaaggugaagcugaucaagcaggagcuggacaaguacaagaacgccgugaccgaccugcagcugcugaugcagagcacccccgccaccggcagcggcagcgccaucgccagcggcguggccgugugcaaggugcugcaccuggagggcgaggugaacaagaucaagagcgcccugcugagcaccaacaaggccguggugagccugagcggcugcggcgugagcgugcugaccuucaaggugcuggaccugaagaacuacaucgacaagcagcugcugcccauccugaacaagcagagcugcagcauccccaacaucgagaccgugaucgaguuccagcagaagaacaacagacugcuggagaucaccagagaguucagcgugaacgccggcgugaccacccccgugagcaccuacaugcugaccaacagcgagcugcugagccugaucaacgacaugcccaucaccaacgaccagaagaagcugaugagcaacaacgugcagaucgugagacagcagagcuacagcaucaugugcaucaucaaggaggaggugcuggccuacguggugcagcugccccuguacggcgugaucgacacccccugcuggaagcugcacaccagcccccugugcaccaccaacaccaaggagggcagcaacaucugccugaccagaaccgacagaggcugguacugcgacaacgccggcagcgugagcuucuucccccaggccgagaccugcaaggugcagagcaacagaguguucugcgacaccaugaacagccugacccugcccagcgaggugaaccugugcaacguggacaucuucaaccccaaguacgacugcaagaucaugaccagcaagaccgacgugagcagcagcgugaucaccagccugggcgccaucgugagcugcuacggcaagaccaagugcaccgccagcaacaagugcagaggcaucaucaagaccuucagcaacggcugcgacuacgugagcaacaagggcguggacaccgugagcgugggcaacacccuguacuacgugaacaagcaggagggccagagccuguacgugaagggcgagcccaucaucaacuucuacgacccccugguguuccccagcgacgaguucgacgccagcaucagccaggugaacgagaagaucaaccagagccuggccuucaucagaaagagcgacgagcugcugcacaacgugaacgccggcaagagcaccaccaacaucaugaucaccaccaucaucaucgugaucaucgugauccugcugagccugaucgccgugggccugcugcuguacugcaaggccagaagcacccccgugacccugagcaaggaccagcugagcggcaucaacaacaucgccuucagcaacugaggacuaguggaagcauuuuccuggcugauuaaaagaaauuacucagcuauggucaucuguuccuguuagaaggcuaugcagcauauuauauacuaugcgcauguuaugaaaugcauaauaaaaaauuuuaaaaaaucuaaaagaucuaaaaaaaaaaaaaaaaaaaaaaaaaaaaaaaaaaaaaaaaaaaaaaaaaaaaaaaaaaaaaaaaugcaucccccccccccccccccccccccccccccccaaaggcucuuuucagagccaccagaauu

SEQ ID NO: 7802 - RNA, 1955 nt, Artificial Sequence
  mRNA product Design g-1 comprising derived and/or modified sequence from HRSV(A2)__F_DSCav1_mut8 (opt5)
gggagacuuucccauucuguagcagaauuugguguugccuguggucuuggucccgcggagaagcuuaccauggagcugcucauccugaaggccaacgcuauuaccacaauccuuacggccgugaccuucugcuuugcgagcggccagaauauuacagaagaguucuaccaauccaccuguucugcugucagcaaaggguaucugggagcccucagaacaggcugguacaccuccguuaucacaauugaacugucuaacaucaaggagaucaaaugcaaugggaccgacgccaaggugaaacuuauuaagcaggaacuggauaaguauaaaaacgcugugacggaccuccagcugcugaugcagagcacccccgccacaggauccggcucugcuaucgccagcggggucgcgguguguaagguucuccaccuggagggagaggugaauaaaauuaaguccgcccuucugagcaccaacaaagcugucgugucucucuccggcugcggcguuagcgugcugacauuuaagguccuugaucugaagaauuacaucgacaaacaacuccugccuauucugaacaagcagucuuguuccaucccgaauauugaaaccgugaucgaguuccagcagaaaaacaaucggcuccuggaaaucacgcgcgaguuuagcgugaacgccggggucacaacccccguuucuacauauaugcuuaccaauuccgagcugcucagccugauuaacgauaugccuaucaccaaugaccaaaagaaacuuauguccaacaacgugcagauugugagacagcagucuuacagcaucaugugcauuaucaaggaagagguccuggcuuaugugguucaacucccccuguacggagugaucgauacaccuuguuggaaacugcauacgagcccccucugcaccacaaauaccaaggaaggcagcaacauuugucugacacggaccgaccgcgggugguacugcgauaaugccggaucugucuccuucuuuccucaggcggagacguguaaggugcagagcaacagaguuuucugcgacacaaugaacucucuuacccugccgagcgaagugaaucucugcaaugucgauaucuuuaaccccaaauaugacuguaagauuaugaccuccaaaacagaugugucuagcuccgucaucaccagccugggcgccauugugucuugcuacgggaagacaaaauguacggcuuccaauaagugccggggaaucaucaagaccuucagcaacggcugugacuauguuucuaauaaaggcguggacacagucuccguggggaacacccuuuacuauguuaauaagcaagagggacagagccuguacgugaaaggcgagccuauuaucaacuuuuaugauccccucgucuucccuuccgacgaauuugaugccucuauuagccaggugaaugagaagaucaaccagucccuggcuuucauucgcaaaucugacgaacugcuccacaacgugaaugccgggaaguccacaaccaacaucaugauuacgaccaucaucauuguuaucauugucauccugcuuucccugauugccgugggacuccugcuguacugcaaggcuagaagcacacccgugacccuuucuaaagaucaacucuccggcaucaauaacaucgcguucagcaauugaggacuaguggaagcauuuuccuggcugauuaaaagaaauuacucagcuauggucaucuguuccuguuagaaggcuaugcagcauauuauauacuaugcgcauguuaugaaaugcauaauaaaaaauuuuaaaaaaucuaaaagaucuaaaaaaaaaaaaaaaaaaaaaaaaaaaaaaaaaaaaaaaaaaaaaaaaaaaaaaaaaaaaaaaaugcaucccccccccccccccccccccccccccccccaaaggcucuuuucagagccaccagaauu

SEQ ID NO: 7803 - RNA, 1955 nt, Artificial Sequence
  mRNA product Design g-1 comprising derived and/or modified sequence from HRSV(A2)__F_DSCav1_mut8 (opt6)
gggagacuuucccauucuguagcagaauuugguguugccuguggucuuggucccgcggagaagcuuaccauggaacuauuaauauuaaaagcaaacgcaaucacaacuauacuaacagcaguaacauucugcuuugccucaggucaaaacauaacagaggaauuuuaccaauccacaugcucugcuguaagcaaaggauaccucggagcauuaagaacuggaugguacaccucaguaauaacuauagaacuaucaaacauaaaagaaauaaaauguaauggcacagacgcaaaagugaaauuaaucaaacaagaacucgauaaauacaaaaaugccguaaccgaucuccaacuuuuaaugcaaagcacacccgcaacagguuccgggucagcaauagcaagcggaguugcaguaugcaaaguacuacacuuagaaggagaaguaaauaaaaucaaaucagccuuacuaucaacaaauaaagcaguuguaucacucucaggaugcggaguauccguacuaacauuuaaaguacuagaucuaaaaaacuacauagauaaacaacucuuaccaauacuaaauaaacaaucauguuccauacccaacauagaaaccguuaucgaauuucaacaaaaaaacaacagauuacuagaaaucacacgagaauuuucaguaaaugcuggagucacaacaccaguuaguacauacaugcucaccaauucagaacuacuaaguuuaauuaacgauaugccaauaacaaacgaccaaaaaaaacuaaugucaaauaacguacaaauaguaagacaacaaucauacucaaucaugugcauaauaaaagaagaaguacuagccuauguaguccaauuaccacucuacggcguaaucgacaccccaugcuggaaauuacacacaagcccauuaugcaccaccaacacaaaagaagguucaaacauuugcuuaaccagaaccgaucgaggaugguacugcgauaacgcaggaucugucuccuuuuucccacaagccgaaacaugcaaaguucaaucaaaccgaguuuucugugacacuaugaacucacucacacuuccaagcgaaguaaaccuaugcaacguagauauauuuaacccuaaauacgacugcaaaauaaugacaagcaaaacagacguuaguucaucaguaauuacaagucuaggcgcaauagugucaugcuacggaaaaacaaaaugcaccgcauccaauaaaugccgaggaaucauuaaaacauucucaaacggaugcgacuacgucagcaauaaaggaguagacacuguuucuguaggaaacacccuauacuauguaaacaaacaagaaggucaaucacuauacguaaagggagaaccaauuauaaauuuuuacgaccccuuaguauuuccaagugaugaauuugacgcaucuauaagucaaguuaacgaaaaaauuaaccaaucacuugcauuuauaagaaaaucagacgaacuacuccauaauguaaacgcagguaaaucaacaacaaacaucaugaucacaaccauaauaauaguaauaauuguaauauuacuaucacuaauagcaguaggauuacuacucuacugcaaagcuagaucuaccccggucacacucucaaaagaccaauuaucuggaauaaacaauauagcauucagcaacuaaggacuaguggaagcauuuuccuggcugauuaaaagaaauuacucagcuauggucaucuguuccuguuagaaggcuaugcagcauauuauauacuaugcgcauguuaugaaaugcauaauaaaaaauuuuaaaaaaucuaaaagaucuaaaaaaaaaaaaaaaaaaaaaaaaaaaaaaaaaaaaaaaaaaaaaaaaaaaaaaaaaaaaaaaaugcaucccccccccccccccccccccccccccccccaaaggcucuuuucagagccaccagaauu

SEQ ID NO: 7804 - RNA, 1955 nt, Artificial Sequence
  mRNA product Design g-1 comprising derived and/or modified sequence from HRSV(A2)__F_DSCav1_mut8 (opt11)
gggagacuuucccauucuguagcagaauuugguguugccuguggucuuggucccgcggagaagcuuaccauggaacuccucauccuuaaagccaacgccauaaccaccauccucaccgccgucaccuucugcuucgcuucuggccaaaacauaaccgaagaguucuaccaauccacgugcucugccgugucaaaaggcuaccucggagcccuccgcacagggugguacacuuccgucaucaccaucgaacucucuaacaucaaagaaaucaagugcaacggcacagacgcgaaagucaagcucaucaaacaagaacuagacaaauacaaaaacgccguaacagaccuccaacuccuaaugcaguccacaccagccacaggcuccggcagcgccaucgccuccggcgucgcugucugcaaaguccuacaccucgaaggcgaagucaacaaaaucaagucagcccuccuuagcaccaacaaagcagucgucucuuuaagcgggugcggagucucuguccuaaccuuuaaaguacucgaccucaaaaacuacaucgacaaacaacuacuaccaauacuaaacaaacagagcugcuccauucccaacaucgaaaccguuaucgaguuccaacaaaagaacaaccgccuccucgaaaucacccgcgaguucuccgucaacgcaggcgucaccaccccagucuccaccuauaugcuaaccaacagcgaacuccucagccucaucaaugacaugccaaucaccaacgaccaaaagaaacucauguccaacaacguacagauaguccgccagcaguccuacagcaucaugugcaucaucaaagaagaagugcucgccuacgugguacaacucccucucuacggagucauugauacacccugcuggaaacuccacacaagcccccucugcacuacaaacaccaaagaaggcucuaacauaugccucacccgcacagaccgugguugguacugcgacaacgccggcuccguauccuucuuuccacaagcugaaaccugcaaaguucaaucaaaccgagucuucugcgacaccaugaacucccucacauugcccagcgaagucaaccucugcaacgucgacaucuucaaccccaaguacgacugcaaaaucaugaccuccaaaaccgacgucagcuccagcgugaucacaagccuaggcgcgaucgucagcugcuacggcaaaaccaaaugcacagccuccaacaaaugccgcggaaucauaaaaacauucaguaacggcugcgacuacguguccaauaaaggagucgacaccguauccgucggaaacacccucuacuacgucaacaaacaagaaggacaaucccucuaugucaaaggcgaacccauuaucaacuucuacgacccccuaguuuuccccuccgacgaguucgacgcaagcauuucccaagucaacgaaaagaucaaucaaucccucgccuucauacgcaaaagcgacgaacuacuacacaacguaaacgccggcaaaagcaccaccaacaucaugaucacaacaaucaucaucgucaucaucgucauccuacucucacucaucgccguuggccuacuacucuacugcaaagcccgcuccacacccgucacccucucaaaagaccaacucuccggcaucaacaacaucgcauucagcaacugaggacuaguggaagcauuuuccuggcugauuaaaagaaauuacucagcuauggucaucuguuccuguuagaaggcuaugcagcauauuauauacuaugcgcauguuaugaaaugcauaauaaaaaauuuuaaaaaaucuaaaagaucuaaaaaaaaaaaaaaaaaaaaaaaaaaaaaaaaaaaaaaaaaaaaaaaaaaaaaaaaaaaaaaaaugcaucccccccccccccccccccccccccccccccaaaggcucuuuucagagccaccagaauu

SEQ ID NO: 7805 - RNA, 1970 nt, Artificial Sequence
  mRNA product Design g-2 comprising derived and/or modified sequence from HRSV(A2)__F_DSCav1_mut8 (opt1)
gggagaguccgcucagccagguugcagaagcggcuuagcguguguccuaaucuucucucugcguguagguaggccugugccgcaaacaagcuuaccauggagcugcucauccugaaggccaacgccaucaccaccauccugacggcggugaccuucugcuucgccagcggccagaacaucaccgaggaguucuaccaguccacgugcagcgccgucuccaagggguaccucggcgcccugcggaccggcugguacaccuccgugaucaccaucgagcugagcaacaucaaggagaucaagugcaacgggaccgacgccaaggugaagcucaucaagcaggagcuggacaaguacaagaacgcggucacggaccugcagcuccugaugcaguccaccccggcaaccggcuccggcuccgccaucgcgagcggcgucgccgugugcaaggugcugcaccucgagggggaggucaacaagaucaagagcgcccugcuguccaccaacaaggccguggugagccucuccggcugcggcgucagcgugcugaccuucaaggugcuggaccucaagaacuacaucgacaagcagcugcugcccauccugaacaagcagagcugcuccauccccaacaucgagacggugaucgaguuccagcagaagaacaaccggcuccuggagaucacccgcgaguucagcgugaacgccggggucaccacccccguguccacguacaugcugaccaacagcgagcuccugucccugaucaacgacaugccgaucaccaacgaccagaagaagcucaugagcaacaacgugcagaucguccggcagcaguccuacagcaucaugugcaucaucaaggaggaggugcuggcguacgugguccagcugccccucuacggcgugaucgacacccccugcuggaagcugcacacgagcccccugugcaccaccaacaccaaggagggguccaacaucugccucacgcgcaccgaccggggcugguacugcgacaacgccggcagcgucuccuucuucccgcaggccgagaccugcaaggugcagagcaaccgcguguucugcgacaccaugaacucccugacgcugcccagcgagguaaaccucugcaacgucgacaucuucaaccccaaguacgacugcaagaucaugaccuccaagaccgacgugagcuccagcgugaucaccucccugggggccaucgucagcugcuacggcaagacgaagugcaccgccagcaacaagugccgggggaucaucaagaccuucuccaacggcugcgacuacgugagcaacaagggcguggacaccguguccgucgggaacacccuguacuacgugaacaagcaggagggccagagccucuacgugaagggggagcccaucaucaacuucuacgacccgcuggucuuccccuccgacgaguucgacgcgagcaucucccaggugaacgagaagaucaaccagagccuggccuucauccgcaaguccgacgagcugcuccacaacgugaacgccggcaagagcacgaccaacaucaugaucaccaccaucaucaucgucaucaucgugauccugcugucccucaucgccguggggcugcugcucuacugcaaggcccggagcacgcccgucacccuguccaaggaccagcugagcggcaucaacaacaucgcguucuccaacugaggacuaguaauaaggaaacuguaugaaugucugugggcaggaagugaagagauccuucuguaaagguuuuuggaauuaugucugcugaauaauaaacuuuuuugaaauaauaaaucugguagaaaaaugagaucuaaaaaaaaaaaaaaaaaaaaaaaaaaaaaaaaaaaaaaaaaaaaaaaaaaaaaaaaaaaaaaaaugcaucccccccccccccccccccccccccccccccaaaggcucuuuucagagccaccagaauu

SEQ ID NO: 7806 - RNA, 1970 nt, Artificial Sequence
  mRNA product Design g-2 comprising derived and/or modified sequence from HRSV(A2)__F_DSCav1_mut8 (opt1)
gggagaguccgcucagccagguugcagaagcggcuuagcguguguccuaaucuucucucugcguguagguaggccugugccgcaaacaagcuuaccauggagcugcucauccugaaggccaacgccaucaccaccauccugacggcggugaccuucugcuucgccagcggccagaacaucaccgaggaguucuaccaguccacgugcagcgccgucuccaagggguaccucggcgcccugcgcaccgggugguacaccagcgugaucaccaucgagcuguccaacaucaaggagaucaagugcaacggcaccgacgccaaggugaagcucaucaagcaggagcuggacaaguacaagaacgcggucacggaccugcagcuccugaugcagagcacccccgccaccggguccggcagcgccaucgccuccggcguggcggugugcaagguccugcaccucgagggggaggugaacaagaucaagagcgcccugcuguccaccaacaaggccguggucagccucuccggcugcggggugagcgugcugacguucaagguccuggaccucaagaacuacaucgacaagcagcugcugccgauccucaacaagcaguccugcagcauccccaacaucgagaccgugaucgaguuccagcagaagaacaaccggcugcuggagaucacccgcgaguucuccgugaacgccggcgucaccacgcccgugagcaccuacaugcucaccaacuccgagcugcugagccucaucaacgacaugcccaucaccaacgaccagaagaagcugaugagcaacaacgugcagaucguccggcagcaguccuacagcaucaugugcaucaucaaggaggaggugcuggccuacgugguccagcucccgcuguacggggugaucgacacgcccugcuggaagcugcacaccagcccccucugcaccaccaacacgaaggagggcuccaacaucugccugacccgcaccgaccggggcugguacugcgacaacgcgggguccgugagcuucuucccccaggccgagaccugcaagguccaguccaaccgcguguucugcgacacgaugaacagccugacccucccguccgaggucaaccugugcaacguggacaucuucaaccccaaguacgacugcaagaucaugaccagcaagaccgacguguccagcuccgucaucacgagccugggcgccaucguguccugcuacgggaagaccaagugcaccgccagcaacaagugccggggcaucaucaagaccuucuccaacggcugcgacuacgugagcaacaagggggucgacacgguguccgugggcaacacccucuacuacgucaacaagcaggaggggcagagccuguacgugaagggcgagcccaucaucaacuucuacgacccccugguguucccgagcgacgaguucgacgccuccaucagccaggucaacgagaagaucaaccagucccucgcguucauccgcaagagcgacgagcugcugcacaacgugaacgccgggaaguccaccaccaacaucaugaucaccacgaucaucaucgugaucaucgucauccuccugagccugaucgccgugggccuccugcuguacugcaaggcccgguccacccccgugacccugagcaaggaccagcucuccggcaucaacaacaucgccuucagcaacugaggacuaguaauaaggaaacuguaugaaugucugugggcaggaagugaagagauccuucuguaaagguuuuuggaauuaugucugcugaauaauaaacuuuuuugaaauaauaaaucugguagaaaaaugagaucuaaaaaaaaaaaaaaaaaaaaaaaaaaaaaaaaaaaaaaaaaaaaaaaaaaaaaaaaaaaaaaaaugcaucccccccccccccccccccccccccccccccaaaggcucuuuucagagccaccagaauu

SEQ ID NO: 7807 - RNA, 1970 nt, Artificial Sequence
  mRNA product Design g-2 comprising derived and/or modified sequence from HRSV(A2)__F_DSCav1_mut8 (opt2)
gggagaguccgcucagccagguugcagaagcggcuuagcguguguccuaaucuucucucugcguguagguaggccugugccgcaaacaagcuuaccauggagcuccucauccucaaggccaacgccaucaccaccauccucaccgccgucaccuucugcuucgccuccggccagaacaucaccgaggaguucuaccaguccaccugcuccgccgucuccaagggcuaccucggcgcccuccgcaccggcugguacaccuccgucaucaccaucgagcucuccaacaucaaggagaucaagugcaacggcaccgacgccaaggucaagcucaucaagcaggagcucgacaaguacaagaacgccgucaccgaccuccagcuccucaugcaguccacccccgccaccggcuccggcuccgccaucgccuccggcgucgccgucugcaagguccuccaccucgagggcgaggucaacaagaucaaguccgcccuccucuccaccaacaaggccgucgucucccucuccggcugcggcgucuccguccucaccuucaagguccucgaccucaagaacuacaucgacaagcagcuccuccccauccucaacaagcaguccugcuccauccccaacaucgagaccgucaucgaguuccagcagaagaacaaccgccuccucgagaucacccgcgaguucuccgucaacgccggcgucaccacccccgucuccaccuacaugcucaccaacuccgagcuccucucccucaucaacgacaugcccaucaccaacgaccagaagaagcucauguccaacaacguccagaucguccgccagcaguccuacuccaucaugugcaucaucaaggaggagguccucgccuacgucguccagcucccccucuacggcgucaucgacacccccugcuggaagcuccacaccuccccccucugcaccaccaacaccaaggagggcuccaacaucugccucacccgcaccgaccgcggcugguacugcgacaacgccggcuccgucuccuucuucccccaggccgagaccugcaagguccaguccaaccgcgucuucugcgacaccaugaacucccucacccuccccuccgaggucaaccucugcaacgucgacaucuucaaccccaaguacgacugcaagaucaugaccuccaagaccgacgucuccuccuccgucaucaccucccucggcgccaucgucuccugcuacggcaagaccaagugcaccgccuccaacaagugccgcggcaucaucaagaccuucuccaacggcugcgacuacgucuccaacaagggcgucgacaccgucuccgucggcaacacccucuacuacgucaacaagcaggagggccagucccucuacgucaagggcgagcccaucaucaacuucuacgacccccucgucuuccccuccgacgaguucgacgccuccaucucccaggucaacgagaagaucaaccagucccucgccuucauccgcaaguccgacgagcuccuccacaacgucaacgccggcaaguccaccaccaacaucaugaucaccaccaucaucaucgucaucaucgucauccuccucucccucaucgccgucggccuccuccucuacugcaaggcccgcuccacccccgucacccucuccaaggaccagcucuccggcaucaacaacaucgccuucuccaacugaggacuaguaauaaggaaacuguaugaaugucugugggcaggaagugaagagauccuucuguaaagguuuuuggaauuaugucugcugaauaauaaacuuuuuugaaauaauaaaucugguagaaaaaugagaucuaaaaaaaaaaaaaaaaaaaaaaaaaaaaaaaaaaaaaaaaaaaaaaaaaaaaaaaaaaaaaaaaugcaucccccccccccccccccccccccccccccccaaaggcucuuuucagagccaccagaauu

SEQ ID NO: 7808 - RNA, 1970 nt, Artificial Sequence
  mRNA product Design g-2 comprising derived and/or modified sequence from HRSV(A2)__F_DSCav1_mut8 (opt3)
gggagaguccgcucagccagguugcagaagcggcuuagcguguguccuaaucuucucucugcguguagguaggccugugccgcaaacaagcuuaccauggagcugcucauccuuaaggccaacgcuauuaccacaauacugacugcagugacguucugcuuugccagcggccagaauaucaccgaagaguucuaccaauccacauguucugcggucucaaaaggguauuugggagcuuuaagaacugguugguacaccaguguuauuacaaucgaacugagcaacauuaaggagaucaaaugcaauggcaccgacgccaaggugaaacuaauaaagcaggaacucgauaaguauaaaaacgcaguaacugaccugcagcuucugaugcaguccacacccgccaccgggucuggaucggcuaucgcaucaggcguggccgucuguaagguguugcaccucgagggugagguuaauaaaauuaagagcgcucugcugaguacgaacaaagccguggucucccucucugggugcggagugagcguauuaacuuuuaagguucuggaucuuaagaauuacaucgacaaacaauugcugccuauucuaaacaagcaguccuguucaaucccaaauauagaaaccgugauugaguuccagcagaaaaacaauaggcuccuggaaaucacacgggaguuuagugucaacgcgggcgugacuaccccggugagcacauauaugcuuaccaauucugagcuguugucccucauuaacgauaugcccaucacgaaugaccaaaagaaacugaugucaaacaacguccagaucguucgccagcagagcuacaguauuaugugcauaaucaaggaagagguguuagcauauguagugcaacugccucucuacggcgucauugauacuccauguuggaaacuucauacaucuccccugugcaccacuaauacaaaggaaggguccaacaucuguuugacccgaacggaccguggaugguacugcgauaaugccgguagcgugucguucuuuccucaggcugagaccuguaagguucagucuaacagaguguucugcgacacaaugaacucccuaacucugccaucagaagucaaucucugcaauguggauauauuuaaccccaaauaugacuguaagauuaugaccaguaaaacagauguaagcuccucuguuaucacuagccugggcgccaucgugucaugcuacgggaagaccaaauguacagcaaguaauaagugcaggggaauuaucaagaccuucuccaacggcugugacuaugucagcaauaaagguguggacacugucucuguggggaacacgcuuuacuauguuaauaagcaagagggacagucacuguacgugaaaggcgagccuauuauaaacuuuuaugauccauugguauucccgagugacgaauuugaugcuagcaucucccaggucaaugagaagauuaaccagucucucgccuucauccggaaaucggacgaacuguuacacaacgugaaugcgggcaagagcacaaccaacaucaugauuacuaccauaaucauuguuaucauugugauccugcuaucccucauagccgucgggcugcuuuuguacugcaaggcacgcucaacacccgugacccugaguaaagaucaacucucuggaaucaauaacauugcuuucagcaauugaggacuaguaauaaggaaacuguaugaaugucugugggcaggaagugaagagauccuucuguaaagguuuuuggaauuaugucugcugaauaauaaacuuuuuugaaauaauaaaucugguagaaaaaugagaucuaaaaaaaaaaaaaaaaaaaaaaaaaaaaaaaaaaaaaaaaaaaaaaaaaaaaaaaaaaaaaaaaugcaucccccccccccccccccccccccccccccccaaaggcucuuuucagagccaccagaauu

SEQ ID NO: 7809 - RNA, 1970 nt, Artificial Sequence
  mRNA product Design g-2 comprising derived and/or modified sequence from HRSV(A2)__F_DSCav1_mut8 (opt4)
gggagaguccgcucagccagguugcagaagcggcuuagcguguguccuaaucuucucucugcguguagguaggccugugccgcaaacaagcuuaccauggagcugcugauccugaaggccaacgccaucaccaccauccugaccgccgugaccuucugcuucgccagcggccagaacaucaccgaggaguucuaccagagcaccugcagcgccgugagcaagggcuaccugggcgcccugagaaccggcugguacaccagcgugaucaccaucgagcugagcaacaucaaggagaucaagugcaacggcaccgacgccaaggugaagcugaucaagcaggagcuggacaaguacaagaacgccgugaccgaccugcagcugcugaugcagagcacccccgccaccggcagcggcagcgccaucgccagcggcguggccgugugcaaggugcugcaccuggagggcgaggugaacaagaucaagagcgcccugcugagcaccaacaaggccguggugagccugagcggcugcggcgugagcgugcugaccuucaaggugcuggaccugaagaacuacaucgacaagcagcugcugcccauccugaacaagcagagcugcagcauccccaacaucgagaccgugaucgaguuccagcagaagaacaacagacugcuggagaucaccagagaguucagcgugaacgccggcgugaccacccccgugagcaccuacaugcugaccaacagcgagcugcugagccugaucaacgacaugcccaucaccaacgaccagaagaagcugaugagcaacaacgugcagaucgugagacagcagagcuacagcaucaugugcaucaucaaggaggaggugcuggccuacguggugcagcugccccuguacggcgugaucgacacccccugcuggaagcugcacaccagcccccugugcaccaccaacaccaaggagggcagcaacaucugccugaccagaaccgacagaggcugguacugcgacaacgccggcagcgugagcuucuucccccaggccgagaccugcaaggugcagagcaacagaguguucugcgacaccaugaacagccugacccugcccagcgaggugaaccugugcaacguggacaucuucaaccccaaguacgacugcaagaucaugaccagcaagaccgacgugagcagcagcgugaucaccagccugggcgccaucgugagcugcuacggcaagaccaagugcaccgccagcaacaagugcagaggcaucaucaagaccuucagcaacggcugcgacuacgugagcaacaagggcguggacaccgugagcgugggcaacacccuguacuacgugaacaagcaggagggccagagccuguacgugaagggcgagcccaucaucaacuucuacgacccccugguguuccccagcgacgaguucgacgccagcaucagccaggugaacgagaagaucaaccagagccuggccuucaucagaaagagcgacgagcugcugcacaacgugaacgccggcaagagcaccaccaacaucaugaucaccaccaucaucaucgugaucaucgugauccugcugagccugaucgccgugggccugcugcuguacugcaaggccagaagcacccccgugacccugagcaaggaccagcugagcggcaucaacaacaucgccuucagcaacugaggacuaguaauaaggaaacuguaugaaugucugugggcaggaagugaagagauccuucuguaaagguuuuuggaauuaugucugcugaauaauaaacuuuuuugaaauaauaaaucugguagaaaaaugagaucuaaaaaaaaaaaaaaaaaaaaaaaaaaaaaaaaaaaaaaaaaaaaaaaaaaaaaaaaaaaaaaaaugcaucccccccccccccccccccccccccccccccaaaggcucuuuucagagccaccagaauu

SEQ ID NO: 7810 - RNA, 1970 nt, Artificial Sequence
  mRNA product Design g-2 comprising derived and/or modified sequence from HRSV(A2)__F_DSCav1_mut8 (opt5)
gggagaguccgcucagccagguugcagaagcggcuuagcguguguccuaaucuucucucugcguguagguaggccugugccgcaaacaagcuuaccauggagcugcucauccugaaggccaacgcuauuaccacaauccuuacggccgugaccuucugcuuugcgagcggccagaauauuacagaagaguucuaccaauccaccuguucugcugucagcaaaggguaucugggagcccucagaacaggcugguacaccuccguuaucacaauugaacugucuaacaucaaggagaucaaaugcaaugggaccgacgccaaggugaaacuuauuaagcaggaacuggauaaguauaaaaacgcugugacggaccuccagcugcugaugcagagcacccccgccacaggauccggcucugcuaucgccagcggggucgcgguguguaagguucuccaccuggagggagaggugaauaaaauuaaguccgcccuucugagcaccaacaaagcugucgugucucucuccggcugcggcguuagcgugcugacauuuaagguccuugaucugaagaauuacaucgacaaacaacuccugccuauucugaacaagcagucuuguuccaucccgaauauugaaaccgugaucgaguuccagcagaaaaacaaucggcuccuggaaaucacgcgcgaguuuagcgugaacgccggggucacaacccccguuucuacauauaugcuuaccaauuccgagcugcucagccugauuaacgauaugccuaucaccaaugaccaaaagaaacuuauguccaacaacgugcagauugugagacagcagucuuacagcaucaugugcauuaucaaggaagagguccuggcuuaugugguucaacucccccuguacggagugaucgauacaccuuguuggaaacugcauacgagcccccucugcaccacaaauaccaaggaaggcagcaacauuugucugacacggaccgaccgcgggugguacugcgauaaugccggaucugucuccuucuuuccucaggcggagacguguaaggugcagagcaacagaguuuucugcgacacaaugaacucucuuacccugccgagcgaagugaaucucugcaaugucgauaucuuuaaccccaaauaugacuguaagauuaugaccuccaaaacagaugugucuagcuccgucaucaccagccugggcgccauugugucuugcuacgggaagacaaaauguacggcuuccaauaagugccggggaaucaucaagaccuucagcaacggcugugacuauguuucuaauaaaggcguggacacagucuccguggggaacacccuuuacuauguuaauaagcaagagggacagagccuguacgugaaaggcgagccuauuaucaacuuuuaugauccccucgucuucccuuccgacgaauuugaugccucuauuagccaggugaaugagaagaucaaccagucccuggcuuucauucgcaaaucugacgaacugcuccacaacgugaaugccgggaaguccacaaccaacaucaugauuacgaccaucaucauuguuaucauugucauccugcuuucccugauugccgugggacuccugcuguacugcaaggcuagaagcacacccgugacccuuucuaaagaucaacucuccggcaucaauaacaucgcguucagcaauugaggacuaguaauaaggaaacuguaugaaugucugugggcaggaagugaagagauccuucuguaaagguuuuuggaauuaugucugcugaauaauaaacuuuuuugaaauaauaaaucugguagaaaaaugagaucuaaaaaaaaaaaaaaaaaaaaaaaaaaaaaaaaaaaaaaaaaaaaaaaaaaaaaaaaaaaaaaaaugcaucccccccccccccccccccccccccccccccaaaggcucuuuucagagccaccagaauu

SEQ ID NO: 7811 - RNA, 1970 nt, Artificial Sequence
  mRNA product Design g-2 comprising derived and/or modified sequence from HRSV(A2)__F_DSCav1_mut8 (opt6)
gggagaguccgcucagccagguugcagaagcggcuuagcguguguccuaaucuucucucugcguguagguaggccugugccgcaaacaagcuuaccauggaacuauuaauauuaaaagcaaacgcaaucacaacuauacuaacagcaguaacauucugcuuugccucaggucaaaacauaacagaggaauuuuaccaauccacaugcucugcuguaagcaaaggauaccucggagcauuaagaacuggaugguacaccucaguaauaacuauagaacuaucaaacauaaaagaaauaaaauguaauggcacagacgcaaaagugaaauuaaucaaacaagaacucgauaaauacaaaaaugccguaaccgaucuccaacuuuuaaugcaaagcacacccgcaacagguuccgggucagcaauagcaagcggaguugcaguaugcaaaguacuacacuuagaaggagaaguaaauaaaaucaaaucagccuuacuaucaacaaauaaagcaguuguaucacucucaggaugcggaguauccguacuaacauuuaaaguacuagaucuaaaaaacuacauagauaaacaacucuuaccaauacuaaauaaacaaucauguuccauacccaacauagaaaccguuaucgaauuucaacaaaaaaacaacagauuacuagaaaucacacgagaauuuucaguaaaugcuggagucacaacaccaguuaguacauacaugcucaccaauucagaacuacuaaguuuaauuaacgauaugccaauaacaaacgaccaaaaaaaacuaaugucaaauaacguacaaauaguaagacaacaaucauacucaaucaugugcauaauaaaagaagaaguacuagccuauguaguccaauuaccacucuacggcguaaucgacaccccaugcuggaaauuacacacaagcccauuaugcaccaccaacacaaaagaagguucaaacauuugcuuaaccagaaccgaucgaggaugguacugcgauaacgcaggaucugucuccuuuuucccacaagccgaaacaugcaaaguucaaucaaaccgaguuuucugugacacuaugaacucacucacacuuccaagcgaaguaaaccuaugcaacguagauauauuuaacccuaaauacgacugcaaaauaaugacaagcaaaacagacguuaguucaucaguaauuacaagucuaggcgcaauagugucaugcuacggaaaaacaaaaugcaccgcauccaauaaaugccgaggaaucauuaaaacauucucaaacggaugcgacuacgucagcaauaaaggaguagacacuguuucuguaggaaacacccuauacuauguaaacaaacaagaaggucaaucacuauacguaaagggagaaccaauuauaaauuuuuacgaccccuuaguauuuccaagugaugaauuugacgcaucuauaagucaaguuaacgaaaaaauuaaccaaucacuugcauuuauaagaaaaucagacgaacuacuccauaauguaaacgcagguaaaucaacaacaaacaucaugaucacaaccauaauaauaguaauaauuguaauauuacuaucacuaauagcaguaggauuacuacucuacugcaaagcuagaucuaccccggucacacucucaaaagaccaauuaucuggaauaaacaauauagcauucagcaacuaaggacuaguaauaaggaaacuguaugaaugucugugggcaggaagugaagagauccuucuguaaagguuuuuggaauuaugucugcugaauaauaaacuuuuuugaaauaauaaaucugguagaaaaaugagaucuaaaaaaaaaaaaaaaaaaaaaaaaaaaaaaaaaaaaaaaaaaaaaaaaaaaaaaaaaaaaaaaaugcaucccccccccccccccccccccccccccccccaaaggcucuuuucagagccaccagaauu

SEQ ID NO: 7812 - RNA, 1970 nt, Artificial Sequence
  mRNA product Design g-2 comprising derived and/or modified sequence from HRSV(A2)__F_DSCav1_mut8 (opt11)
gggagaguccgcucagccagguugcagaagcggcuuagcguguguccuaaucuucucucugcguguagguaggccugugccgcaaacaagcuuaccauggaacuccucauccuuaaagccaacgccauaaccaccauccucaccgccgucaccuucugcuucgcuucuggccaaaacauaaccgaagaguucuaccaauccacgugcucugccgugucaaaaggcuaccucggagcccuccgcacagggugguacacuuccgucaucaccaucgaacucucuaacaucaaagaaaucaagugcaacggcacagacgcgaaagucaagcucaucaaacaagaacuagacaaauacaaaaacgccguaacagaccuccaacuccuaaugcaguccacaccagccacaggcuccggcagcgccaucgccuccggcgucgcugucugcaaaguccuacaccucgaaggcgaagucaacaaaaucaagucagcccuccuuagcaccaacaaagcagucgucucuuuaagcgggugcggagucucuguccuaaccuuuaaaguacucgaccucaaaaacuacaucgacaaacaacuacuaccaauacuaaacaaacagagcugcuccauucccaacaucgaaaccguuaucgaguuccaacaaaagaacaaccgccuccucgaaaucacccgcgaguucuccgucaacgcaggcgucaccaccccagucuccaccuauaugcuaaccaacagcgaacuccucagccucaucaaugacaugccaaucaccaacgaccaaaagaaacucauguccaacaacguacagauaguccgccagcaguccuacagcaucaugugcaucaucaaagaagaagugcucgccuacgugguacaacucccucucuacggagucauugauacacccugcuggaaacuccacacaagcccccucugcacuacaaacaccaaagaaggcucuaacauaugccucacccgcacagaccgugguugguacugcgacaacgccggcuccguauccuucuuuccacaagcugaaaccugcaaaguucaaucaaaccgagucuucugcgacaccaugaacucccucacauugcccagcgaagucaaccucugcaacgucgacaucuucaaccccaaguacgacugcaaaaucaugaccuccaaaaccgacgucagcuccagcgugaucacaagccuaggcgcgaucgucagcugcuacggcaaaaccaaaugcacagccuccaacaaaugccgcggaaucauaaaaacauucaguaacggcugcgacuacguguccaauaaaggagucgacaccguauccgucggaaacacccucuacuacgucaacaaacaagaaggacaaucccucuaugucaaaggcgaacccauuaucaacuucuacgacccccuaguuuuccccuccgacgaguucgacgcaagcauuucccaagucaacgaaaagaucaaucaaucccucgccuucauacgcaaaagcgacgaacuacuacacaacguaaacgccggcaaaagcaccaccaacaucaugaucacaacaaucaucaucgucaucaucgucauccuacucucacucaucgccguuggccuacuacucuacugcaaagcccgcuccacacccgucacccucucaaaagaccaacucuccggcaucaacaacaucgcauucagcaacugaggacuaguaauaaggaaacuguaugaaugucugugggcaggaagugaagagauccuucuguaaagguuuuuggaauuaugucugcugaauaauaaacuuuuuugaaauaauaaaucugguagaaaaaugagaucuaaaaaaaaaaaaaaaaaaaaaaaaaaaaaaaaaaaaaaaaaaaaaaaaaaaaaaaaaaaaaaaaugcaucccccccccccccccccccccccccccccccaaaggcucuuuucagagccaccagaauu

SEQ ID NO: 7813 - RNA, 2202 nt, Artificial Sequence
  mRNA product Design g-3 comprising derived and/or modified sequence from HRSV(A2)__F_DSCav1_mut8 (opt1)
gggagaguccgcucagccagguugcagaagcggcuuagcguguguccuaaucuucucucugcguguagguaggccugugccgcaaacaagcuuaccauggagcugcucauccugaaggccaacgccaucaccaccauccugacggcggugaccuucugcuucgccagcggccagaacaucaccgaggaguucuaccaguccacgugcagcgccgucuccaagggguaccucggcgcccugcggaccggcugguacaccuccgugaucaccaucgagcugagcaacaucaaggagaucaagugcaacgggaccgacgccaaggugaagcucaucaagcaggagcuggacaaguacaagaacgcggucacggaccugcagcuccugaugcaguccaccccggcaaccggcuccggcuccgccaucgcgagcggcgucgccgugugcaaggugcugcaccucgagggggaggucaacaagaucaagagcgcccugcuguccaccaacaaggccguggugagccucuccggcugcggcgucagcgugcugaccuucaaggugcuggaccucaagaacuacaucgacaagcagcugcugcccauccugaacaagcagagcugcuccauccccaacaucgagacggugaucgaguuccagcagaagaacaaccggcuccuggagaucacccgcgaguucagcgugaacgccggggucaccacccccguguccacguacaugcugaccaacagcgagcuccugucccugaucaacgacaugccgaucaccaacgaccagaagaagcucaugagcaacaacgugcagaucguccggcagcaguccuacagcaucaugugcaucaucaaggaggaggugcuggcguacgugguccagcugccccucuacggcgugaucgacacccccugcuggaagcugcacacgagcccccugugcaccaccaacaccaaggagggguccaacaucugccucacgcgcaccgaccggggcugguacugcgacaacgccggcagcgucuccuucuucccgcaggccgagaccugcaaggugcagagcaaccgcguguucugcgacaccaugaacucccugacgcugcccagcgagguaaaccucugcaacgucgacaucuucaaccccaaguacgacugcaagaucaugaccuccaagaccgacgugagcuccagcgugaucaccucccugggggccaucgucagcugcuacggcaagacgaagugcaccgccagcaacaagugccgggggaucaucaagaccuucuccaacggcugcgacuacgugagcaacaagggcguggacaccguguccgucgggaacacccuguacuacgugaacaagcaggagggccagagccucuacgugaagggggagcccaucaucaacuucuacgacccgcuggucuuccccuccgacgaguucgacgcgagcaucucccaggugaacgagaagaucaaccagagccuggccuucauccgcaaguccgacgagcugcuccacaacgugaacgccggcaagagcacgaccaacaucaugaucaccaccaucaucaucgucaucaucgugauccugcugucccucaucgccguggggcugcugcucuacugcaaggcccggagcacgcccgucacccuguccaaggaccagcugagcggcaucaacaacaucgcguucuccaacugaggacuagugaagggaacacccaaauuuaauucagccuuaagcacaauuaauuaagagugaaacguaauuguacaagcaguuggucacccaccauagggcaugaucaacaccgcaaccuuuccuuuuucccccagugauucugaaaaaccccucuucccuucagcuugcuuagauguuccaaauuuaguaagcuuaaggcggccuacagaagaaaaagaaaaaaaaggccacaaaaguucccucucacuuucaguaaauaaaauaaaagcagcaacagaaauaaagaaauaaaugaaauucaaaaugaaauaaauauuguguugugcagcauuaaaaaaucaauaaaaauuaaaaaugagcaagaucuaaaaaaaaaaaaaaaaaaaaaaaaaaaaaaaaaaaaaaaaaaaaaaaaaaaaaaaaaaaaaaaaugcaucccccccccccccccccccccccccccccccaaaggcucuuuucagagccaccagaauu

SEQ ID NO: 7814 - RNA, 2202 nt, Artificial Sequence
  mRNA product Design g-3 comprising derived and/or modified sequence from HRSV(A2)__F_DSCav1_mut8 (opt1)
gggagaguccgcucagccagguugcagaagcggcuuagcguguguccuaaucuucucucugcguguagguaggccugugccgcaaacaagcuuaccauggagcugcucauccugaaggccaacgccaucaccaccauccugacggcggugaccuucugcuucgccagcggccagaacaucaccgaggaguucuaccaguccacgugcagcgccgucuccaagggguaccucggcgcccugcgcaccgggugguacaccagcgugaucaccaucgagcuguccaacaucaaggagaucaagugcaacggcaccgacgccaaggugaagcucaucaagcaggagcuggacaaguacaagaacgcggucacggaccugcagcuccugaugcagagcacccccgccaccggguccggcagcgccaucgccuccggcguggcggugugcaagguccugcaccucgagggggaggugaacaagaucaagagcgcccugcuguccaccaacaaggccguggucagccucuccggcugcggggugagcgugcugacguucaagguccuggaccucaagaacuacaucgacaagcagcugcugccgauccucaacaagcaguccugcagcauccccaacaucgagaccgugaucgaguuccagcagaagaacaaccggcugcuggagaucacccgcgaguucuccgugaacgccggcgucaccacgcccgugagcaccuacaugcucaccaacuccgagcugcugagccucaucaacgacaugcccaucaccaacgaccagaagaagcugaugagcaacaacgugcagaucguccggcagcaguccuacagcaucaugugcaucaucaaggaggaggugcuggccuacgugguccagcucccgcuguacggggugaucgacacgcccugcuggaagcugcacaccagcccccucugcaccaccaacacgaaggagggcuccaacaucugccugacccgcaccgaccggggcugguacugcgacaacgcgggguccgugagcuucuucccccaggccgagaccugcaagguccaguccaaccgcguguucugcgacacgaugaacagccugacccucccguccgaggucaaccugugcaacguggacaucuucaaccccaaguacgacugcaagaucaugaccagcaagaccgacguguccagcuccgucaucacgagccugggcgccaucguguccugcuacgggaagaccaagugcaccgccagcaacaagugccggggcaucaucaagaccuucuccaacggcugcgacuacgugagcaacaagggggucgacacgguguccgugggcaacacccucuacuacgucaacaagcaggaggggcagagccuguacgugaagggcgagcccaucaucaacuucuacgacccccugguguucccgagcgacgaguucgacgccuccaucagccaggucaacgagaagaucaaccagucccucgcguucauccgcaagagcgacgagcugcugcacaacgugaacgccgggaaguccaccaccaacaucaugaucaccacgaucaucaucgugaucaucgucauccuccugagccugaucgccgugggccuccugcuguacugcaaggcccgguccacccccgugacccugagcaaggaccagcucuccggcaucaacaacaucgccuucagcaacugaggacuagugaagggaacacccaaauuuaauucagccuuaagcacaauuaauuaagagugaaacguaauuguacaagcaguuggucacccaccauagggcaugaucaacaccgcaaccuuuccuuuuucccccagugauucugaaaaaccccucuucccuucagcuugcuuagauguuccaaauuuaguaagcuuaaggcggccuacagaagaaaaagaaaaaaaaggccacaaaaguucccucucacuuucaguaaauaaaauaaaagcagcaacagaaauaaagaaauaaaugaaauucaaaaugaaauaaauauuguguugugcagcauuaaaaaaucaauaaaaauuaaaaaugagcaagaucuaaaaaaaaaaaaaaaaaaaaaaaaaaaaaaaaaaaaaaaaaaaaaaaaaaaaaaaaaaaaaaaaugcaucccccccccccccccccccccccccccccccaaaggcucuuuucagagccaccagaauu

SEQ ID NO: 7815 - RNA, 2202 nt, Artificial Sequence
  mRNA product Design g-3 comprising derived and/or modified sequence from HRSV(A2)__F_DSCav1_mut8 (opt2)
gggagaguccgcucagccagguugcagaagcggcuuagcguguguccuaaucuucucucugcguguagguaggccugugccgcaaacaagcuuaccauggagcuccucauccucaaggccaacgccaucaccaccauccucaccgccgucaccuucugcuucgccuccggccagaacaucaccgaggaguucuaccaguccaccugcuccgccgucuccaagggcuaccucggcgcccuccgcaccggcugguacaccuccgucaucaccaucgagcucuccaacaucaaggagaucaagugcaacggcaccgacgccaaggucaagcucaucaagcaggagcucgacaaguacaagaacgccgucaccgaccuccagcuccucaugcaguccacccccgccaccggcuccggcuccgccaucgccuccggcgucgccgucugcaagguccuccaccucgagggcgaggucaacaagaucaaguccgcccuccucuccaccaacaaggccgucgucucccucuccggcugcggcgucuccguccucaccuucaagguccucgaccucaagaacuacaucgacaagcagcuccuccccauccucaacaagcaguccugcuccauccccaacaucgagaccgucaucgaguuccagcagaagaacaaccgccuccucgagaucacccgcgaguucuccgucaacgccggcgucaccacccccgucuccaccuacaugcucaccaacuccgagcuccucucccucaucaacgacaugcccaucaccaacgaccagaagaagcucauguccaacaacguccagaucguccgccagcaguccuacuccaucaugugcaucaucaaggaggagguccucgccuacgucguccagcucccccucuacggcgucaucgacacccccugcuggaagcuccacaccuccccccucugcaccaccaacaccaaggagggcuccaacaucugccucacccgcaccgaccgcggcugguacugcgacaacgccggcuccgucuccuucuucccccaggccgagaccugcaagguccaguccaaccgcgucuucugcgacaccaugaacucccucacccuccccuccgaggucaaccucugcaacgucgacaucuucaaccccaaguacgacugcaagaucaugaccuccaagaccgacgucuccuccuccgucaucaccucccucggcgccaucgucuccugcuacggcaagaccaagugcaccgccuccaacaagugccgcggcaucaucaagaccuucuccaacggcugcgacuacgucuccaacaagggcgucgacaccgucuccgucggcaacacccucuacuacgucaacaagcaggagggccagucccucuacgucaagggcgagcccaucaucaacuucuacgacccccucgucuuccccuccgacgaguucgacgccuccaucucccaggucaacgagaagaucaaccagucccucgccuucauccgcaaguccgacgagcuccuccacaacgucaacgccggcaaguccaccaccaacaucaugaucaccaccaucaucaucgucaucaucgucauccuccucucccucaucgccgucggccuccuccucuacugcaaggcccgcuccacccccgucacccucuccaaggaccagcucuccggcaucaacaacaucgccuucuccaacugaggacuagugaagggaacacccaaauuuaauucagccuuaagcacaauuaauuaagagugaaacguaauuguacaagcaguuggucacccaccauagggcaugaucaacaccgcaaccuuuccuuuuucccccagugauucugaaaaaccccucuucccuucagcuugcuuagauguuccaaauuuaguaagcuuaaggcggccuacagaagaaaaagaaaaaaaaggccacaaaaguucccucucacuuucaguaaauaaaauaaaagcagcaacagaaauaaagaaauaaaugaaauucaaaaugaaauaaauauuguguugugcagcauuaaaaaaucaauaaaaauuaaaaaugagcaagaucuaaaaaaaaaaaaaaaaaaaaaaaaaaaaaaaaaaaaaaaaaaaaaaaaaaaaaaaaaaaaaaaaugcaucccccccccccccccccccccccccccccccaaaggcucuuuucagagccaccagaauu

SEQ ID NO: 7816 - RNA, 2202 nt, Artificial Sequence
  mRNA product Design g-3 comprising derived and/or modified sequence from HRSV(A2)__F_DSCav1_mut8 (opt3)
gggagaguccgcucagccagguugcagaagcggcuuagcguguguccuaaucuucucucugcguguagguaggccugugccgcaaacaagcuuaccauggagcugcucauccuuaaggccaacgcuauuaccacaauacugacugcagugacguucugcuuugccagcggccagaauaucaccgaagaguucuaccaauccacauguucugcggucucaaaaggguauuugggagcuuuaagaacugguugguacaccaguguuauuacaaucgaacugagcaacauuaaggagaucaaaugcaauggcaccgacgccaaggugaaacuaauaaagcaggaacucgauaaguauaaaaacgcaguaacugaccugcagcuucugaugcaguccacacccgccaccgggucuggaucggcuaucgcaucaggcguggccgucuguaagguguugcaccucgagggugagguuaauaaaauuaagagcgcucugcugaguacgaacaaagccguggucucccucucugggugcggagugagcguauuaacuuuuaagguucuggaucuuaagaauuacaucgacaaacaauugcugccuauucuaaacaagcaguccuguucaaucccaaauauagaaaccgugauugaguuccagcagaaaaacaauaggcuccuggaaaucacacgggaguuuagugucaacgcgggcgugacuaccccggugagcacauauaugcuuaccaauucugagcuguugucccucauuaacgauaugcccaucacgaaugaccaaaagaaacugaugucaaacaacguccagaucguucgccagcagagcuacaguauuaugugcauaaucaaggaagagguguuagcauauguagugcaacugccucucuacggcgucauugauacuccauguuggaaacuucauacaucuccccugugcaccacuaauacaaaggaaggguccaacaucuguuugacccgaacggaccguggaugguacugcgauaaugccgguagcgugucguucuuuccucaggcugagaccuguaagguucagucuaacagaguguucugcgacacaaugaacucccuaacucugccaucagaagucaaucucugcaauguggauauauuuaaccccaaauaugacuguaagauuaugaccaguaaaacagauguaagcuccucuguuaucacuagccugggcgccaucgugucaugcuacgggaagaccaaauguacagcaaguaauaagugcaggggaauuaucaagaccuucuccaacggcugugacuaugucagcaauaaagguguggacacugucucuguggggaacacgcuuuacuauguuaauaagcaagagggacagucacuguacgugaaaggcgagccuauuauaaacuuuuaugauccauugguauucccgagugacgaauuugaugcuagcaucucccaggucaaugagaagauuaaccagucucucgccuucauccggaaaucggacgaacuguuacacaacgugaaugcgggcaagagcacaaccaacaucaugauuacuaccauaaucauuguuaucauugugauccugcuaucccucauagccgucgggcugcuuuuguacugcaaggcacgcucaacacccgugacccugaguaaagaucaacucucuggaaucaauaacauugcuuucagcaauugaggacuagugaagggaacacccaaauuuaauucagccuuaagcacaauuaauuaagagugaaacguaauuguacaagcaguuggucacccaccauagggcaugaucaacaccgcaaccuuuccuuuuucccccagugauucugaaaaaccccucuucccuucagcuugcuuagauguuccaaauuuaguaagcuuaaggcggccuacagaagaaaaagaaaaaaaaggccacaaaaguucccucucacuuucaguaaauaaaauaaaagcagcaacagaaauaaagaaauaaaugaaauucaaaaugaaauaaauauuguguugugcagcauuaaaaaaucaauaaaaauuaaaaaugagcaagaucuaaaaaaaaaaaaaaaaaaaaaaaaaaaaaaaaaaaaaaaaaaaaaaaaaaaaaaaaaaaaaaaaugcaucccccccccccccccccccccccccccccccaaaggcucuuuucagagccaccagaauu

SEQ ID NO: 7817 - RNA, 2202 nt, Artificial Sequence
  mRNA product Design g-3 comprising derived and/or modified sequence from HRSV(A2)__F_DSCav1_mut8 (opt4)
gggagaguccgcucagccagguugcagaagcggcuuagcguguguccuaaucuucucucugcguguagguaggccugugccgcaaacaagcuuaccauggagcugcugauccugaaggccaacgccaucaccaccauccugaccgccgugaccuucugcuucgccagcggccagaacaucaccgaggaguucuaccagagcaccugcagcgccgugagcaagggcuaccugggcgcccugagaaccggcugguacaccagcgugaucaccaucgagcugagcaacaucaaggagaucaagugcaacggcaccgacgccaaggugaagcugaucaagcaggagcuggacaaguacaagaacgccgugaccgaccugcagcugcugaugcagagcacccccgccaccggcagcggcagcgccaucgccagcggcguggccgugugcaaggugcugcaccuggagggcgaggugaacaagaucaagagcgcccugcugagcaccaacaaggccguggugagccugagcggcugcggcgugagcgugcugaccuucaaggugcuggaccugaagaacuacaucgacaagcagcugcugcccauccugaacaagcagagcugcagcauccccaacaucgagaccgugaucgaguuccagcagaagaacaacagacugcuggagaucaccagagaguucagcgugaacgccggcgugaccacccccgugagcaccuacaugcugaccaacagcgagcugcugagccugaucaacgacaugcccaucaccaacgaccagaagaagcugaugagcaacaacgugcagaucgugagacagcagagcuacagcaucaugugcaucaucaaggaggaggugcuggccuacguggugcagcugccccuguacggcgugaucgacacccccugcuggaagcugcacaccagcccccugugcaccaccaacaccaaggagggcagcaacaucugccugaccagaaccgacagaggcugguacugcgacaacgccggcagcgugagcuucuucccccaggccgagaccugcaaggugcagagcaacagaguguucugcgacaccaugaacagccugacccugcccagcgaggugaaccugugcaacguggacaucuucaaccccaaguacgacugcaagaucaugaccagcaagaccgacgugagcagcagcgugaucaccagccugggcgccaucgugagcugcuacggcaagaccaagugcaccgccagcaacaagugcagaggcaucaucaagaccuucagcaacggcugcgacuacgugagcaacaagggcguggacaccgugagcgugggcaacacccuguacuacgugaacaagcaggagggccagagccuguacgugaagggcgagcccaucaucaacuucuacgacccccugguguuccccagcgacgaguucgacgccagcaucagccaggugaacgagaagaucaaccagagccuggccuucaucagaaagagcgacgagcugcugcacaacgugaacgccggcaagagcaccaccaacaucaugaucaccaccaucaucaucgugaucaucgugauccugcugagccugaucgccgugggccugcugcuguacugcaaggccagaagcacccccgugacccugagcaaggaccagcugagcggcaucaacaacaucgccuucagcaacugaggacuagugaagggaacacccaaauuuaauucagccuuaagcacaauuaauuaagagugaaacguaauuguacaagcaguuggucacccaccauagggcaugaucaacaccgcaaccuuuccuuuuucccccagugauucugaaaaaccccucuucccuucagcuugcuuagauguuccaaauuuaguaagcuuaaggcggccuacagaagaaaaagaaaaaaaaggccacaaaaguucccucucacuuucaguaaauaaaauaaaagcagcaacagaaauaaagaaauaaaugaaauucaaaaugaaauaaauauuguguugugcagcauuaaaaaaucaauaaaaauuaaaaaugagcaagaucuaaaaaaaaaaaaaaaaaaaaaaaaaaaaaaaaaaaaaaaaaaaaaaaaaaaaaaaaaaaaaaaaugcaucccccccccccccccccccccccccccccccaaaggcucuuuucagagccaccagaauu

SEQ ID NO: 7818 - RNA, 2202 nt, Artificial Sequence
  mRNA product Design g-3 comprising derived and/or modified sequence from HRSV(A2)__F_DSCav1_mut8 (opt5)
gggagaguccgcucagccagguugcagaagcggcuuagcguguguccuaaucuucucucugcguguagguaggccugugccgcaaacaagcuuaccauggagcugcucauccugaaggccaacgcuauuaccacaauccuuacggccgugaccuucugcuuugcgagcggccagaauauuacagaagaguucuaccaauccaccuguucugcugucagcaaaggguaucugggagcccucagaacaggcugguacaccuccguuaucacaauugaacugucuaacaucaaggagaucaaaugcaaugggaccgacgccaaggugaaacuuauuaagcaggaacuggauaaguauaaaaacgcugugacggaccuccagcugcugaugcagagcacccccgccacaggauccggcucugcuaucgccagcggggucgcgguguguaagguucuccaccuggagggagaggugaauaaaauuaaguccgcccuucugagcaccaacaaagcugucgugucucucuccggcugcggcguuagcgugcugacauuuaagguccuugaucugaagaauuacaucgacaaacaacuccugccuauucugaacaagcagucuuguuccaucccgaauauugaaaccgugaucgaguuccagcagaaaaacaaucggcuccuggaaaucacgcgcgaguuuagcgugaacgccggggucacaacccccguuucuacauauaugcuuaccaauuccgagcugcucagccugauuaacgauaugccuaucaccaaugaccaaaagaaacuuauguccaacaacgugcagauugugagacagcagucuuacagcaucaugugcauuaucaaggaagagguccuggcuuaugugguucaacucccccuguacggagugaucgauacaccuuguuggaaacugcauacgagcccccucugcaccacaaauaccaaggaaggcagcaacauuugucugacacggaccgaccgcgggugguacugcgauaaugccggaucugucuccuucuuuccucaggcggagacguguaaggugcagagcaacagaguuuucugcgacacaaugaacucucuuacccugccgagcgaagugaaucucugcaaugucgauaucuuuaaccccaaauaugacuguaagauuaugaccuccaaaacagaugugucuagcuccgucaucaccagccugggcgccauugugucuugcuacgggaagacaaaauguacggcuuccaauaagugccggggaaucaucaagaccuucagcaacggcugugacuauguuucuaauaaaggcguggacacagucuccguggggaacacccuuuacuauguuaauaagcaagagggacagagccuguacgugaaaggcgagccuauuaucaacuuuuaugauccccucgucuucccuuccgacgaauuugaugccucuauuagccaggugaaugagaagaucaaccagucccuggcuuucauucgcaaaucugacgaacugcuccacaacgugaaugccgggaaguccacaaccaacaucaugauuacgaccaucaucauuguuaucauugucauccugcuuucccugauugccgugggacuccugcuguacugcaaggcuagaagcacacccgugacccuuucuaaagaucaacucuccggcaucaauaacaucgcguucagcaauugaggacuagugaagggaacacccaaauuuaauucagccuuaagcacaauuaauuaagagugaaacguaauuguacaagcaguuggucacccaccauagggcaugaucaacaccgcaaccuuuccuuuuucccccagugauucugaaaaaccccucuucccuucagcuugcuuagauguuccaaauuuaguaagcuuaaggcggccuacagaagaaaaagaaaaaaaaggccacaaaaguucccucucacuuucaguaaauaaaauaaaagcagcaacagaaauaaagaaauaaaugaaauucaaaaugaaauaaauauuguguugugcagcauuaaaaaaucaauaaaaauuaaaaaugagcaagaucuaaaaaaaaaaaaaaaaaaaaaaaaaaaaaaaaaaaaaaaaaaaaaaaaaaaaaaaaaaaaaaaaugcaucccccccccccccccccccccccccccccccaaaggcucuuuucagagccaccagaauu

SEQ ID NO: 7819 - RNA, 2202 nt, Artificial Sequence
  mRNA product Design g-3 comprising derived and/or modified sequence from HRSV(A2)__F_DSCav1_mut8 (opt6)
gggagaguccgcucagccagguugcagaagcggcuuagcguguguccuaaucuucucucugcguguagguaggccugugccgcaaacaagcuuaccauggaacuauuaauauuaaaagcaaacgcaaucacaacuauacuaacagcaguaacauucugcuuugccucaggucaaaacauaacagaggaauuuuaccaauccacaugcucugcuguaagcaaaggauaccucggagcauuaagaacuggaugguacaccucaguaauaacuauagaacuaucaaacauaaaagaaauaaaauguaauggcacagacgcaaaagugaaauuaaucaaacaagaacucgauaaauacaaaaaugccguaaccgaucuccaacuuuuaaugcaaagcacacccgcaacagguuccgggucagcaauagcaagcggaguugcaguaugcaaaguacuacacuuagaaggagaaguaaauaaaaucaaaucagccuuacuaucaacaaauaaagcaguuguaucacucucaggaugcggaguauccguacuaacauuuaaaguacuagaucuaaaaaacuacauagauaaacaacucuuaccaauacuaaauaaacaaucauguuccauacccaacauagaaaccguuaucgaauuucaacaaaaaaacaacagauuacuagaaaucacacgagaauuuucaguaaaugcuggagucacaacaccaguuaguacauacaugcucaccaauucagaacuacuaaguuuaauuaacgauaugccaauaacaaacgaccaaaaaaaacuaaugucaaauaacguacaaauaguaagacaacaaucauacucaaucaugugcauaauaaaagaagaaguacuagccuauguaguccaauuaccacucuacggcguaaucgacaccccaugcuggaaauuacacacaagcccauuaugcaccaccaacacaaaagaagguucaaacauuugcuuaaccagaaccgaucgaggaugguacugcgauaacgcaggaucugucuccuuuuucccacaagccgaaacaugcaaaguucaaucaaaccgaguuuucugugacacuaugaacucacucacacuuccaagcgaaguaaaccuaugcaacguagauauauuuaacccuaaauacgacugcaaaauaaugacaagcaaaacagacguuaguucaucaguaauuacaagucuaggcgcaauagugucaugcuacggaaaaacaaaaugcaccgcauccaauaaaugccgaggaaucauuaaaacauucucaaacggaugcgacuacgucagcaauaaaggaguagacacuguuucuguaggaaacacccuauacuauguaaacaaacaagaaggucaaucacuauacguaaagggagaaccaauuauaaauuuuuacgaccccuuaguauuuccaagugaugaauuugacgcaucuauaagucaaguuaacgaaaaaauuaaccaaucacuugcauuuauaagaaaaucagacgaacuacuccauaauguaaacgcagguaaaucaacaacaaacaucaugaucacaaccauaauaauaguaauaauuguaauauuacuaucacuaauagcaguaggauuacuacucuacugcaaagcuagaucuaccccggucacacucucaaaagaccaauuaucuggaauaaacaauauagcauucagcaacuaaggacuagugaagggaacacccaaauuuaauucagccuuaagcacaauuaauuaagagugaaacguaauuguacaagcaguuggucacccaccauagggcaugaucaacaccgcaaccuuuccuuuuucccccagugauucugaaaaaccccucuucccuucagcuugcuuagauguuccaaauuuaguaagcuuaaggcggccuacagaagaaaaagaaaaaaaaggccacaaaaguucccucucacuuucaguaaauaaaauaaaagcagcaacagaaauaaagaaauaaaugaaauucaaaaugaaauaaauauuguguugugcagcauuaaaaaaucaauaaaaauuaaaaaugagcaagaucuaaaaaaaaaaaaaaaaaaaaaaaaaaaaaaaaaaaaaaaaaaaaaaaaaaaaaaaaaaaaaaaaugcaucccccccccccccccccccccccccccccccaaaggcucuuuucagagccaccagaauu

SEQ ID NO: 7820 - RNA, 2202 nt, Artificial Sequence
  mRNA product Design g-3 comprising derived and/or modified sequence from HRSV(A2)__F_DSCav1_mut8 (opt11)
gggagaguccgcucagccagguugcagaagcggcuuagcguguguccuaaucuucucucugcguguagguaggccugugccgcaaacaagcuuaccauggaacuccucauccuuaaagccaacgccauaaccaccauccucaccgccgucaccuucugcuucgcuucuggccaaaacauaaccgaagaguucuaccaauccacgugcucugccgugucaaaaggcuaccucggagcccuccgcacagggugguacacuuccgucaucaccaucgaacucucuaacaucaaagaaaucaagugcaacggcacagacgcgaaagucaagcucaucaaacaagaacuagacaaauacaaaaacgccguaacagaccuccaacuccuaaugcaguccacaccagccacaggcuccggcagcgccaucgccuccggcgucgcugucugcaaaguccuacaccucgaaggcgaagucaacaaaaucaagucagcccuccuuagcaccaacaaagcagucgucucuuuaagcgggugcggagucucuguccuaaccuuuaaaguacucgaccucaaaaacuacaucgacaaacaacuacuaccaauacuaaacaaacagagcugcuccauucccaacaucgaaaccguuaucgaguuccaacaaaagaacaaccgccuccucgaaaucacccgcgaguucuccgucaacgcaggcgucaccaccccagucuccaccuauaugcuaaccaacagcgaacuccucagccucaucaaugacaugccaaucaccaacgaccaaaagaaacucauguccaacaacguacagauaguccgccagcaguccuacagcaucaugugcaucaucaaagaagaagugcucgccuacgugguacaacucccucucuacggagucauugauacacccugcuggaaacuccacacaagcccccucugcacuacaaacaccaaagaaggcucuaacauaugccucacccgcacagaccgugguugguacugcgacaacgccggcuccguauccuucuuuccacaagcugaaaccugcaaaguucaaucaaaccgagucuucugcgacaccaugaacucccucacauugcccagcgaagucaaccucugcaacgucgacaucuucaaccccaaguacgacugcaaaaucaugaccuccaaaaccgacgucagcuccagcgugaucacaagccuaggcgcgaucgucagcugcuacggcaaaaccaaaugcacagccuccaacaaaugccgcggaaucauaaaaacauucaguaacggcugcgacuacguguccaauaaaggagucgacaccguauccgucggaaacacccucuacuacgucaacaaacaagaaggacaaucccucuaugucaaaggcgaacccauuaucaacuucuacgacccccuaguuuuccccuccgacgaguucgacgcaagcauuucccaagucaacgaaaagaucaaucaaucccucgccuucauacgcaaaagcgacgaacuacuacacaacguaaacgccggcaaaagcaccaccaacaucaugaucacaacaaucaucaucgucaucaucgucauccuacucucacucaucgccguuggccuacuacucuacugcaaagcccgcuccacacccgucacccucucaaaagaccaacucuccggcaucaacaacaucgcauucagcaacugaggacuagugaagggaacacccaaauuuaauucagccuuaagcacaauuaauuaagagugaaacguaauuguacaagcaguuggucacccaccauagggcaugaucaacaccgcaaccuuuccuuuuucccccagugauucugaaaaaccccucuucccuucagcuugcuuagauguuccaaauuuaguaagcuuaaggcggccuacagaagaaaaagaaaaaaaaggccacaaaaguucccucucacuuucaguaaauaaaauaaaagcagcaacagaaauaaagaaauaaaugaaauucaaaaugaaauaaauauuguguugugcagcauuaaaaaaucaauaaaaauuaaaaaugagcaagaucuaaaaaaaaaaaaaaaaaaaaaaaaaaaaaaaaaaaaaaaaaaaaaaaaaaaaaaaaaaaaaaaaugcaucccccccccccccccccccccccccccccccaaaggcucuuuucagagccaccagaauu

SEQ ID NO: 7821 - RNA, 1997 nt, Artificial Sequence
  mRNA product Design g-4 comprising derived and/or modified sequence from HRSV(A2)__F_DSCav1_mut8 (opt1)
gggagacuccugucgggcggaaguaggaggaguagaguuuaaaaacaguacucuuuuuccgguucgggacguaguugaagcaacgacaagccggauaaccgcucuugagacaggaagcuuaccauggagcugcucauccugaaggccaacgccaucaccaccauccugacggcggugaccuucugcuucgccagcggccagaacaucaccgaggaguucuaccaguccacgugcagcgccgucuccaagggguaccucggcgcccugcggaccggcugguacaccuccgugaucaccaucgagcugagcaacaucaaggagaucaagugcaacgggaccgacgccaaggugaagcucaucaagcaggagcuggacaaguacaagaacgcggucacggaccugcagcuccugaugcaguccaccccggcaaccggcuccggcuccgccaucgcgagcggcgucgccgugugcaaggugcugcaccucgagggggaggucaacaagaucaagagcgcccugcuguccaccaacaaggccguggugagccucuccggcugcggcgucagcgugcugaccuucaaggugcuggaccucaagaacuacaucgacaagcagcugcugcccauccugaacaagcagagcugcuccauccccaacaucgagacggugaucgaguuccagcagaagaacaaccggcuccuggagaucacccgcgaguucagcgugaacgccggggucaccacccccguguccacguacaugcugaccaacagcgagcuccugucccugaucaacgacaugccgaucaccaacgaccagaagaagcucaugagcaacaacgugcagaucguccggcagcaguccuacagcaucaugugcaucaucaaggaggaggugcuggcguacgugguccagcugccccucuacggcgugaucgacacccccugcuggaagcugcacacgagcccccugugcaccaccaacaccaaggagggguccaacaucugccucacgcgcaccgaccggggcugguacugcgacaacgccggcagcgucuccuucuucccgcaggccgagaccugcaaggugcagagcaaccgcguguucugcgacaccaugaacucccugacgcugcccagcgagguaaaccucugcaacgucgacaucuucaaccccaaguacgacugcaagaucaugaccuccaagaccgacgugagcuccagcgugaucaccucccugggggccaucgucagcugcuacggcaagacgaagugcaccgccagcaacaagugccgggggaucaucaagaccuucuccaacggcugcgacuacgugagcaacaagggcguggacaccguguccgucgggaacacccuguacuacgugaacaagcaggagggccagagccucuacgugaagggggagcccaucaucaacuucuacgacccgcuggucuuccccuccgacgaguucgacgcgagcaucucccaggugaacgagaagaucaaccagagccuggccuucauccgcaaguccgacgagcugcuccacaacgugaacgccggcaagagcacgaccaacaucaugaucaccaccaucaucaucgucaucaucgugauccugcugucccucaucgccguggggcugcugcucuacugcaaggcccggagcacgcccgucacccuguccaaggaccagcugagcggcaucaacaacaucgcguucuccaacugaggacuaguaauaaggaaacuguaugaaugucugugggcaggaagugaagagauccuucuguaaagguuuuuggaauuaugucugcugaauaauaaacuuuuuugaaauaauaaaucugguagaaaaaugagaucuaaaaaaaaaaaaaaaaaaaaaaaaaaaaaaaaaaaaaaaaaaaaaaaaaaaaaaaaaaaaaaaaugcaucccccccccccccccccccccccccccccccaaaggcucuuuucagagccaccagaauu

SEQ ID NO: 7822 - RNA, 1997 nt, Artificial Sequence
  mRNA product Design g-4 comprising derived and/or modified sequence from HRSV(A2)__F_DSCav1_mut8 (opt1)
gggagacuccugucgggcggaaguaggaggaguagaguuuaaaaacaguacucuuuuuccgguucgggacguaguugaagcaacgacaagccggauaaccgcucuugagacaggaagcuuaccauggagcugcucauccugaaggccaacgccaucaccaccauccugacggcggugaccuucugcuucgccagcggccagaacaucaccgaggaguucuaccaguccacgugcagcgccgucuccaagggguaccucggcgcccugcgcaccgggugguacaccagcgugaucaccaucgagcuguccaacaucaaggagaucaagugcaacggcaccgacgccaaggugaagcucaucaagcaggagcuggacaaguacaagaacgcggucacggaccugcagcuccugaugcagagcacccccgccaccggguccggcagcgccaucgccuccggcguggcggugugcaagguccugcaccucgagggggaggugaacaagaucaagagcgcccugcuguccaccaacaaggccguggucagccucuccggcugcggggugagcgugcugacguucaagguccuggaccucaagaacuacaucgacaagcagcugcugccgauccucaacaagcaguccugcagcauccccaacaucgagaccgugaucgaguuccagcagaagaacaaccggcugcuggagaucacccgcgaguucuccgugaacgccggcgucaccacgcccgugagcaccuacaugcucaccaacuccgagcugcugagccucaucaacgacaugcccaucaccaacgaccagaagaagcugaugagcaacaacgugcagaucguccggcagcaguccuacagcaucaugugcaucaucaaggaggaggugcuggccuacgugguccagcucccgcuguacggggugaucgacacgcccugcuggaagcugcacaccagcccccucugcaccaccaacacgaaggagggcuccaacaucugccugacccgcaccgaccggggcugguacugcgacaacgcgggguccgugagcuucuucccccaggccgagaccugcaagguccaguccaaccgcguguucugcgacacgaugaacagccugacccucccguccgaggucaaccugugcaacguggacaucuucaaccccaaguacgacugcaagaucaugaccagcaagaccgacguguccagcuccgucaucacgagccugggcgccaucguguccugcuacgggaagaccaagugcaccgccagcaacaagugccggggcaucaucaagaccuucuccaacggcugcgacuacgugagcaacaagggggucgacacgguguccgugggcaacacccucuacuacgucaacaagcaggaggggcagagccuguacgugaagggcgagcccaucaucaacuucuacgacccccugguguucccgagcgacgaguucgacgccuccaucagccaggucaacgagaagaucaaccagucccucgcguucauccgcaagagcgacgagcugcugcacaacgugaacgccgggaaguccaccaccaacaucaugaucaccacgaucaucaucgugaucaucgucauccuccugagccugaucgccgugggccuccugcuguacugcaaggcccgguccacccccgugacccugagcaaggaccagcucuccggcaucaacaacaucgccuucagcaacugaggacuaguaauaaggaaacuguaugaaugucugugggcaggaagugaagagauccuucuguaaagguuuuuggaauuaugucugcugaauaauaaacuuuuuugaaauaauaaaucugguagaaaaaugagaucuaaaaaaaaaaaaaaaaaaaaaaaaaaaaaaaaaaaaaaaaaaaaaaaaaaaaaaaaaaaaaaaaugcaucccccccccccccccccccccccccccccccaaaggcucuuuucagagccaccagaauu

SEQ ID NO: 7823 - RNA, 1997 nt, Artificial Sequence
  mRNA product Design g-4 comprising derived and/or modified sequence from HRSV(A2)__F_DSCav1_mut8 (opt2)
gggagacuccugucgggcggaaguaggaggaguagaguuuaaaaacaguacucuuuuuccgguucgggacguaguugaagcaacgacaagccggauaaccgcucuugagacaggaagcuuaccauggagcuccucauccucaaggccaacgccaucaccaccauccucaccgccgucaccuucugcuucgccuccggccagaacaucaccgaggaguucuaccaguccaccugcuccgccgucuccaagggcuaccucggcgcccuccgcaccggcugguacaccuccgucaucaccaucgagcucuccaacaucaaggagaucaagugcaacggcaccgacgccaaggucaagcucaucaagcaggagcucgacaaguacaagaacgccgucaccgaccuccagcuccucaugcaguccacccccgccaccggcuccggcuccgccaucgccuccggcgucgccgucugcaagguccuccaccucgagggcgaggucaacaagaucaaguccgcccuccucuccaccaacaaggccgucgucucccucuccggcugcggcgucuccguccucaccuucaagguccucgaccucaagaacuacaucgacaagcagcuccuccccauccucaacaagcaguccugcuccauccccaacaucgagaccgucaucgaguuccagcagaagaacaaccgccuccucgagaucacccgcgaguucuccgucaacgccggcgucaccacccccgucuccaccuacaugcucaccaacuccgagcuccucucccucaucaacgacaugcccaucaccaacgaccagaagaagcucauguccaacaacguccagaucguccgccagcaguccuacuccaucaugugcaucaucaaggaggagguccucgccuacgucguccagcucccccucuacggcgucaucgacacccccugcuggaagcuccacaccuccccccucugcaccaccaacaccaaggagggcuccaacaucugccucacccgcaccgaccgcggcugguacugcgacaacgccggcuccgucuccuucuucccccaggccgagaccugcaagguccaguccaaccgcgucuucugcgacaccaugaacucccucacccuccccuccgaggucaaccucugcaacgucgacaucuucaaccccaaguacgacugcaagaucaugaccuccaagaccgacgucuccuccuccgucaucaccucccucggcgccaucgucuccugcuacggcaagaccaagugcaccgccuccaacaagugccgcggcaucaucaagaccuucuccaacggcugcgacuacgucuccaacaagggcgucgacaccgucuccgucggcaacacccucuacuacgucaacaagcaggagggccagucccucuacgucaagggcgagcccaucaucaacuucuacgacccccucgucuuccccuccgacgaguucgacgccuccaucucccaggucaacgagaagaucaaccagucccucgccuucauccgcaaguccgacgagcuccuccacaacgucaacgccggcaaguccaccaccaacaucaugaucaccaccaucaucaucgucaucaucgucauccuccucucccucaucgccgucggccuccuccucuacugcaaggcccgcuccacccccgucacccucuccaaggaccagcucuccggcaucaacaacaucgccuucuccaacugaggacuaguaauaaggaaacuguaugaaugucugugggcaggaagugaagagauccuucuguaaagguuuuuggaauuaugucugcugaauaauaaacuuuuuugaaauaauaaaucugguagaaaaaugagaucuaaaaaaaaaaaaaaaaaaaaaaaaaaaaaaaaaaaaaaaaaaaaaaaaaaaaaaaaaaaaaaaaugcaucccccccccccccccccccccccccccccccaaaggcucuuuucagagccaccagaauu

SEQ ID NO: 7824 - RNA, 1997 nt, Artificial Sequence
  mRNA product Design g-4 comprising derived and/or modified sequence from HRSV(A2)__F_DSCav1_mut8 (opt3)
gggagacuccugucgggcggaaguaggaggaguagaguuuaaaaacaguacucuuuuuccgguucgggacguaguugaagcaacgacaagccggauaaccgcucuugagacaggaagcuuaccauggagcugcucauccuuaaggccaacgcuauuaccacaauacugacugcagugacguucugcuuugccagcggccagaauaucaccgaagaguucuaccaauccacauguucugcggucucaaaaggguauuugggagcuuuaagaacugguugguacaccaguguuauuacaaucgaacugagcaacauuaaggagaucaaaugcaauggcaccgacgccaaggugaaacuaauaaagcaggaacucgauaaguauaaaaacgcaguaacugaccugcagcuucugaugcaguccacacccgccaccgggucuggaucggcuaucgcaucaggcguggccgucuguaagguguugcaccucgagggugagguuaauaaaauuaagagcgcucugcugaguacgaacaaagccguggucucccucucugggugcggagugagcguauuaacuuuuaagguucuggaucuuaagaauuacaucgacaaacaauugcugccuauucuaaacaagcaguccuguucaaucccaaauauagaaaccgugauugaguuccagcagaaaaacaauaggcuccuggaaaucacacgggaguuuagugucaacgcgggcgugacuaccccggugagcacauauaugcuuaccaauucugagcuguugucccucauuaacgauaugcccaucacgaaugaccaaaagaaacugaugucaaacaacguccagaucguucgccagcagagcuacaguauuaugugcauaaucaaggaagagguguuagcauauguagugcaacugccucucuacggcgucauugauacuccauguuggaaacuucauacaucuccccugugcaccacuaauacaaaggaaggguccaacaucuguuugacccgaacggaccguggaugguacugcgauaaugccgguagcgugucguucuuuccucaggcugagaccuguaagguucagucuaacagaguguucugcgacacaaugaacucccuaacucugccaucagaagucaaucucugcaauguggauauauuuaaccccaaauaugacuguaagauuaugaccaguaaaacagauguaagcuccucuguuaucacuagccugggcgccaucgugucaugcuacgggaagaccaaauguacagcaaguaauaagugcaggggaauuaucaagaccuucuccaacggcugugacuaugucagcaauaaagguguggacacugucucuguggggaacacgcuuuacuauguuaauaagcaagagggacagucacuguacgugaaaggcgagccuauuauaaacuuuuaugauccauugguauucccgagugacgaauuugaugcuagcaucucccaggucaaugagaagauuaaccagucucucgccuucauccggaaaucggacgaacuguuacacaacgugaaugcgggcaagagcacaaccaacaucaugauuacuaccauaaucauuguuaucauugugauccugcuaucccucauagccgucgggcugcuuuuguacugcaaggcacgcucaacacccgugacccugaguaaagaucaacucucuggaaucaauaacauugcuuucagcaauugaggacuaguaauaaggaaacuguaugaaugucugugggcaggaagugaagagauccuucuguaaagguuuuuggaauuaugucugcugaauaauaaacuuuuuugaaauaauaaaucugguagaaaaaugagaucuaaaaaaaaaaaaaaaaaaaaaaaaaaaaaaaaaaaaaaaaaaaaaaaaaaaaaaaaaaaaaaaaugcaucccccccccccccccccccccccccccccccaaaggcucuuuucagagccaccagaauu

SEQ ID NO: 7825 - RNA, 1997 nt, Artificial Sequence
  mRNA product Design g-4 comprising derived and/or modified sequence from HRSV(A2)__F_DSCav1_mut8 (opt4)
gggagacuccugucgggcggaaguaggaggaguagaguuuaaaaacaguacucuuuuuccgguucgggacguaguugaagcaacgacaagccggauaaccgcucuugagacaggaagcuuaccauggagcugcugauccugaaggccaacgccaucaccaccauccugaccgccgugaccuucugcuucgccagcggccagaacaucaccgaggaguucuaccagagcaccugcagcgccgugagcaagggcuaccugggcgcccugagaaccggcugguacaccagcgugaucaccaucgagcugagcaacaucaaggagaucaagugcaacggcaccgacgccaaggugaagcugaucaagcaggagcuggacaaguacaagaacgccgugaccgaccugcagcugcugaugcagagcacccccgccaccggcagcggcagcgccaucgccagcggcguggccgugugcaaggugcugcaccuggagggcgaggugaacaagaucaagagcgcccugcugagcaccaacaaggccguggugagccugagcggcugcggcgugagcgugcugaccuucaaggugcuggaccugaagaacuacaucgacaagcagcugcugcccauccugaacaagcagagcugcagcauccccaacaucgagaccgugaucgaguuccagcagaagaacaacagacugcuggagaucaccagagaguucagcgugaacgccggcgugaccacccccgugagcaccuacaugcugaccaacagcgagcugcugagccugaucaacgacaugcccaucaccaacgaccagaagaagcugaugagcaacaacgugcagaucgugagacagcagagcuacagcaucaugugcaucaucaaggaggaggugcuggccuacguggugcagcugccccuguacggcgugaucgacacccccugcuggaagcugcacaccagcccccugugcaccaccaacaccaaggagggcagcaacaucugccugaccagaaccgacagaggcugguacugcgacaacgccggcagcgugagcuucuucccccaggccgagaccugcaaggugcagagcaacagaguguucugcgacaccaugaacagccugacccugcccagcgaggugaaccugugcaacguggacaucuucaaccccaaguacgacugcaagaucaugaccagcaagaccgacgugagcagcagcgugaucaccagccugggcgccaucgugagcugcuacggcaagaccaagugcaccgccagcaacaagugcagaggcaucaucaagaccuucagcaacggcugcgacuacgugagcaacaagggcguggacaccgugagcgugggcaacacccuguacuacgugaacaagcaggagggccagagccuguacgugaagggcgagcccaucaucaacuucuacgacccccugguguuccccagcgacgaguucgacgccagcaucagccaggugaacgagaagaucaaccagagccuggccuucaucagaaagagcgacgagcugcugcacaacgugaacgccggcaagagcaccaccaacaucaugaucaccaccaucaucaucgugaucaucgugauccugcugagccugaucgccgugggccugcugcuguacugcaaggccagaagcacccccgugacccugagcaaggaccagcugagcggcaucaacaacaucgccuucagcaacugaggacuaguaauaaggaaacuguaugaaugucugugggcaggaagugaagagauccuucuguaaagguuuuuggaauuaugucugcugaauaauaaacuuuuuugaaauaauaaaucugguagaaaaaugagaucuaaaaaaaaaaaaaaaaaaaaaaaaaaaaaaaaaaaaaaaaaaaaaaaaaaaaaaaaaaaaaaaaugcaucccccccccccccccccccccccccccccccaaaggcucuuuucagagccaccagaauu

SEQ ID NO: 7826 - RNA, 1997 nt, Artificial Sequence
  mRNA product Design g-4 comprising derived and/or modified sequence from HRSV(A2)__F_DSCav1_mut8 (opt5)
gggagacuccugucgggcggaaguaggaggaguagaguuuaaaaacaguacucuuuuuccgguucgggacguaguugaagcaacgacaagccggauaaccgcucuugagacaggaagcuuaccauggagcugcucauccugaaggccaacgcuauuaccacaauccuuacggccgugaccuucugcuuugcgagcggccagaauauuacagaagaguucuaccaauccaccuguucugcugucagcaaaggguaucugggagcccucagaacaggcugguacaccuccguuaucacaauugaacugucuaacaucaaggagaucaaaugcaaugggaccgacgccaaggugaaacuuauuaagcaggaacuggauaaguauaaaaacgcugugacggaccuccagcugcugaugcagagcacccccgccacaggauccggcucugcuaucgccagcggggucgcgguguguaagguucuccaccuggagggagaggugaauaaaauuaaguccgcccuucugagcaccaacaaagcugucgugucucucuccggcugcggcguuagcgugcugacauuuaagguccuugaucugaagaauuacaucgacaaacaacuccugccuauucugaacaagcagucuuguuccaucccgaauauugaaaccgugaucgaguuccagcagaaaaacaaucggcuccuggaaaucacgcgcgaguuuagcgugaacgccggggucacaacccccguuucuacauauaugcuuaccaauuccgagcugcucagccugauuaacgauaugccuaucaccaaugaccaaaagaaacuuauguccaacaacgugcagauugugagacagcagucuuacagcaucaugugcauuaucaaggaagagguccuggcuuaugugguucaacucccccuguacggagugaucgauacaccuuguuggaaacugcauacgagcccccucugcaccacaaauaccaaggaaggcagcaacauuugucugacacggaccgaccgcgggugguacugcgauaaugccggaucugucuccuucuuuccucaggcggagacguguaaggugcagagcaacagaguuuucugcgacacaaugaacucucuuacccugccgagcgaagugaaucucugcaaugucgauaucuuuaaccccaaauaugacuguaagauuaugaccuccaaaacagaugugucuagcuccgucaucaccagccugggcgccauugugucuugcuacgggaagacaaaauguacggcuuccaauaagugccggggaaucaucaagaccuucagcaacggcugugacuauguuucuaauaaaggcguggacacagucuccguggggaacacccuuuacuauguuaauaagcaagagggacagagccuguacgugaaaggcgagccuauuaucaacuuuuaugauccccucgucuucccuuccgacgaauuugaugccucuauuagccaggugaaugagaagaucaaccagucccuggcuuucauucgcaaaucugacgaacugcuccacaacgugaaugccgggaaguccacaaccaacaucaugauuacgaccaucaucauuguuaucauugucauccugcuuucccugauugccgugggacuccugcuguacugcaaggcuagaagcacacccgugacccuuucuaaagaucaacucuccggcaucaauaacaucgcguucagcaauugaggacuaguaauaaggaaacuguaugaaugucugugggcaggaagugaagagauccuucuguaaagguuuuuggaauuaugucugcugaauaauaaacuuuuuugaaauaauaaaucugguagaaaaaugagaucuaaaaaaaaaaaaaaaaaaaaaaaaaaaaaaaaaaaaaaaaaaaaaaaaaaaaaaaaaaaaaaaaugcaucccccccccccccccccccccccccccccccaaaggcucuuuucagagccaccagaauu

SEQ ID NO: 7827 - RNA, 1997 nt, Artificial Sequence
  mRNA product Design g-4 comprising derived and/or modified sequence from HRSV(A2)__F_DSCav1_mut8 (opt6)
gggagacuccugucgggcggaaguaggaggaguagaguuuaaaaacaguacucuuuuuccgguucgggacguaguugaagcaacgacaagccggauaaccgcucuugagacaggaagcuuaccauggaacuauuaauauuaaaagcaaacgcaaucacaacuauacuaacagcaguaacauucugcuuugccucaggucaaaacauaacagaggaauuuuaccaauccacaugcucugcuguaagcaaaggauaccucggagcauuaagaacuggaugguacaccucaguaauaacuauagaacuaucaaacauaaaagaaauaaaauguaauggcacagacgcaaaagugaaauuaaucaaacaagaacucgauaaauacaaaaaugccguaaccgaucuccaacuuuuaaugcaaagcacacccgcaacagguuccgggucagcaauagcaagcggaguugcaguaugcaaaguacuacacuuagaaggagaaguaaauaaaaucaaaucagccuuacuaucaacaaauaaagcaguuguaucacucucaggaugcggaguauccguacuaacauuuaaaguacuagaucuaaaaaacuacauagauaaacaacucuuaccaauacuaaauaaacaaucauguuccauacccaacauagaaaccguuaucgaauuucaacaaaaaaacaacagauuacuagaaaucacacgagaauuuucaguaaaugcuggagucacaacaccaguuaguacauacaugcucaccaauucagaacuacuaaguuuaauuaacgauaugccaauaacaaacgaccaaaaaaaacuaaugucaaauaacguacaaauaguaagacaacaaucauacucaaucaugugcauaauaaaagaagaaguacuagccuauguaguccaauuaccacucuacggcguaaucgacaccccaugcuggaaauuacacacaagcccauuaugcaccaccaacacaaaagaagguucaaacauuugcuuaaccagaaccgaucgaggaugguacugcgauaacgcaggaucugucuccuuuuucccacaagccgaaacaugcaaaguucaaucaaaccgaguuuucugugacacuaugaacucacucacacuuccaagcgaaguaaaccuaugcaacguagauauauuuaacccuaaauacgacugcaaaauaaugacaagcaaaacagacguuaguucaucaguaauuacaagucuaggcgcaauagugucaugcuacggaaaaacaaaaugcaccgcauccaauaaaugccgaggaaucauuaaaacauucucaaacggaugcgacuacgucagcaauaaaggaguagacacuguuucuguaggaaacacccuauacuauguaaacaaacaagaaggucaaucacuauacguaaagggagaaccaauuauaaauuuuuacgaccccuuaguauuuccaagugaugaauuugacgcaucuauaagucaaguuaacgaaaaaauuaaccaaucacuugcauuuauaagaaaaucagacgaacuacuccauaauguaaacgcagguaaaucaacaacaaacaucaugaucacaaccauaauaauaguaauaauuguaauauuacuaucacuaauagcaguaggauuacuacucuacugcaaagcuagaucuaccccggucacacucucaaaagaccaauuaucuggaauaaacaauauagcauucagcaacuaaggacuaguaauaaggaaacuguaugaaugucugugggcaggaagugaagagauccuucuguaaagguuuuuggaauuaugucugcugaauaauaaacuuuuuugaaauaauaaaucugguagaaaaaugagaucuaaaaaaaaaaaaaaaaaaaaaaaaaaaaaaaaaaaaaaaaaaaaaaaaaaaaaaaaaaaaaaaaugcaucccccccccccccccccccccccccccccccaaaggcucuuuucagagccaccagaauu

SEQ ID NO: 7828 - RNA, 1997 nt, Artificial Sequence
  mRNA product Design g-4 comprising derived and/or modified sequence from HRSV(A2)__F_DSCav1_mut8 (opt11)
gggagacuccugucgggcggaaguaggaggaguagaguuuaaaaacaguacucuuuuuccgguucgggacguaguugaagcaacgacaagccggauaaccgcucuugagacaggaagcuuaccauggaacuccucauccuuaaagccaacgccauaaccaccauccucaccgccgucaccuucugcuucgcuucuggccaaaacauaaccgaagaguucuaccaauccacgugcucugccgugucaaaaggcuaccucggagcccuccgcacagggugguacacuuccgucaucaccaucgaacucucuaacaucaaagaaaucaagugcaacggcacagacgcgaaagucaagcucaucaaacaagaacuagacaaauacaaaaacgccguaacagaccuccaacuccuaaugcaguccacaccagccacaggcuccggcagcgccaucgccuccggcgucgcugucugcaaaguccuacaccucgaaggcgaagucaacaaaaucaagucagcccuccuuagcaccaacaaagcagucgucucuuuaagcgggugcggagucucuguccuaaccuuuaaaguacucgaccucaaaaacuacaucgacaaacaacuacuaccaauacuaaacaaacagagcugcuccauucccaacaucgaaaccguuaucgaguuccaacaaaagaacaaccgccuccucgaaaucacccgcgaguucuccgucaacgcaggcgucaccaccccagucuccaccuauaugcuaaccaacagcgaacuccucagccucaucaaugacaugccaaucaccaacgaccaaaagaaacucauguccaacaacguacagauaguccgccagcaguccuacagcaucaugugcaucaucaaagaagaagugcucgccuacgugguacaacucccucucuacggagucauugauacacccugcuggaaacuccacacaagcccccucugcacuacaaacaccaaagaaggcucuaacauaugccucacccgcacagaccgugguugguacugcgacaacgccggcuccguauccuucuuuccacaagcugaaaccugcaaaguucaaucaaaccgagucuucugcgacaccaugaacucccucacauugcccagcgaagucaaccucugcaacgucgacaucuucaaccccaaguacgacugcaaaaucaugaccuccaaaaccgacgucagcuccagcgugaucacaagccuaggcgcgaucgucagcugcuacggcaaaaccaaaugcacagccuccaacaaaugccgcggaaucauaaaaacauucaguaacggcugcgacuacguguccaauaaaggagucgacaccguauccgucggaaacacccucuacuacgucaacaaacaagaaggacaaucccucuaugucaaaggcgaacccauuaucaacuucuacgacccccuaguuuuccccuccgacgaguucgacgcaagcauuucccaagucaacgaaaagaucaaucaaucccucgccuucauacgcaaaagcgacgaacuacuacacaacguaaacgccggcaaaagcaccaccaacaucaugaucacaacaaucaucaucgucaucaucgucauccuacucucacucaucgccguuggccuacuacucuacugcaaagcccgcuccacacccgucacccucucaaaagaccaacucuccggcaucaacaacaucgcauucagcaacugaggacuaguaauaaggaaacuguaugaaugucugugggcaggaagugaagagauccuucuguaaagguuuuuggaauuaugucugcugaauaauaaacuuuuuugaaauaauaaaucugguagaaaaaugagaucuaaaaaaaaaaaaaaaaaaaaaaaaaaaaaaaaaaaaaaaaaaaaaaaaaaaaaaaaaaaaaaaaugcaucccccccccccccccccccccccccccccccaaaggcucuuuucagagccaccagaauu

SEQ ID NO: 7829 - RNA, 1973 nt, Artificial Sequence
  mRNA product Design g-5 comprising derived and/or modified sequence from HRSV(A2)__F_DSCav1_mut8 (opt1)
gggagacccgugacccggaaguuguacggcuacgcgacuuucccucccacaaacccucgcgcccuuccuuuccuacuugggcccggcagaaagcuuaccauggagcugcucauccugaaggccaacgccaucaccaccauccugacggcggugaccuucugcuucgccagcggccagaacaucaccgaggaguucuaccaguccacgugcagcgccgucuccaagggguaccucggcgcccugcggaccggcugguacaccuccgugaucaccaucgagcugagcaacaucaaggagaucaagugcaacgggaccgacgccaaggugaagcucaucaagcaggagcuggacaaguacaagaacgcggucacggaccugcagcuccugaugcaguccaccccggcaaccggcuccggcuccgccaucgcgagcggcgucgccgugugcaaggugcugcaccucgagggggaggucaacaagaucaagagcgcccugcuguccaccaacaaggccguggugagccucuccggcugcggcgucagcgugcugaccuucaaggugcuggaccucaagaacuacaucgacaagcagcugcugcccauccugaacaagcagagcugcuccauccccaacaucgagacggugaucgaguuccagcagaagaacaaccggcuccuggagaucacccgcgaguucagcgugaacgccggggucaccacccccguguccacguacaugcugaccaacagcgagcuccugucccugaucaacgacaugccgaucaccaacgaccagaagaagcucaugagcaacaacgugcagaucguccggcagcaguccuacagcaucaugugcaucaucaaggaggaggugcuggcguacgugguccagcugccccucuacggcgugaucgacacccccugcuggaagcugcacacgagcccccugugcaccaccaacaccaaggagggguccaacaucugccucacgcgcaccgaccggggcugguacugcgacaacgccggcagcgucuccuucuucccgcaggccgagaccugcaaggugcagagcaaccgcguguucugcgacaccaugaacucccugacgcugcccagcgagguaaaccucugcaacgucgacaucuucaaccccaaguacgacugcaagaucaugaccuccaagaccgacgugagcuccagcgugaucaccucccugggggccaucgucagcugcuacggcaagacgaagugcaccgccagcaacaagugccgggggaucaucaagaccuucuccaacggcugcgacuacgugagcaacaagggcguggacaccguguccgucgggaacacccuguacuacgugaacaagcaggagggccagagccucuacgugaagggggagcccaucaucaacuucuacgacccgcuggucuuccccuccgacgaguucgacgcgagcaucucccaggugaacgagaagaucaaccagagccuggccuucauccgcaaguccgacgagcugcuccacaacgugaacgccggcaagagcacgaccaacaucaugaucaccaccaucaucaucgucaucaucgugauccugcugucccucaucgccguggggcugcugcucuacugcaaggcccggagcacgcccgucacccuguccaaggaccagcugagcggcaucaacaacaucgcguucuccaacugaggacuaguaauaaggaaacuguaugaaugucugugggcaggaagugaagagauccuucuguaaagguuuuuggaauuaugucugcugaauaauaaacuuuuuugaaauaauaaaucugguagaaaaaugagaucuaaaaaaaaaaaaaaaaaaaaaaaaaaaaaaaaaaaaaaaaaaaaaaaaaaaaaaaaaaaaaaaaugcaucccccccccccccccccccccccccccccccaaaggcucuuuucagagccaccagaauu

SEQ ID NO: 7830 - RNA, 1973 nt, Artificial Sequence
  mRNA product Design g-5 comprising derived and/or modified sequence from HRSV(A2)__F_DSCav1_mut8 (opt1)
gggagacccgugacccggaaguuguacggcuacgcgacuuucccucccacaaacccucgcgcccuuccuuuccuacuugggcccggcagaaagcuuaccauggagcugcucauccugaaggccaacgccaucaccaccauccugacggcggugaccuucugcuucgccagcggccagaacaucaccgaggaguucuaccaguccacgugcagcgccgucuccaagggguaccucggcgcccugcgcaccgggugguacaccagcgugaucaccaucgagcuguccaacaucaaggagaucaagugcaacggcaccgacgccaaggugaagcucaucaagcaggagcuggacaaguacaagaacgcggucacggaccugcagcuccugaugcagagcacccccgccaccggguccggcagcgccaucgccuccggcguggcggugugcaagguccugcaccucgagggggaggugaacaagaucaagagcgcccugcuguccaccaacaaggccguggucagccucuccggcugcggggugagcgugcugacguucaagguccuggaccucaagaacuacaucgacaagcagcugcugccgauccucaacaagcaguccugcagcauccccaacaucgagaccgugaucgaguuccagcagaagaacaaccggcugcuggagaucacccgcgaguucuccgugaacgccggcgucaccacgcccgugagcaccuacaugcucaccaacuccgagcugcugagccucaucaacgacaugcccaucaccaacgaccagaagaagcugaugagcaacaacgugcagaucguccggcagcaguccuacagcaucaugugcaucaucaaggaggaggugcuggccuacgugguccagcucccgcuguacggggugaucgacacgcccugcuggaagcugcacaccagcccccucugcaccaccaacacgaaggagggcuccaacaucugccugacccgcaccgaccggggcugguacugcgacaacgcgggguccgugagcuucuucccccaggccgagaccugcaagguccaguccaaccgcguguucugcgacacgaugaacagccugacccucccguccgaggucaaccugugcaacguggacaucuucaaccccaaguacgacugcaagaucaugaccagcaagaccgacguguccagcuccgucaucacgagccugggcgccaucguguccugcuacgggaagaccaagugcaccgccagcaacaagugccggggcaucaucaagaccuucuccaacggcugcgacuacgugagcaacaagggggucgacacgguguccgugggcaacacccucuacuacgucaacaagcaggaggggcagagccuguacgugaagggcgagcccaucaucaacuucuacgacccccugguguucccgagcgacgaguucgacgccuccaucagccaggucaacgagaagaucaaccagucccucgcguucauccgcaagagcgacgagcugcugcacaacgugaacgccgggaaguccaccaccaacaucaugaucaccacgaucaucaucgugaucaucgucauccuccugagccugaucgccgugggccuccugcuguacugcaaggcccgguccacccccgugacccugagcaaggaccagcucuccggcaucaacaacaucgccuucagcaacugaggacuaguaauaaggaaacuguaugaaugucugugggcaggaagugaagagauccuucuguaaagguuuuuggaauuaugucugcugaauaauaaacuuuuuugaaauaauaaaucugguagaaaaaugagaucuaaaaaaaaaaaaaaaaaaaaaaaaaaaaaaaaaaaaaaaaaaaaaaaaaaaaaaaaaaaaaaaaugcaucccccccccccccccccccccccccccccccaaaggcucuuuucagagccaccagaauu

SEQ ID NO: 7831 - RNA, 1973 nt, Artificial Sequence
  mRNA product Design g-5 comprising derived and/or modified sequence from HRSV(A2)__F_DSCav1_mut8 (opt2)
gggagacccgugacccggaaguuguacggcuacgcgacuuucccucccacaaacccucgcgcccuuccuuuccuacuugggcccggcagaaagcuuaccauggagcuccucauccucaaggccaacgccaucaccaccauccucaccgccgucaccuucugcuucgccuccggccagaacaucaccgaggaguucuaccaguccaccugcuccgccgucuccaagggcuaccucggcgcccuccgcaccggcugguacaccuccgucaucaccaucgagcucuccaacaucaaggagaucaagugcaacggcaccgacgccaaggucaagcucaucaagcaggagcucgacaaguacaagaacgccgucaccgaccuccagcuccucaugcaguccacccccgccaccggcuccggcuccgccaucgccuccggcgucgccgucugcaagguccuccaccucgagggcgaggucaacaagaucaaguccgcccuccucuccaccaacaaggccgucgucucccucuccggcugcggcgucuccguccucaccuucaagguccucgaccucaagaacuacaucgacaagcagcuccuccccauccucaacaagcaguccugcuccauccccaacaucgagaccgucaucgaguuccagcagaagaacaaccgccuccucgagaucacccgcgaguucuccgucaacgccggcgucaccacccccgucuccaccuacaugcucaccaacuccgagcuccucucccucaucaacgacaugcccaucaccaacgaccagaagaagcucauguccaacaacguccagaucguccgccagcaguccuacuccaucaugugcaucaucaaggaggagguccucgccuacgucguccagcucccccucuacggcgucaucgacacccccugcuggaagcuccacaccuccccccucugcaccaccaacaccaaggagggcuccaacaucugccucacccgcaccgaccgcggcugguacugcgacaacgccggcuccgucuccuucuucccccaggccgagaccugcaagguccaguccaaccgcgucuucugcgacaccaugaacucccucacccuccccuccgaggucaaccucugcaacgucgacaucuucaaccccaaguacgacugcaagaucaugaccuccaagaccgacgucuccuccuccgucaucaccucccucggcgccaucgucuccugcuacggcaagaccaagugcaccgccuccaacaagugccgcggcaucaucaagaccuucuccaacggcugcgacuacgucuccaacaagggcgucgacaccgucuccgucggcaacacccucuacuacgucaacaagcaggagggccagucccucuacgucaagggcgagcccaucaucaacuucuacgacccccucgucuuccccuccgacgaguucgacgccuccaucucccaggucaacgagaagaucaaccagucccucgccuucauccgcaaguccgacgagcuccuccacaacgucaacgccggcaaguccaccaccaacaucaugaucaccaccaucaucaucgucaucaucgucauccuccucucccucaucgccgucggccuccuccucuacugcaaggcccgcuccacccccgucacccucuccaaggaccagcucuccggcaucaacaacaucgccuucuccaacugaggacuaguaauaaggaaacuguaugaaugucugugggcaggaagugaagagauccuucuguaaagguuuuuggaauuaugucugcugaauaauaaacuuuuuugaaauaauaaaucugguagaaaaaugagaucuaaaaaaaaaaaaaaaaaaaaaaaaaaaaaaaaaaaaaaaaaaaaaaaaaaaaaaaaaaaaaaaaugcaucccccccccccccccccccccccccccccccaaaggcucuuuucagagccaccagaauu

SEQ ID NO: 7832 - RNA, 1973 nt, Artificial Sequence
  mRNA product Design g-5 comprising derived and/or modified sequence from HRSV(A2)__F_DSCav1_mut8 (opt3)
gggagacccgugacccggaaguuguacggcuacgcgacuuucccucccacaaacccucgcgcccuuccuuuccuacuugggcccggcagaaagcuuaccauggagcugcucauccuuaaggccaacgcuauuaccacaauacugacugcagugacguucugcuuugccagcggccagaauaucaccgaagaguucuaccaauccacauguucugcggucucaaaaggguauuugggagcuuuaagaacugguugguacaccaguguuauuacaaucgaacugagcaacauuaaggagaucaaaugcaauggcaccgacgccaaggugaaacuaauaaagcaggaacucgauaaguauaaaaacgcaguaacugaccugcagcuucugaugcaguccacacccgccaccgggucuggaucggcuaucgcaucaggcguggccgucuguaagguguugcaccucgagggugagguuaauaaaauuaagagcgcucugcugaguacgaacaaagccguggucucccucucugggugcggagugagcguauuaacuuuuaagguucuggaucuuaagaauuacaucgacaaacaauugcugccuauucuaaacaagcaguccuguucaaucccaaauauagaaaccgugauugaguuccagcagaaaaacaauaggcuccuggaaaucacacgggaguuuagugucaacgcgggcgugacuaccccggugagcacauauaugcuuaccaauucugagcuguugucccucauuaacgauaugcccaucacgaaugaccaaaagaaacugaugucaaacaacguccagaucguucgccagcagagcuacaguauuaugugcauaaucaaggaagagguguuagcauauguagugcaacugccucucuacggcgucauugauacuccauguuggaaacuucauacaucuccccugugcaccacuaauacaaaggaaggguccaacaucuguuugacccgaacggaccguggaugguacugcgauaaugccgguagcgugucguucuuuccucaggcugagaccuguaagguucagucuaacagaguguucugcgacacaaugaacucccuaacucugccaucagaagucaaucucugcaauguggauauauuuaaccccaaauaugacuguaagauuaugaccaguaaaacagauguaagcuccucuguuaucacuagccugggcgccaucgugucaugcuacgggaagaccaaauguacagcaaguaauaagugcaggggaauuaucaagaccuucuccaacggcugugacuaugucagcaauaaagguguggacacugucucuguggggaacacgcuuuacuauguuaauaagcaagagggacagucacuguacgugaaaggcgagccuauuauaaacuuuuaugauccauugguauucccgagugacgaauuugaugcuagcaucucccaggucaaugagaagauuaaccagucucucgccuucauccggaaaucggacgaacuguuacacaacgugaaugcgggcaagagcacaaccaacaucaugauuacuaccauaaucauuguuaucauugugauccugcuaucccucauagccgucgggcugcuuuuguacugcaaggcacgcucaacacccgugacccugaguaaagaucaacucucuggaaucaauaacauugcuuucagcaauugaggacuaguaauaaggaaacuguaugaaugucugugggcaggaagugaagagauccuucuguaaagguuuuuggaauuaugucugcugaauaauaaacuuuuuugaaauaauaaaucugguagaaaaaugagaucuaaaaaaaaaaaaaaaaaaaaaaaaaaaaaaaaaaaaaaaaaaaaaaaaaaaaaaaaaaaaaaaaugcaucccccccccccccccccccccccccccccccaaaggcucuuuucagagccaccagaauu

SEQ ID NO: 7833 - RNA, 1973 nt, Artificial Sequence
  mRNA product Design g-5 comprising derived and/or modified sequence from HRSV(A2)__F_DSCav1_mut8 (opt4)
gggagacccgugacccggaaguuguacggcuacgcgacuuucccucccacaaacccucgcgcccuuccuuuccuacuugggcccggcagaaagcuuaccauggagcugcugauccugaaggccaacgccaucaccaccauccugaccgccgugaccuucugcuucgccagcggccagaacaucaccgaggaguucuaccagagcaccugcagcgccgugagcaagggcuaccugggcgcccugagaaccggcugguacaccagcgugaucaccaucgagcugagcaacaucaaggagaucaagugcaacggcaccgacgccaaggugaagcugaucaagcaggagcuggacaaguacaagaacgccgugaccgaccugcagcugcugaugcagagcacccccgccaccggcagcggcagcgccaucgccagcggcguggccgugugcaaggugcugcaccuggagggcgaggugaacaagaucaagagcgcccugcugagcaccaacaaggccguggugagccugagcggcugcggcgugagcgugcugaccuucaaggugcuggaccugaagaacuacaucgacaagcagcugcugcccauccugaacaagcagagcugcagcauccccaacaucgagaccgugaucgaguuccagcagaagaacaacagacugcuggagaucaccagagaguucagcgugaacgccggcgugaccacccccgugagcaccuacaugcugaccaacagcgagcugcugagccugaucaacgacaugcccaucaccaacgaccagaagaagcugaugagcaacaacgugcagaucgugagacagcagagcuacagcaucaugugcaucaucaaggaggaggugcuggccuacguggugcagcugccccuguacggcgugaucgacacccccugcuggaagcugcacaccagcccccugugcaccaccaacaccaaggagggcagcaacaucugccugaccagaaccgacagaggcugguacugcgacaacgccggcagcgugagcuucuucccccaggccgagaccugcaaggugcagagcaacagaguguucugcgacaccaugaacagccugacccugcccagcgaggugaaccugugcaacguggacaucuucaaccccaaguacgacugcaagaucaugaccagcaagaccgacgugagcagcagcgugaucaccagccugggcgccaucgugagcugcuacggcaagaccaagugcaccgccagcaacaagugcagaggcaucaucaagaccuucagcaacggcugcgacuacgugagcaacaagggcguggacaccgugagcgugggcaacacccuguacuacgugaacaagcaggagggccagagccuguacgugaagggcgagcccaucaucaacuucuacgacccccugguguuccccagcgacgaguucgacgccagcaucagccaggugaacgagaagaucaaccagagccuggccuucaucagaaagagcgacgagcugcugcacaacgugaacgccggcaagagcaccaccaacaucaugaucaccaccaucaucaucgugaucaucgugauccugcugagccugaucgccgugggccugcugcuguacugcaaggccagaagcacccccgugacccugagcaaggaccagcugagcggcaucaacaacaucgccuucagcaacugaggacuaguaauaaggaaacuguaugaaugucugugggcaggaagugaagagauccuucuguaaagguuuuuggaauuaugucugcugaauaauaaacuuuuuugaaauaauaaaucugguagaaaaaugagaucuaaaaaaaaaaaaaaaaaaaaaaaaaaaaaaaaaaaaaaaaaaaaaaaaaaaaaaaaaaaaaaaaugcaucccccccccccccccccccccccccccccccaaaggcucuuuucagagccaccagaauu

SEQ ID NO: 7834 - RNA, 1973 nt, Artificial Sequence
  mRNA product Design g-5 comprising derived and/or modified sequence from HRSV(A2)__F_DSCav1_mut8 (opt5)
gggagacccgugacccggaaguuguacggcuacgcgacuuucccucccacaaacccucgcgcccuuccuuuccuacuugggcccggcagaaagcuuaccauggagcugcucauccugaaggccaacgcuauuaccacaauccuuacggccgugaccuucugcuuugcgagcggccagaauauuacagaagaguucuaccaauccaccuguucugcugucagcaaaggguaucugggagcccucagaacaggcugguacaccuccguuaucacaauugaacugucuaacaucaaggagaucaaaugcaaugggaccgacgccaaggugaaacuuauuaagcaggaacuggauaaguauaaaaacgcugugacggaccuccagcugcugaugcagagcacccccgccacaggauccggcucugcuaucgccagcggggucgcgguguguaagguucuccaccuggagggagaggugaauaaaauuaaguccgcccuucugagcaccaacaaagcugucgugucucucuccggcugcggcguuagcgugcugacauuuaagguccuugaucugaagaauuacaucgacaaacaacuccugccuauucugaacaagcagucuuguuccaucccgaauauugaaaccgugaucgaguuccagcagaaaaacaaucggcuccuggaaaucacgcgcgaguuuagcgugaacgccggggucacaacccccguuucuacauauaugcuuaccaauuccgagcugcucagccugauuaacgauaugccuaucaccaaugaccaaaagaaacuuauguccaacaacgugcagauugugagacagcagucuuacagcaucaugugcauuaucaaggaagagguccuggcuuaugugguucaacucccccuguacggagugaucgauacaccuuguuggaaacugcauacgagcccccucugcaccacaaauaccaaggaaggcagcaacauuugucugacacggaccgaccgcgggugguacugcgauaaugccggaucugucuccuucuuuccucaggcggagacguguaaggugcagagcaacagaguuuucugcgacacaaugaacucucuuacccugccgagcgaagugaaucucugcaaugucgauaucuuuaaccccaaauaugacuguaagauuaugaccuccaaaacagaugugucuagcuccgucaucaccagccugggcgccauugugucuugcuacgggaagacaaaauguacggcuuccaauaagugccggggaaucaucaagaccuucagcaacggcugugacuauguuucuaauaaaggcguggacacagucuccguggggaacacccuuuacuauguuaauaagcaagagggacagagccuguacgugaaaggcgagccuauuaucaacuuuuaugauccccucgucuucccuuccgacgaauuugaugccucuauuagccaggugaaugagaagaucaaccagucccuggcuuucauucgcaaaucugacgaacugcuccacaacgugaaugccgggaaguccacaaccaacaucaugauuacgaccaucaucauuguuaucauugucauccugcuuucccugauugccgugggacuccugcuguacugcaaggcuagaagcacacccgugacccuuucuaaagaucaacucuccggcaucaauaacaucgcguucagcaauugaggacuaguaauaaggaaacuguaugaaugucugugggcaggaagugaagagauccuucuguaaagguuuuuggaauuaugucugcugaauaauaaacuuuuuugaaauaauaaaucugguagaaaaaugagaucuaaaaaaaaaaaaaaaaaaaaaaaaaaaaaaaaaaaaaaaaaaaaaaaaaaaaaaaaaaaaaaaaugcaucccccccccccccccccccccccccccccccaaaggcucuuuucagagccaccagaauu

SEQ ID NO: 7835 - RNA, 1973 nt, Artificial Sequence
  mRNA product Design g-5 comprising derived and/or modified sequence from HRSV(A2)__F_DSCav1_mut8 (opt6)
gggagacccgugacccggaaguuguacggcuacgcgacuuucccucccacaaacccucgcgcccuuccuuuccuacuugggcccggcagaaagcuuaccauggaacuauuaauauuaaaagcaaacgcaaucacaacuauacuaacagcaguaacauucugcuuugccucaggucaaaacauaacagaggaauuuuaccaauccacaugcucugcuguaagcaaaggauaccucggagcauuaagaacuggaugguacaccucaguaauaacuauagaacuaucaaacauaaaagaaauaaaauguaauggcacagacgcaaaagugaaauuaaucaaacaagaacucgauaaauacaaaaaugccguaaccgaucuccaacuuuuaaugcaaagcacacccgcaacagguuccgggucagcaauagcaagcggaguugcaguaugcaaaguacuacacuuagaaggagaaguaaauaaaaucaaaucagccuuacuaucaacaaauaaagcaguuguaucacucucaggaugcggaguauccguacuaacauuuaaaguacuagaucuaaaaaacuacauagauaaacaacucuuaccaauacuaaauaaacaaucauguuccauacccaacauagaaaccguuaucgaauuucaacaaaaaaacaacagauuacuagaaaucacacgagaauuuucaguaaaugcuggagucacaacaccaguuaguacauacaugcucaccaauucagaacuacuaaguuuaauuaacgauaugccaauaacaaacgaccaaaaaaaacuaaugucaaauaacguacaaauaguaagacaacaaucauacucaaucaugugcauaauaaaagaagaaguacuagccuauguaguccaauuaccacucuacggcguaaucgacaccccaugcuggaaauuacacacaagcccauuaugcaccaccaacacaaaagaagguucaaacauuugcuuaaccagaaccgaucgaggaugguacugcgauaacgcaggaucugucuccuuuuucccacaagccgaaacaugcaaaguucaaucaaaccgaguuuucugugacacuaugaacucacucacacuuccaagcgaaguaaaccuaugcaacguagauauauuuaacccuaaauacgacugcaaaauaaugacaagcaaaacagacguuaguucaucaguaauuacaagucuaggcgcaauagugucaugcuacggaaaaacaaaaugcaccgcauccaauaaaugccgaggaaucauuaaaacauucucaaacggaugcgacuacgucagcaauaaaggaguagacacuguuucuguaggaaacacccuauacuauguaaacaaacaagaaggucaaucacuauacguaaagggagaaccaauuauaaauuuuuacgaccccuuaguauuuccaagugaugaauuugacgcaucuauaagucaaguuaacgaaaaaauuaaccaaucacuugcauuuauaagaaaaucagacgaacuacuccauaauguaaacgcagguaaaucaacaacaaacaucaugaucacaaccauaauaauaguaauaauuguaauauuacuaucacuaauagcaguaggauuacuacucuacugcaaagcuagaucuaccccggucacacucucaaaagaccaauuaucuggaauaaacaauauagcauucagcaacuaaggacuaguaauaaggaaacuguaugaaugucugugggcaggaagugaagagauccuucuguaaagguuuuuggaauuaugucugcugaauaauaaacuuuuuugaaauaauaaaucugguagaaaaaugagaucuaaaaaaaaaaaaaaaaaaaaaaaaaaaaaaaaaaaaaaaaaaaaaaaaaaaaaaaaaaaaaaaaugcaucccccccccccccccccccccccccccccccaaaggcucuuuucagagccaccagaauu

SEQ ID NO: 7836 - RNA, 1973 nt, Artificial Sequence
  mRNA product Design g-5 comprising derived and/or modified sequence from HRSV(A2)__F_DSCav1_mut8 (opt11)
gggagacccgugacccggaaguuguacggcuacgcgacuuucccucccacaaacccucgcgcccuuccuuuccuacuugggcccggcagaaagcuuaccauggaacuccucauccuuaaagccaacgccauaaccaccauccucaccgccgucaccuucugcuucgcuucuggccaaaacauaaccgaagaguucuaccaauccacgugcucugccgugucaaaaggcuaccucggagcccuccgcacagggugguacacuuccgucaucaccaucgaacucucuaacaucaaagaaaucaagugcaacggcacagacgcgaaagucaagcucaucaaacaagaacuagacaaauacaaaaacgccguaacagaccuccaacuccuaaugcaguccacaccagccacaggcuccggcagcgccaucgccuccggcgucgcugucugcaaaguccuacaccucgaaggcgaagucaacaaaaucaagucagcccuccuuagcaccaacaaagcagucgucucuuuaagcgggugcggagucucuguccuaaccuuuaaaguacucgaccucaaaaacuacaucgacaaacaacuacuaccaauacuaaacaaacagagcugcuccauucccaacaucgaaaccguuaucgaguuccaacaaaagaacaaccgccuccucgaaaucacccgcgaguucuccgucaacgcaggcgucaccaccccagucuccaccuauaugcuaaccaacagcgaacuccucagccucaucaaugacaugccaaucaccaacgaccaaaagaaacucauguccaacaacguacagauaguccgccagcaguccuacagcaucaugugcaucaucaaagaagaagugcucgccuacgugguacaacucccucucuacggagucauugauacacccugcuggaaacuccacacaagcccccucugcacuacaaacaccaaagaaggcucuaacauaugccucacccgcacagaccgugguugguacugcgacaacgccggcuccguauccuucuuuccacaagcugaaaccugcaaaguucaaucaaaccgagucuucugcgacaccaugaacucccucacauugcccagcgaagucaaccucugcaacgucgacaucuucaaccccaaguacgacugcaaaaucaugaccuccaaaaccgacgucagcuccagcgugaucacaagccuaggcgcgaucgucagcugcuacggcaaaaccaaaugcacagccuccaacaaaugccgcggaaucauaaaaacauucaguaacggcugcgacuacguguccaauaaaggagucgacaccguauccgucggaaacacccucuacuacgucaacaaacaagaaggacaaucccucuaugucaaaggcgaacccauuaucaacuucuacgacccccuaguuuuccccuccgacgaguucgacgcaagcauuucccaagucaacgaaaagaucaaucaaucccucgccuucauacgcaaaagcgacgaacuacuacacaacguaaacgccggcaaaagcaccaccaacaucaugaucacaacaaucaucaucgucaucaucgucauccuacucucacucaucgccguuggccuacuacucuacugcaaagcccgcuccacacccgucacccucucaaaagaccaacucuccggcaucaacaacaucgcauucagcaacugaggacuaguaauaaggaaacuguaugaaugucugugggcaggaagugaagagauccuucuguaaagguuuuuggaauuaugucugcugaauaauaaacuuuuuugaaauaauaaaucugguagaaaaaugagaucuaaaaaaaaaaaaaaaaaaaaaaaaaaaaaaaaaaaaaaaaaaaaaaaaaaaaaaaaaaaaaaaaugcaucccccccccccccccccccccccccccccccaaaggcucuuuucagagccaccagaauu

SEQ ID NO: 7837 - RNA, 1989 nt, Artificial Sequence
  mRNA product Design h-1 comprising derived and/or modified sequence from HRSV(A2)__F_DSCav1_mut8 (opt1)
gggagacccgugacccggaaguuguacggcuacgcgacuuucccucccacaaacccucgcgcccuuccuuuccuacuugggcccggcagaaagcuuaccauggagcugcucauccugaaggccaacgccaucaccaccauccugacggcggugaccuucugcuucgccagcggccagaacaucaccgaggaguucuaccaguccacgugcagcgccgucuccaagggguaccucggcgcccugcggaccggcugguacaccuccgugaucaccaucgagcugagcaacaucaaggagaucaagugcaacgggaccgacgccaaggugaagcucaucaagcaggagcuggacaaguacaagaacgcggucacggaccugcagcuccugaugcaguccaccccggcaaccggcuccggcuccgccaucgcgagcggcgucgccgugugcaaggugcugcaccucgagggggaggucaacaagaucaagagcgcccugcuguccaccaacaaggccguggugagccucuccggcugcggcgucagcgugcugaccuucaaggugcuggaccucaagaacuacaucgacaagcagcugcugcccauccugaacaagcagagcugcuccauccccaacaucgagacggugaucgaguuccagcagaagaacaaccggcuccuggagaucacccgcgaguucagcgugaacgccggggucaccacccccguguccacguacaugcugaccaacagcgagcuccugucccugaucaacgacaugccgaucaccaacgaccagaagaagcucaugagcaacaacgugcagaucguccggcagcaguccuacagcaucaugugcaucaucaaggaggaggugcuggcguacgugguccagcugccccucuacggcgugaucgacacccccugcuggaagcugcacacgagcccccugugcaccaccaacaccaaggagggguccaacaucugccucacgcgcaccgaccggggcugguacugcgacaacgccggcagcgucuccuucuucccgcaggccgagaccugcaaggugcagagcaaccgcguguucugcgacaccaugaacucccugacgcugcccagcgagguaaaccucugcaacgucgacaucuucaaccccaaguacgacugcaagaucaugaccuccaagaccgacgugagcuccagcgugaucaccucccugggggccaucgucagcugcuacggcaagacgaagugcaccgccagcaacaagugccgggggaucaucaagaccuucuccaacggcugcgacuacgugagcaacaagggcguggacaccguguccgucgggaacacccuguacuacgugaacaagcaggagggccagagccucuacgugaagggggagcccaucaucaacuucuacgacccgcuggucuuccccuccgacgaguucgacgcgagcaucucccaggugaacgagaagaucaaccagagccuggccuucauccgcaaguccgacgagcugcuccacaacgugaacgccggcaagagcacgaccaacaucaugaucaccaccaucaucaucgucaucaucgugauccugcugucccucaucgccguggggcugcugcucuacugcaaggcccggagcacgcccgucacccuguccaaggaccagcugagcggcaucaacaacaucgcguucuccaacugaggacuaguacuggcugcaucucccuuuccucuguccuccauccuucucccaggauggugaagggggaccugguacccagugauccccaccccaggauccuaaaucaugacuuaccugcuaauaaaaacucauuggaaaagugagaagaucuaaaaaaaaaaaaaaaaaaaaaaaaaaaaaaaaaaaaaaaaaaaaaaaaaaaaaaaaaaaaaaaaugcaucccccccccccccccccccccccccccccccaaaggcucuuuucagagccaccagaauu

SEQ ID NO: 7838 - RNA, 1989 nt, Artificial Sequence
  mRNA product Design h-1 comprising derived and/or modified sequence from HRSV(A2)__F_DSCav1_mut8 (opt1)
gggagacccgugacccggaaguuguacggcuacgcgacuuucccucccacaaacccucgcgcccuuccuuuccuacuugggcccggcagaaagcuuaccauggagcugcucauccugaaggccaacgccaucaccaccauccugacggcggugaccuucugcuucgccagcggccagaacaucaccgaggaguucuaccaguccacgugcagcgccgucuccaagggguaccucggcgcccugcgcaccgggugguacaccagcgugaucaccaucgagcuguccaacaucaaggagaucaagugcaacggcaccgacgccaaggugaagcucaucaagcaggagcuggacaaguacaagaacgcggucacggaccugcagcuccugaugcagagcacccccgccaccggguccggcagcgccaucgccuccggcguggcggugugcaagguccugcaccucgagggggaggugaacaagaucaagagcgcccugcuguccaccaacaaggccguggucagccucuccggcugcggggugagcgugcugacguucaagguccuggaccucaagaacuacaucgacaagcagcugcugccgauccucaacaagcaguccugcagcauccccaacaucgagaccgugaucgaguuccagcagaagaacaaccggcugcuggagaucacccgcgaguucuccgugaacgccggcgucaccacgcccgugagcaccuacaugcucaccaacuccgagcugcugagccucaucaacgacaugcccaucaccaacgaccagaagaagcugaugagcaacaacgugcagaucguccggcagcaguccuacagcaucaugugcaucaucaaggaggaggugcuggccuacgugguccagcucccgcuguacggggugaucgacacgcccugcuggaagcugcacaccagcccccucugcaccaccaacacgaaggagggcuccaacaucugccugacccgcaccgaccggggcugguacugcgacaacgcgggguccgugagcuucuucccccaggccgagaccugcaagguccaguccaaccgcguguucugcgacacgaugaacagccugacccucccguccgaggucaaccugugcaacguggacaucuucaaccccaaguacgacugcaagaucaugaccagcaagaccgacguguccagcuccgucaucacgagccugggcgccaucguguccugcuacgggaagaccaagugcaccgccagcaacaagugccggggcaucaucaagaccuucuccaacggcugcgacuacgugagcaacaagggggucgacacgguguccgugggcaacacccucuacuacgucaacaagcaggaggggcagagccuguacgugaagggcgagcccaucaucaacuucuacgacccccugguguucccgagcgacgaguucgacgccuccaucagccaggucaacgagaagaucaaccagucccucgcguucauccgcaagagcgacgagcugcugcacaacgugaacgccgggaaguccaccaccaacaucaugaucaccacgaucaucaucgugaucaucgucauccuccugagccugaucgccgugggccuccugcuguacugcaaggcccgguccacccccgugacccugagcaaggaccagcucuccggcaucaacaacaucgccuucagcaacugaggacuaguacuggcugcaucucccuuuccucuguccuccauccuucucccaggauggugaagggggaccugguacccagugauccccaccccaggauccuaaaucaugacuuaccugcuaauaaaaacucauuggaaaagugagaagaucuaaaaaaaaaaaaaaaaaaaaaaaaaaaaaaaaaaaaaaaaaaaaaaaaaaaaaaaaaaaaaaaaugcaucccccccccccccccccccccccccccccccaaaggcucuuuucagagccaccagaauu

SEQ ID NO: 7839 - RNA, 1989 nt, Artificial Sequence
  mRNA product Design h-1 comprising derived and/or modified sequence from HRSV(A2)__F_DSCav1_mut8 (opt2)
gggagacccgugacccggaaguuguacggcuacgcgacuuucccucccacaaacccucgcgcccuuccuuuccuacuugggcccggcagaaagcuuaccauggagcuccucauccucaaggccaacgccaucaccaccauccucaccgccgucaccuucugcuucgccuccggccagaacaucaccgaggaguucuaccaguccaccugcuccgccgucuccaagggcuaccucggcgcccuccgcaccggcugguacaccuccgucaucaccaucgagcucuccaacaucaaggagaucaagugcaacggcaccgacgccaaggucaagcucaucaagcaggagcucgacaaguacaagaacgccgucaccgaccuccagcuccucaugcaguccacccccgccaccggcuccggcuccgccaucgccuccggcgucgccgucugcaagguccuccaccucgagggcgaggucaacaagaucaaguccgcccuccucuccaccaacaaggccgucgucucccucuccggcugcggcgucuccguccucaccuucaagguccucgaccucaagaacuacaucgacaagcagcuccuccccauccucaacaagcaguccugcuccauccccaacaucgagaccgucaucgaguuccagcagaagaacaaccgccuccucgagaucacccgcgaguucuccgucaacgccggcgucaccacccccgucuccaccuacaugcucaccaacuccgagcuccucucccucaucaacgacaugcccaucaccaacgaccagaagaagcucauguccaacaacguccagaucguccgccagcaguccuacuccaucaugugcaucaucaaggaggagguccucgccuacgucguccagcucccccucuacggcgucaucgacacccccugcuggaagcuccacaccuccccccucugcaccaccaacaccaaggagggcuccaacaucugccucacccgcaccgaccgcggcugguacugcgacaacgccggcuccgucuccuucuucccccaggccgagaccugcaagguccaguccaaccgcgucuucugcgacaccaugaacucccucacccuccccuccgaggucaaccucugcaacgucgacaucuucaaccccaaguacgacugcaagaucaugaccuccaagaccgacgucuccuccuccgucaucaccucccucggcgccaucgucuccugcuacggcaagaccaagugcaccgccuccaacaagugccgcggcaucaucaagaccuucuccaacggcugcgacuacgucuccaacaagggcgucgacaccgucuccgucggcaacacccucuacuacgucaacaagcaggagggccagucccucuacgucaagggcgagcccaucaucaacuucuacgacccccucgucuuccccuccgacgaguucgacgccuccaucucccaggucaacgagaagaucaaccagucccucgccuucauccgcaaguccgacgagcuccuccacaacgucaacgccggcaaguccaccaccaacaucaugaucaccaccaucaucaucgucaucaucgucauccuccucucccucaucgccgucggccuccuccucuacugcaaggcccgcuccacccccgucacccucuccaaggaccagcucuccggcaucaacaacaucgccuucuccaacugaggacuaguacuggcugcaucucccuuuccucuguccuccauccuucucccaggauggugaagggggaccugguacccagugauccccaccccaggauccuaaaucaugacuuaccugcuaauaaaaacucauuggaaaagugagaagaucuaaaaaaaaaaaaaaaaaaaaaaaaaaaaaaaaaaaaaaaaaaaaaaaaaaaaaaaaaaaaaaaaugcaucccccccccccccccccccccccccccccccaaaggcucuuuucagagccaccagaauu

SEQ ID NO: 7840 - RNA, 1989 nt, Artificial Sequence
  mRNA product Design h-1 comprising derived and/or modified sequence from HRSV(A2)__F_DSCav1_mut8 (opt3)
gggagacccgugacccggaaguuguacggcuacgcgacuuucccucccacaaacccucgcgcccuuccuuuccuacuugggcccggcagaaagcuuaccauggagcugcucauccuuaaggccaacgcuauuaccacaauacugacugcagugacguucugcuuugccagcggccagaauaucaccgaagaguucuaccaauccacauguucugcggucucaaaaggguauuugggagcuuuaagaacugguugguacaccaguguuauuacaaucgaacugagcaacauuaaggagaucaaaugcaauggcaccgacgccaaggugaaacuaauaaagcaggaacucgauaaguauaaaaacgcaguaacugaccugcagcuucugaugcaguccacacccgccaccgggucuggaucggcuaucgcaucaggcguggccgucuguaagguguugcaccucgagggugagguuaauaaaauuaagagcgcucugcugaguacgaacaaagccguggucucccucucugggugcggagugagcguauuaacuuuuaagguucuggaucuuaagaauuacaucgacaaacaauugcugccuauucuaaacaagcaguccuguucaaucccaaauauagaaaccgugauugaguuccagcagaaaaacaauaggcuccuggaaaucacacgggaguuuagugucaacgcgggcgugacuaccccggugagcacauauaugcuuaccaauucugagcuguugucccucauuaacgauaugcccaucacgaaugaccaaaagaaacugaugucaaacaacguccagaucguucgccagcagagcuacaguauuaugugcauaaucaaggaagagguguuagcauauguagugcaacugccucucuacggcgucauugauacuccauguuggaaacuucauacaucuccccugugcaccacuaauacaaaggaaggguccaacaucuguuugacccgaacggaccguggaugguacugcgauaaugccgguagcgugucguucuuuccucaggcugagaccuguaagguucagucuaacagaguguucugcgacacaaugaacucccuaacucugccaucagaagucaaucucugcaauguggauauauuuaaccccaaauaugacuguaagauuaugaccaguaaaacagauguaagcuccucuguuaucacuagccugggcgccaucgugucaugcuacgggaagaccaaauguacagcaaguaauaagugcaggggaauuaucaagaccuucuccaacggcugugacuaugucagcaauaaagguguggacacugucucuguggggaacacgcuuuacuauguuaauaagcaagagggacagucacuguacgugaaaggcgagccuauuauaaacuuuuaugauccauugguauucccgagugacgaauuugaugcuagcaucucccaggucaaugagaagauuaaccagucucucgccuucauccggaaaucggacgaacuguuacacaacgugaaugcgggcaagagcacaaccaacaucaugauuacuaccauaaucauuguuaucauugugauccugcuaucccucauagccgucgggcugcuuuuguacugcaaggcacgcucaacacccgugacccugaguaaagaucaacucucuggaaucaauaacauugcuuucagcaauugaggacuaguacuggcugcaucucccuuuccucuguccuccauccuucucccaggauggugaagggggaccugguacccagugauccccaccccaggauccuaaaucaugacuuaccugcuaauaaaaacucauuggaaaagugagaagaucuaaaaaaaaaaaaaaaaaaaaaaaaaaaaaaaaaaaaaaaaaaaaaaaaaaaaaaaaaaaaaaaaugcaucccccccccccccccccccccccccccccccaaaggcucuuuucagagccaccagaauu

SEQ ID NO: 7841 - RNA, 1989 nt, Artificial Sequence
  mRNA product Design h-1 comprising derived and/or modified sequence from HRSV(A2)__F_DSCav1_mut8 (opt4)
gggagacccgugacccggaaguuguacggcuacgcgacuuucccucccacaaacccucgcgcccuuccuuuccuacuugggcccggcagaaagcuuaccauggagcugcugauccugaaggccaacgccaucaccaccauccugaccgccgugaccuucugcuucgccagcggccagaacaucaccgaggaguucuaccagagcaccugcagcgccgugagcaagggcuaccugggcgcccugagaaccggcugguacaccagcgugaucaccaucgagcugagcaacaucaaggagaucaagugcaacggcaccgacgccaaggugaagcugaucaagcaggagcuggacaaguacaagaacgccgugaccgaccugcagcugcugaugcagagcacccccgccaccggcagcggcagcgccaucgccagcggcguggccgugugcaaggugcugcaccuggagggcgaggugaacaagaucaagagcgcccugcugagcaccaacaaggccguggugagccugagcggcugcggcgugagcgugcugaccuucaaggugcuggaccugaagaacuacaucgacaagcagcugcugcccauccugaacaagcagagcugcagcauccccaacaucgagaccgugaucgaguuccagcagaagaacaacagacugcuggagaucaccagagaguucagcgugaacgccggcgugaccacccccgugagcaccuacaugcugaccaacagcgagcugcugagccugaucaacgacaugcccaucaccaacgaccagaagaagcugaugagcaacaacgugcagaucgugagacagcagagcuacagcaucaugugcaucaucaaggaggaggugcuggccuacguggugcagcugccccuguacggcgugaucgacacccccugcuggaagcugcacaccagcccccugugcaccaccaacaccaaggagggcagcaacaucugccugaccagaaccgacagaggcugguacugcgacaacgccggcagcgugagcuucuucccccaggccgagaccugcaaggugcagagcaacagaguguucugcgacaccaugaacagccugacccugcccagcgaggugaaccugugcaacguggacaucuucaaccccaaguacgacugcaagaucaugaccagcaagaccgacgugagcagcagcgugaucaccagccugggcgccaucgugagcugcuacggcaagaccaagugcaccgccagcaacaagugcagaggcaucaucaagaccuucagcaacggcugcgacuacgugagcaacaagggcguggacaccgugagcgugggcaacacccuguacuacgugaacaagcaggagggccagagccuguacgugaagggcgagcccaucaucaacuucuacgacccccugguguuccccagcgacgaguucgacgccagcaucagccaggugaacgagaagaucaaccagagccuggccuucaucagaaagagcgacgagcugcugcacaacgugaacgccggcaagagcaccaccaacaucaugaucaccaccaucaucaucgugaucaucgugauccugcugagccugaucgccgugggccugcugcuguacugcaaggccagaagcacccccgugacccugagcaaggaccagcugagcggcaucaacaacaucgccuucagcaacugaggacuaguacuggcugcaucucccuuuccucuguccuccauccuucucccaggauggugaagggggaccugguacccagugauccccaccccaggauccuaaaucaugacuuaccugcuaauaaaaacucauuggaaaagugagaagaucuaaaaaaaaaaaaaaaaaaaaaaaaaaaaaaaaaaaaaaaaaaaaaaaaaaaaaaaaaaaaaaaaugcaucccccccccccccccccccccccccccccccaaaggcucuuuucagagccaccagaauu

SEQ ID NO: 7842 - RNA, 1989 nt, Artificial Sequence
  mRNA product Design h-1 comprising derived and/or modified sequence from HRSV(A2)__F_DSCav1_mut8 (opt5)
gggagacccgugacccggaaguuguacggcuacgcgacuuucccucccacaaacccucgcgcccuuccuuuccuacuugggcccggcagaaagcuuaccauggagcugcucauccugaaggccaacgcuauuaccacaauccuuacggccgugaccuucugcuuugcgagcggccagaauauuacagaagaguucuaccaauccaccuguucugcugucagcaaaggguaucugggagcccucagaacaggcugguacaccuccguuaucacaauugaacugucuaacaucaaggagaucaaaugcaaugggaccgacgccaaggugaaacuuauuaagcaggaacuggauaaguauaaaaacgcugugacggaccuccagcugcugaugcagagcacccccgccacaggauccggcucugcuaucgccagcggggucgcgguguguaagguucuccaccuggagggagaggugaauaaaauuaaguccgcccuucugagcaccaacaaagcugucgugucucucuccggcugcggcguuagcgugcugacauuuaagguccuugaucugaagaauuacaucgacaaacaacuccugccuauucugaacaagcagucuuguuccaucccgaauauugaaaccgugaucgaguuccagcagaaaaacaaucggcuccuggaaaucacgcgcgaguuuagcgugaacgccggggucacaacccccguuucuacauauaugcuuaccaauuccgagcugcucagccugauuaacgauaugccuaucaccaaugaccaaaagaaacuuauguccaacaacgugcagauugugagacagcagucuuacagcaucaugugcauuaucaaggaagagguccuggcuuaugugguucaacucccccuguacggagugaucgauacaccuuguuggaaacugcauacgagcccccucugcaccacaaauaccaaggaaggcagcaacauuugucugacacggaccgaccgcgggugguacugcgauaaugccggaucugucuccuucuuuccucaggcggagacguguaaggugcagagcaacagaguuuucugcgacacaaugaacucucuuacccugccgagcgaagugaaucucugcaaugucgauaucuuuaaccccaaauaugacuguaagauuaugaccuccaaaacagaugugucuagcuccgucaucaccagccugggcgccauugugucuugcuacgggaagacaaaauguacggcuuccaauaagugccggggaaucaucaagaccuucagcaacggcugugacuauguuucuaauaaaggcguggacacagucuccguggggaacacccuuuacuauguuaauaagcaagagggacagagccuguacgugaaaggcgagccuauuaucaacuuuuaugauccccucgucuucccuuccgacgaauuugaugccucuauuagccaggugaaugagaagaucaaccagucccuggcuuucauucgcaaaucugacgaacugcuccacaacgugaaugccgggaaguccacaaccaacaucaugauuacgaccaucaucauuguuaucauugucauccugcuuucccugauugccgugggacuccugcuguacugcaaggcuagaagcacacccgugacccuuucuaaagaucaacucuccggcaucaauaacaucgcguucagcaauugaggacuaguacuggcugcaucucccuuuccucuguccuccauccuucucccaggauggugaagggggaccugguacccagugauccccaccccaggauccuaaaucaugacuuaccugcuaauaaaaacucauuggaaaagugagaagaucuaaaaaaaaaaaaaaaaaaaaaaaaaaaaaaaaaaaaaaaaaaaaaaaaaaaaaaaaaaaaaaaaugcaucccccccccccccccccccccccccccccccaaaggcucuuuucagagccaccagaauu

SEQ ID NO: 7843 - RNA, 1989 nt, Artificial Sequence
  mRNA product Design h-1 comprising derived and/or modified sequence from HRSV(A2)__F_DSCav1_mut8 (opt6)
gggagacccgugacccggaaguuguacggcuacgcgacuuucccucccacaaacccucgcgcccuuccuuuccuacuugggcccggcagaaagcuuaccauggaacuauuaauauuaaaagcaaacgcaaucacaacuauacuaacagcaguaacauucugcuuugccucaggucaaaacauaacagaggaauuuuaccaauccacaugcucugcuguaagcaaaggauaccucggagcauuaagaacuggaugguacaccucaguaauaacuauagaacuaucaaacauaaaagaaauaaaauguaauggcacagacgcaaaagugaaauuaaucaaacaagaacucgauaaauacaaaaaugccguaaccgaucuccaacuuuuaaugcaaagcacacccgcaacagguuccgggucagcaauagcaagcggaguugcaguaugcaaaguacuacacuuagaaggagaaguaaauaaaaucaaaucagccuuacuaucaacaaauaaagcaguuguaucacucucaggaugcggaguauccguacuaacauuuaaaguacuagaucuaaaaaacuacauagauaaacaacucuuaccaauacuaaauaaacaaucauguuccauacccaacauagaaaccguuaucgaauuucaacaaaaaaacaacagauuacuagaaaucacacgagaauuuucaguaaaugcuggagucacaacaccaguuaguacauacaugcucaccaauucagaacuacuaaguuuaauuaacgauaugccaauaacaaacgaccaaaaaaaacuaaugucaaauaacguacaaauaguaagacaacaaucauacucaaucaugugcauaauaaaagaagaaguacuagccuauguaguccaauuaccacucuacggcguaaucgacaccccaugcuggaaauuacacacaagcccauuaugcaccaccaacacaaaagaagguucaaacauuugcuuaaccagaaccgaucgaggaugguacugcgauaacgcaggaucugucuccuuuuucccacaagccgaaacaugcaaaguucaaucaaaccgaguuuucugugacacuaugaacucacucacacuuccaagcgaaguaaaccuaugcaacguagauauauuuaacccuaaauacgacugcaaaauaaugacaagcaaaacagacguuaguucaucaguaauuacaagucuaggcgcaauagugucaugcuacggaaaaacaaaaugcaccgcauccaauaaaugccgaggaaucauuaaaacauucucaaacggaugcgacuacgucagcaauaaaggaguagacacuguuucuguaggaaacacccuauacuauguaaacaaacaagaaggucaaucacuauacguaaagggagaaccaauuauaaauuuuuacgaccccuuaguauuuccaagugaugaauuugacgcaucuauaagucaaguuaacgaaaaaauuaaccaaucacuugcauuuauaagaaaaucagacgaacuacuccauaauguaaacgcagguaaaucaacaacaaacaucaugaucacaaccauaauaauaguaauaauuguaauauuacuaucacuaauagcaguaggauuacuacucuacugcaaagcuagaucuaccccggucacacucucaaaagaccaauuaucuggaauaaacaauauagcauucagcaacuaaggacuaguacuggcugcaucucccuuuccucuguccuccauccuucucccaggauggugaagggggaccugguacccagugauccccaccccaggauccuaaaucaugacuuaccugcuaauaaaaacucauuggaaaagugagaagaucuaaaaaaaaaaaaaaaaaaaaaaaaaaaaaaaaaaaaaaaaaaaaaaaaaaaaaaaaaaaaaaaaugcaucccccccccccccccccccccccccccccccaaaggcucuuuucagagccaccagaauu

SEQ ID NO: 7844 - RNA, 1989 nt, Artificial Sequence
  mRNA product Design h-1 comprising derived and/or modified sequence from HRSV(A2)__F_DSCav1_mut8 (opt11)
gggagacccgugacccggaaguuguacggcuacgcgacuuucccucccacaaacccucgcgcccuuccuuuccuacuugggcccggcagaaagcuuaccauggaacuccucauccuuaaagccaacgccauaaccaccauccucaccgccgucaccuucugcuucgcuucuggccaaaacauaaccgaagaguucuaccaauccacgugcucugccgugucaaaaggcuaccucggagcccuccgcacagggugguacacuuccgucaucaccaucgaacucucuaacaucaaagaaaucaagugcaacggcacagacgcgaaagucaagcucaucaaacaagaacuagacaaauacaaaaacgccguaacagaccuccaacuccuaaugcaguccacaccagccacaggcuccggcagcgccaucgccuccggcgucgcugucugcaaaguccuacaccucgaaggcgaagucaacaaaaucaagucagcccuccuuagcaccaacaaagcagucgucucuuuaagcgggugcggagucucuguccuaaccuuuaaaguacucgaccucaaaaacuacaucgacaaacaacuacuaccaauacuaaacaaacagagcugcuccauucccaacaucgaaaccguuaucgaguuccaacaaaagaacaaccgccuccucgaaaucacccgcgaguucuccgucaacgcaggcgucaccaccccagucuccaccuauaugcuaaccaacagcgaacuccucagccucaucaaugacaugccaaucaccaacgaccaaaagaaacucauguccaacaacguacagauaguccgccagcaguccuacagcaucaugugcaucaucaaagaagaagugcucgccuacgugguacaacucccucucuacggagucauugauacacccugcuggaaacuccacacaagcccccucugcacuacaaacaccaaagaaggcucuaacauaugccucacccgcacagaccgugguugguacugcgacaacgccggcuccguauccuucuuuccacaagcugaaaccugcaaaguucaaucaaaccgagucuucugcgacaccaugaacucccucacauugcccagcgaagucaaccucugcaacgucgacaucuucaaccccaaguacgacugcaaaaucaugaccuccaaaaccgacgucagcuccagcgugaucacaagccuaggcgcgaucgucagcugcuacggcaaaaccaaaugcacagccuccaacaaaugccgcggaaucauaaaaacauucaguaacggcugcgacuacguguccaauaaaggagucgacaccguauccgucggaaacacccucuacuacgucaacaaacaagaaggacaaucccucuaugucaaaggcgaacccauuaucaacuucuacgacccccuaguuuuccccuccgacgaguucgacgcaagcauuucccaagucaacgaaaagaucaaucaaucccucgccuucauacgcaaaagcgacgaacuacuacacaacguaaacgccggcaaaagcaccaccaacaucaugaucacaacaaucaucaucgucaucaucgucauccuacucucacucaucgccguuggccuacuacucuacugcaaagcccgcuccacacccgucacccucucaaaagaccaacucuccggcaucaacaacaucgcauucagcaacugaggacuaguacuggcugcaucucccuuuccucuguccuccauccuucucccaggauggugaagggggaccugguacccagugauccccaccccaggauccuaaaucaugacuuaccugcuaauaaaaacucauuggaaaagugagaagaucuaaaaaaaaaaaaaaaaaaaaaaaaaaaaaaaaaaaaaaaaaaaaaaaaaaaaaaaaaaaaaaaaugcaucccccccccccccccccccccccccccccccaaaggcucuuuucagagccaccagaauu

SEQ ID NO: 7845 - RNA, 2205 nt, Artificial Sequence
  mRNA product Design h-2 comprising derived and/or modified sequence from HRSV(A2)__F_DSCav1_mut8 (opt1)
gggagacccgugacccggaaguuguacggcuacgcgacuuucccucccacaaacccucgcgcccuuccuuuccuacuugggcccggcagaaagcuuaccauggagcugcucauccugaaggccaacgccaucaccaccauccugacggcggugaccuucugcuucgccagcggccagaacaucaccgaggaguucuaccaguccacgugcagcgccgucuccaagggguaccucggcgcccugcggaccggcugguacaccuccgugaucaccaucgagcugagcaacaucaaggagaucaagugcaacgggaccgacgccaaggugaagcucaucaagcaggagcuggacaaguacaagaacgcggucacggaccugcagcuccugaugcaguccaccccggcaaccggcuccggcuccgccaucgcgagcggcgucgccgugugcaaggugcugcaccucgagggggaggucaacaagaucaagagcgcccugcuguccaccaacaaggccguggugagccucuccggcugcggcgucagcgugcugaccuucaaggugcuggaccucaagaacuacaucgacaagcagcugcugcccauccugaacaagcagagcugcuccauccccaacaucgagacggugaucgaguuccagcagaagaacaaccggcuccuggagaucacccgcgaguucagcgugaacgccggggucaccacccccguguccacguacaugcugaccaacagcgagcuccugucccugaucaacgacaugccgaucaccaacgaccagaagaagcucaugagcaacaacgugcagaucguccggcagcaguccuacagcaucaugugcaucaucaaggaggaggugcuggcguacgugguccagcugccccucuacggcgugaucgacacccccugcuggaagcugcacacgagcccccugugcaccaccaacaccaaggagggguccaacaucugccucacgcgcaccgaccggggcugguacugcgacaacgccggcagcgucuccuucuucccgcaggccgagaccugcaaggugcagagcaaccgcguguucugcgacaccaugaacucccugacgcugcccagcgagguaaaccucugcaacgucgacaucuucaaccccaaguacgacugcaagaucaugaccuccaagaccgacgugagcuccagcgugaucaccucccugggggccaucgucagcugcuacggcaagacgaagugcaccgccagcaacaagugccgggggaucaucaagaccuucuccaacggcugcgacuacgugagcaacaagggcguggacaccguguccgucgggaacacccuguacuacgugaacaagcaggagggccagagccucuacgugaagggggagcccaucaucaacuucuacgacccgcuggucuuccccuccgacgaguucgacgcgagcaucucccaggugaacgagaagaucaaccagagccuggccuucauccgcaaguccgacgagcugcuccacaacgugaacgccggcaagagcacgaccaacaucaugaucaccaccaucaucaucgucaucaucgugauccugcugucccucaucgccguggggcugcugcucuacugcaaggcccggagcacgcccgucacccuguccaaggaccagcugagcggcaucaacaacaucgcguucuccaacugaggacuagugaagggaacacccaaauuuaauucagccuuaagcacaauuaauuaagagugaaacguaauuguacaagcaguuggucacccaccauagggcaugaucaacaccgcaaccuuuccuuuuucccccagugauucugaaaaaccccucuucccuucagcuugcuuagauguuccaaauuuaguaagcuuaaggcggccuacagaagaaaaagaaaaaaaaggccacaaaaguucccucucacuuucaguaaauaaaauaaaagcagcaacagaaauaaagaaauaaaugaaauucaaaaugaaauaaauauuguguugugcagcauuaaaaaaucaauaaaaauuaaaaaugagcaagaucuaaaaaaaaaaaaaaaaaaaaaaaaaaaaaaaaaaaaaaaaaaaaaaaaaaaaaaaaaaaaaaaaugcaucccccccccccccccccccccccccccccccaaaggcucuuuucagagccaccagaauu

SEQ ID NO: 7846 - RNA, 2205 nt, Artificial Sequence
  mRNA product Design h-2 comprising derived and/or modified sequence from HRSV(A2)__F_DSCav1_mut8 (opt1)
gggagacccgugacccggaaguuguacggcuacgcgacuuucccucccacaaacccucgcgcccuuccuuuccuacuugggcccggcagaaagcuuaccauggagcugcucauccugaaggccaacgccaucaccaccauccugacggcggugaccuucugcuucgccagcggccagaacaucaccgaggaguucuaccaguccacgugcagcgccgucuccaagggguaccucggcgcccugcgcaccgggugguacaccagcgugaucaccaucgagcuguccaacaucaaggagaucaagugcaacggcaccgacgccaaggugaagcucaucaagcaggagcuggacaaguacaagaacgcggucacggaccugcagcuccugaugcagagcacccccgccaccggguccggcagcgccaucgccuccggcguggcggugugcaagguccugcaccucgagggggaggugaacaagaucaagagcgcccugcuguccaccaacaaggccguggucagccucuccggcugcggggugagcgugcugacguucaagguccuggaccucaagaacuacaucgacaagcagcugcugccgauccucaacaagcaguccugcagcauccccaacaucgagaccgugaucgaguuccagcagaagaacaaccggcugcuggagaucacccgcgaguucuccgugaacgccggcgucaccacgcccgugagcaccuacaugcucaccaacuccgagcugcugagccucaucaacgacaugcccaucaccaacgaccagaagaagcugaugagcaacaacgugcagaucguccggcagcaguccuacagcaucaugugcaucaucaaggaggaggugcuggccuacgugguccagcucccgcuguacggggugaucgacacgcccugcuggaagcugcacaccagcccccucugcaccaccaacacgaaggagggcuccaacaucugccugacccgcaccgaccggggcugguacugcgacaacgcgggguccgugagcuucuucccccaggccgagaccugcaagguccaguccaaccgcguguucugcgacacgaugaacagccugacccucccguccgaggucaaccugugcaacguggacaucuucaaccccaaguacgacugcaagaucaugaccagcaagaccgacguguccagcuccgucaucacgagccugggcgccaucguguccugcuacgggaagaccaagugcaccgccagcaacaagugccggggcaucaucaagaccuucuccaacggcugcgacuacgugagcaacaagggggucgacacgguguccgugggcaacacccucuacuacgucaacaagcaggaggggcagagccuguacgugaagggcgagcccaucaucaacuucuacgacccccugguguucccgagcgacgaguucgacgccuccaucagccaggucaacgagaagaucaaccagucccucgcguucauccgcaagagcgacgagcugcugcacaacgugaacgccgggaaguccaccaccaacaucaugaucaccacgaucaucaucgugaucaucgucauccuccugagccugaucgccgugggccuccugcuguacugcaaggcccgguccacccccgugacccugagcaaggaccagcucuccggcaucaacaacaucgccuucagcaacugaggacuagugaagggaacacccaaauuuaauucagccuuaagcacaauuaauuaagagugaaacguaauuguacaagcaguuggucacccaccauagggcaugaucaacaccgcaaccuuuccuuuuucccccagugauucugaaaaaccccucuucccuucagcuugcuuagauguuccaaauuuaguaagcuuaaggcggccuacagaagaaaaagaaaaaaaaggccacaaaaguucccucucacuuucaguaaauaaaauaaaagcagcaacagaaauaaagaaauaaaugaaauucaaaaugaaauaaauauuguguugugcagcauuaaaaaaucaauaaaaauuaaaaaugagcaagaucuaaaaaaaaaaaaaaaaaaaaaaaaaaaaaaaaaaaaaaaaaaaaaaaaaaaaaaaaaaaaaaaaugcaucccccccccccccccccccccccccccccccaaaggcucuuuucagagccaccagaauu

SEQ ID NO: 7847 - RNA, 2205 nt, Artificial Sequence
  mRNA product Design h-2 comprising derived and/or modified sequence from HRSV(A2)__F_DSCav1_mut8 (opt2)
gggagacccgugacccggaaguuguacggcuacgcgacuuucccucccacaaacccucgcgcccuuccuuuccuacuugggcccggcagaaagcuuaccauggagcuccucauccucaaggccaacgccaucaccaccauccucaccgccgucaccuucugcuucgccuccggccagaacaucaccgaggaguucuaccaguccaccugcuccgccgucuccaagggcuaccucggcgcccuccgcaccggcugguacaccuccgucaucaccaucgagcucuccaacaucaaggagaucaagugcaacggcaccgacgccaaggucaagcucaucaagcaggagcucgacaaguacaagaacgccgucaccgaccuccagcuccucaugcaguccacccccgccaccggcuccggcuccgccaucgccuccggcgucgccgucugcaagguccuccaccucgagggcgaggucaacaagaucaaguccgcccuccucuccaccaacaaggccgucgucucccucuccggcugcggcgucuccguccucaccuucaagguccucgaccucaagaacuacaucgacaagcagcuccuccccauccucaacaagcaguccugcuccauccccaacaucgagaccgucaucgaguuccagcagaagaacaaccgccuccucgagaucacccgcgaguucuccgucaacgccggcgucaccacccccgucuccaccuacaugcucaccaacuccgagcuccucucccucaucaacgacaugcccaucaccaacgaccagaagaagcucauguccaacaacguccagaucguccgccagcaguccuacuccaucaugugcaucaucaaggaggagguccucgccuacgucguccagcucccccucuacggcgucaucgacacccccugcuggaagcuccacaccuccccccucugcaccaccaacaccaaggagggcuccaacaucugccucacccgcaccgaccgcggcugguacugcgacaacgccggcuccgucuccuucuucccccaggccgagaccugcaagguccaguccaaccgcgucuucugcgacaccaugaacucccucacccuccccuccgaggucaaccucugcaacgucgacaucuucaaccccaaguacgacugcaagaucaugaccuccaagaccgacgucuccuccuccgucaucaccucccucggcgccaucgucuccugcuacggcaagaccaagugcaccgccuccaacaagugccgcggcaucaucaagaccuucuccaacggcugcgacuacgucuccaacaagggcgucgacaccgucuccgucggcaacacccucuacuacgucaacaagcaggagggccagucccucuacgucaagggcgagcccaucaucaacuucuacgacccccucgucuuccccuccgacgaguucgacgccuccaucucccaggucaacgagaagaucaaccagucccucgccuucauccgcaaguccgacgagcuccuccacaacgucaacgccggcaaguccaccaccaacaucaugaucaccaccaucaucaucgucaucaucgucauccuccucucccucaucgccgucggccuccuccucuacugcaaggcccgcuccacccccgucacccucuccaaggaccagcucuccggcaucaacaacaucgccuucuccaacugaggacuagugaagggaacacccaaauuuaauucagccuuaagcacaauuaauuaagagugaaacguaauuguacaagcaguuggucacccaccauagggcaugaucaacaccgcaaccuuuccuuuuucccccagugauucugaaaaaccccucuucccuucagcuugcuuagauguuccaaauuuaguaagcuuaaggcggccuacagaagaaaaagaaaaaaaaggccacaaaaguucccucucacuuucaguaaauaaaauaaaagcagcaacagaaauaaagaaauaaaugaaauucaaaaugaaauaaauauuguguugugcagcauuaaaaaaucaauaaaaauuaaaaaugagcaagaucuaaaaaaaaaaaaaaaaaaaaaaaaaaaaaaaaaaaaaaaaaaaaaaaaaaaaaaaaaaaaaaaaugcaucccccccccccccccccccccccccccccccaaaggcucuuuucagagccaccagaauu

SEQ ID NO: 7848 - RNA, 2205 nt, Artificial Sequence
  mRNA product Design h-2 comprising derived and/or modified sequence from HRSV(A2)__F_DSCav1_mut8 (opt3)
gggagacccgugacccggaaguuguacggcuacgcgacuuucccucccacaaacccucgcgcccuuccuuuccuacuugggcccggcagaaagcuuaccauggagcugcucauccuuaaggccaacgcuauuaccacaauacugacugcagugacguucugcuuugccagcggccagaauaucaccgaagaguucuaccaauccacauguucugcggucucaaaaggguauuugggagcuuuaagaacugguugguacaccaguguuauuacaaucgaacugagcaacauuaaggagaucaaaugcaauggcaccgacgccaaggugaaacuaauaaagcaggaacucgauaaguauaaaaacgcaguaacugaccugcagcuucugaugcaguccacacccgccaccgggucuggaucggcuaucgcaucaggcguggccgucuguaagguguugcaccucgagggugagguuaauaaaauuaagagcgcucugcugaguacgaacaaagccguggucucccucucugggugcggagugagcguauuaacuuuuaagguucuggaucuuaagaauuacaucgacaaacaauugcugccuauucuaaacaagcaguccuguucaaucccaaauauagaaaccgugauugaguuccagcagaaaaacaauaggcuccuggaaaucacacgggaguuuagugucaacgcgggcgugacuaccccggugagcacauauaugcuuaccaauucugagcuguugucccucauuaacgauaugcccaucacgaaugaccaaaagaaacugaugucaaacaacguccagaucguucgccagcagagcuacaguauuaugugcauaaucaaggaagagguguuagcauauguagugcaacugccucucuacggcgucauugauacuccauguuggaaacuucauacaucuccccugugcaccacuaauacaaaggaaggguccaacaucuguuugacccgaacggaccguggaugguacugcgauaaugccgguagcgugucguucuuuccucaggcugagaccuguaagguucagucuaacagaguguucugcgacacaaugaacucccuaacucugccaucagaagucaaucucugcaauguggauauauuuaaccccaaauaugacuguaagauuaugaccaguaaaacagauguaagcuccucuguuaucacuagccugggcgccaucgugucaugcuacgggaagaccaaauguacagcaaguaauaagugcaggggaauuaucaagaccuucuccaacggcugugacuaugucagcaauaaagguguggacacugucucuguggggaacacgcuuuacuauguuaauaagcaagagggacagucacuguacgugaaaggcgagccuauuauaaacuuuuaugauccauugguauucccgagugacgaauuugaugcuagcaucucccaggucaaugagaagauuaaccagucucucgccuucauccggaaaucggacgaacuguuacacaacgugaaugcgggcaagagcacaaccaacaucaugauuacuaccauaaucauuguuaucauugugauccugcuaucccucauagccgucgggcugcuuuuguacugcaaggcacgcucaacacccgugacccugaguaaagaucaacucucuggaaucaauaacauugcuuucagcaauugaggacuagugaagggaacacccaaauuuaauucagccuuaagcacaauuaauuaagagugaaacguaauuguacaagcaguuggucacccaccauagggcaugaucaacaccgcaaccuuuccuuuuucccccagugauucugaaaaaccccucuucccuucagcuugcuuagauguuccaaauuuaguaagcuuaaggcggccuacagaagaaaaagaaaaaaaaggccacaaaaguucccucucacuuucaguaaauaaaauaaaagcagcaacagaaauaaagaaauaaaugaaauucaaaaugaaauaaauauuguguugugcagcauuaaaaaaucaauaaaaauuaaaaaugagcaagaucuaaaaaaaaaaaaaaaaaaaaaaaaaaaaaaaaaaaaaaaaaaaaaaaaaaaaaaaaaaaaaaaaugcaucccccccccccccccccccccccccccccccaaaggcucuuuucagagccaccagaauu

SEQ ID NO: 7849 - RNA, 2205 nt, Artificial Sequence
  mRNA product Design h-2 comprising derived and/or modified sequence from HRSV(A2)__F_DSCav1_mut8 (opt4)
gggagacccgugacccggaaguuguacggcuacgcgacuuucccucccacaaacccucgcgcccuuccuuuccuacuugggcccggcagaaagcuuaccauggagcugcugauccugaaggccaacgccaucaccaccauccugaccgccgugaccuucugcuucgccagcggccagaacaucaccgaggaguucuaccagagcaccugcagcgccgugagcaagggcuaccugggcgcccugagaaccggcugguacaccagcgugaucaccaucgagcugagcaacaucaaggagaucaagugcaacggcaccgacgccaaggugaagcugaucaagcaggagcuggacaaguacaagaacgccgugaccgaccugcagcugcugaugcagagcacccccgccaccggcagcggcagcgccaucgccagcggcguggccgugugcaaggugcugcaccuggagggcgaggugaacaagaucaagagcgcccugcugagcaccaacaaggccguggugagccugagcggcugcggcgugagcgugcugaccuucaaggugcuggaccugaagaacuacaucgacaagcagcugcugcccauccugaacaagcagagcugcagcauccccaacaucgagaccgugaucgaguuccagcagaagaacaacagacugcuggagaucaccagagaguucagcgugaacgccggcgugaccacccccgugagcaccuacaugcugaccaacagcgagcugcugagccugaucaacgacaugcccaucaccaacgaccagaagaagcugaugagcaacaacgugcagaucgugagacagcagagcuacagcaucaugugcaucaucaaggaggaggugcuggccuacguggugcagcugccccuguacggcgugaucgacacccccugcuggaagcugcacaccagcccccugugcaccaccaacaccaaggagggcagcaacaucugccugaccagaaccgacagaggcugguacugcgacaacgccggcagcgugagcuucuucccccaggccgagaccugcaaggugcagagcaacagaguguucugcgacaccaugaacagccugacccugcccagcgaggugaaccugugcaacguggacaucuucaaccccaaguacgacugcaagaucaugaccagcaagaccgacgugagcagcagcgugaucaccagccugggcgccaucgugagcugcuacggcaagaccaagugcaccgccagcaacaagugcagaggcaucaucaagaccuucagcaacggcugcgacuacgugagcaacaagggcguggacaccgugagcgugggcaacacccuguacuacgugaacaagcaggagggccagagccuguacgugaagggcgagcccaucaucaacuucuacgacccccugguguuccccagcgacgaguucgacgccagcaucagccaggugaacgagaagaucaaccagagccuggccuucaucagaaagagcgacgagcugcugcacaacgugaacgccggcaagagcaccaccaacaucaugaucaccaccaucaucaucgugaucaucgugauccugcugagccugaucgccgugggccugcugcuguacugcaaggccagaagcacccccgugacccugagcaaggaccagcugagcggcaucaacaacaucgccuucagcaacugaggacuagugaagggaacacccaaauuuaauucagccuuaagcacaauuaauuaagagugaaacguaauuguacaagcaguuggucacccaccauagggcaugaucaacaccgcaaccuuuccuuuuucccccagugauucugaaaaaccccucuucccuucagcuugcuuagauguuccaaauuuaguaagcuuaaggcggccuacagaagaaaaagaaaaaaaaggccacaaaaguucccucucacuuucaguaaauaaaauaaaagcagcaacagaaauaaagaaauaaaugaaauucaaaaugaaauaaauauuguguugugcagcauuaaaaaaucaauaaaaauuaaaaaugagcaagaucuaaaaaaaaaaaaaaaaaaaaaaaaaaaaaaaaaaaaaaaaaaaaaaaaaaaaaaaaaaaaaaaaugcaucccccccccccccccccccccccccccccccaaaggcucuuuucagagccaccagaauu

SEQ ID NO: 7850 - RNA, 2205 nt, Artificial Sequence
  mRNA product Design h-2 comprising derived and/or modified sequence from HRSV(A2)__F_DSCav1_mut8 (opt5)
gggagacccgugacccggaaguuguacggcuacgcgacuuucccucccacaaacccucgcgcccuuccuuuccuacuugggcccggcagaaagcuuaccauggagcugcucauccugaaggccaacgcuauuaccacaauccuuacggccgugaccuucugcuuugcgagcggccagaauauuacagaagaguucuaccaauccaccuguucugcugucagcaaaggguaucugggagcccucagaacaggcugguacaccuccguuaucacaauugaacugucuaacaucaaggagaucaaaugcaaugggaccgacgccaaggugaaacuuauuaagcaggaacuggauaaguauaaaaacgcugugacggaccuccagcugcugaugcagagcacccccgccacaggauccggcucugcuaucgccagcggggucgcgguguguaagguucuccaccuggagggagaggugaauaaaauuaaguccgcccuucugagcaccaacaaagcugucgugucucucuccggcugcggcguuagcgugcugacauuuaagguccuugaucugaagaauuacaucgacaaacaacuccugccuauucugaacaagcagucuuguuccaucccgaauauugaaaccgugaucgaguuccagcagaaaaacaaucggcuccuggaaaucacgcgcgaguuuagcgugaacgccggggucacaacccccguuucuacauauaugcuuaccaauuccgagcugcucagccugauuaacgauaugccuaucaccaaugaccaaaagaaacuuauguccaacaacgugcagauugugagacagcagucuuacagcaucaugugcauuaucaaggaagagguccuggcuuaugugguucaacucccccuguacggagugaucgauacaccuuguuggaaacugcauacgagcccccucugcaccacaaauaccaaggaaggcagcaacauuugucugacacggaccgaccgcgggugguacugcgauaaugccggaucugucuccuucuuuccucaggcggagacguguaaggugcagagcaacagaguuuucugcgacacaaugaacucucuuacccugccgagcgaagugaaucucugcaaugucgauaucuuuaaccccaaauaugacuguaagauuaugaccuccaaaacagaugugucuagcuccgucaucaccagccugggcgccauugugucuugcuacgggaagacaaaauguacggcuuccaauaagugccggggaaucaucaagaccuucagcaacggcugugacuauguuucuaauaaaggcguggacacagucuccguggggaacacccuuuacuauguuaauaagcaagagggacagagccuguacgugaaaggcgagccuauuaucaacuuuuaugauccccucgucuucccuuccgacgaauuugaugccucuauuagccaggugaaugagaagaucaaccagucccuggcuuucauucgcaaaucugacgaacugcuccacaacgugaaugccgggaaguccacaaccaacaucaugauuacgaccaucaucauuguuaucauugucauccugcuuucccugauugccgugggacuccugcuguacugcaaggcuagaagcacacccgugacccuuucuaaagaucaacucuccggcaucaauaacaucgcguucagcaauugaggacuagugaagggaacacccaaauuuaauucagccuuaagcacaauuaauuaagagugaaacguaauuguacaagcaguuggucacccaccauagggcaugaucaacaccgcaaccuuuccuuuuucccccagugauucugaaaaaccccucuucccuucagcuugcuuagauguuccaaauuuaguaagcuuaaggcggccuacagaagaaaaagaaaaaaaaggccacaaaaguucccucucacuuucaguaaauaaaauaaaagcagcaacagaaauaaagaaauaaaugaaauucaaaaugaaauaaauauuguguugugcagcauuaaaaaaucaauaaaaauuaaaaaugagcaagaucuaaaaaaaaaaaaaaaaaaaaaaaaaaaaaaaaaaaaaaaaaaaaaaaaaaaaaaaaaaaaaaaaugcaucccccccccccccccccccccccccccccccaaaggcucuuuucagagccaccagaauu

SEQ ID NO: 7851 - RNA, 2205 nt, Artificial Sequence
  mRNA product Design h-2 comprising derived and/or modified sequence from HRSV(A2)__F_DSCav1_mut8 (opt6)
gggagacccgugacccggaaguuguacggcuacgcgacuuucccucccacaaacccucgcgcccuuccuuuccuacuugggcccggcagaaagcuuaccauggaacuauuaauauuaaaagcaaacgcaaucacaacuauacuaacagcaguaacauucugcuuugccucaggucaaaacauaacagaggaauuuuaccaauccacaugcucugcuguaagcaaaggauaccucggagcauuaagaacuggaugguacaccucaguaauaacuauagaacuaucaaacauaaaagaaauaaaauguaauggcacagacgcaaaagugaaauuaaucaaacaagaacucgauaaauacaaaaaugccguaaccgaucuccaacuuuuaaugcaaagcacacccgcaacagguuccgggucagcaauagcaagcggaguugcaguaugcaaaguacuacacuuagaaggagaaguaaauaaaaucaaaucagccuuacuaucaacaaauaaagcaguuguaucacucucaggaugcggaguauccguacuaacauuuaaaguacuagaucuaaaaaacuacauagauaaacaacucuuaccaauacuaaauaaacaaucauguuccauacccaacauagaaaccguuaucgaauuucaacaaaaaaacaacagauuacuagaaaucacacgagaauuuucaguaaaugcuggagucacaacaccaguuaguacauacaugcucaccaauucagaacuacuaaguuuaauuaacgauaugccaauaacaaacgaccaaaaaaaacuaaugucaaauaacguacaaauaguaagacaacaaucauacucaaucaugugcauaauaaaagaagaaguacuagccuauguaguccaauuaccacucuacggcguaaucgacaccccaugcuggaaauuacacacaagcccauuaugcaccaccaacacaaaagaagguucaaacauuugcuuaaccagaaccgaucgaggaugguacugcgauaacgcaggaucugucuccuuuuucccacaagccgaaacaugcaaaguucaaucaaaccgaguuuucugugacacuaugaacucacucacacuuccaagcgaaguaaaccuaugcaacguagauauauuuaacccuaaauacgacugcaaaauaaugacaagcaaaacagacguuaguucaucaguaauuacaagucuaggcgcaauagugucaugcuacggaaaaacaaaaugcaccgcauccaauaaaugccgaggaaucauuaaaacauucucaaacggaugcgacuacgucagcaauaaaggaguagacacuguuucuguaggaaacacccuauacuauguaaacaaacaagaaggucaaucacuauacguaaagggagaaccaauuauaaauuuuuacgaccccuuaguauuuccaagugaugaauuugacgcaucuauaagucaaguuaacgaaaaaauuaaccaaucacuugcauuuauaagaaaaucagacgaacuacuccauaauguaaacgcagguaaaucaacaacaaacaucaugaucacaaccauaauaauaguaauaauuguaauauuacuaucacuaauagcaguaggauuacuacucuacugcaaagcuagaucuaccccggucacacucucaaaagaccaauuaucuggaauaaacaauauagcauucagcaacuaaggacuagugaagggaacacccaaauuuaauucagccuuaagcacaauuaauuaagagugaaacguaauuguacaagcaguuggucacccaccauagggcaugaucaacaccgcaaccuuuccuuuuucccccagugauucugaaaaaccccucuucccuucagcuugcuuagauguuccaaauuuaguaagcuuaaggcggccuacagaagaaaaagaaaaaaaaggccacaaaaguucccucucacuuucaguaaauaaaauaaaagcagcaacagaaauaaagaaauaaaugaaauucaaaaugaaauaaauauuguguugugcagcauuaaaaaaucaauaaaaauuaaaaaugagcaagaucuaaaaaaaaaaaaaaaaaaaaaaaaaaaaaaaaaaaaaaaaaaaaaaaaaaaaaaaaaaaaaaaaugcaucccccccccccccccccccccccccccccccaaaggcucuuuucagagccaccagaauu

SEQ ID NO: 7852 - RNA, 2205 nt, Artificial Sequence
  mRNA product Design h-2 comprising derived and/or modified sequence from HRSV(A2)__F_DSCav1_mut8 (opt11)
gggagacccgugacccggaaguuguacggcuacgcgacuuucccucccacaaacccucgcgcccuuccuuuccuacuugggcccggcagaaagcuuaccauggaacuccucauccuuaaagccaacgccauaaccaccauccucaccgccgucaccuucugcuucgcuucuggccaaaacauaaccgaagaguucuaccaauccacgugcucugccgugucaaaaggcuaccucggagcccuccgcacagggugguacacuuccgucaucaccaucgaacucucuaacaucaaagaaaucaagugcaacggcacagacgcgaaagucaagcucaucaaacaagaacuagacaaauacaaaaacgccguaacagaccuccaacuccuaaugcaguccacaccagccacaggcuccggcagcgccaucgccuccggcgucgcugucugcaaaguccuacaccucgaaggcgaagucaacaaaaucaagucagcccuccuuagcaccaacaaagcagucgucucuuuaagcgggugcggagucucuguccuaaccuuuaaaguacucgaccucaaaaacuacaucgacaaacaacuacuaccaauacuaaacaaacagagcugcuccauucccaacaucgaaaccguuaucgaguuccaacaaaagaacaaccgccuccucgaaaucacccgcgaguucuccgucaacgcaggcgucaccaccccagucuccaccuauaugcuaaccaacagcgaacuccucagccucaucaaugacaugccaaucaccaacgaccaaaagaaacucauguccaacaacguacagauaguccgccagcaguccuacagcaucaugugcaucaucaaagaagaagugcucgccuacgugguacaacucccucucuacggagucauugauacacccugcuggaaacuccacacaagcccccucugcacuacaaacaccaaagaaggcucuaacauaugccucacccgcacagaccgugguugguacugcgacaacgccggcuccguauccuucuuuccacaagcugaaaccugcaaaguucaaucaaaccgagucuucugcgacaccaugaacucccucacauugcccagcgaagucaaccucugcaacgucgacaucuucaaccccaaguacgacugcaaaaucaugaccuccaaaaccgacgucagcuccagcgugaucacaagccuaggcgcgaucgucagcugcuacggcaaaaccaaaugcacagccuccaacaaaugccgcggaaucauaaaaacauucaguaacggcugcgacuacguguccaauaaaggagucgacaccguauccgucggaaacacccucuacuacgucaacaaacaagaaggacaaucccucuaugucaaaggcgaacccauuaucaacuucuacgacccccuaguuuuccccuccgacgaguucgacgcaagcauuucccaagucaacgaaaagaucaaucaaucccucgccuucauacgcaaaagcgacgaacuacuacacaacguaaacgccggcaaaagcaccaccaacaucaugaucacaacaaucaucaucgucaucaucgucauccuacucucacucaucgccguuggccuacuacucuacugcaaagcccgcuccacacccgucacccucucaaaagaccaacucuccggcaucaacaacaucgcauucagcaacugaggacuagugaagggaacacccaaauuuaauucagccuuaagcacaauuaauuaagagugaaacguaauuguacaagcaguuggucacccaccauagggcaugaucaacaccgcaaccuuuccuuuuucccccagugauucugaaaaaccccucuucccuucagcuugcuuagauguuccaaauuuaguaagcuuaaggcggccuacagaagaaaaagaaaaaaaaggccacaaaaguucccucucacuuucaguaaauaaaauaaaagcagcaacagaaauaaagaaauaaaugaaauucaaaaugaaauaaauauuguguugugcagcauuaaaaaaucaauaaaaauuaaaaaugagcaagaucuaaaaaaaaaaaaaaaaaaaaaaaaaaaaaaaaaaaaaaaaaaaaaaaaaaaaaaaaaaaaaaaaugcaucccccccccccccccccccccccccccccccaaaggcucuuuucagagccaccagaauu

SEQ ID NO: 7853 - RNA, 1985 nt, Artificial Sequence
  mRNA product Design h-3 comprising derived and/or modified sequence from HRSV(A2)__F_DSCav1_mut8 (opt1)
gggagacccgugacccggaaguuguacggcuacgcgacuuucccucccacaaacccucgcgcccuuccuuuccuacuugggcccggcagaaagcuuaccauggagcugcucauccugaaggccaacgccaucaccaccauccugacggcggugaccuucugcuucgccagcggccagaacaucaccgaggaguucuaccaguccacgugcagcgccgucuccaagggguaccucggcgcccugcggaccggcugguacaccuccgugaucaccaucgagcugagcaacaucaaggagaucaagugcaacgggaccgacgccaaggugaagcucaucaagcaggagcuggacaaguacaagaacgcggucacggaccugcagcuccugaugcaguccaccccggcaaccggcuccggcuccgccaucgcgagcggcgucgccgugugcaaggugcugcaccucgagggggaggucaacaagaucaagagcgcccugcuguccaccaacaaggccguggugagccucuccggcugcggcgucagcgugcugaccuucaaggugcuggaccucaagaacuacaucgacaagcagcugcugcccauccugaacaagcagagcugcuccauccccaacaucgagacggugaucgaguuccagcagaagaacaaccggcuccuggagaucacccgcgaguucagcgugaacgccggggucaccacccccguguccacguacaugcugaccaacagcgagcuccugucccugaucaacgacaugccgaucaccaacgaccagaagaagcucaugagcaacaacgugcagaucguccggcagcaguccuacagcaucaugugcaucaucaaggaggaggugcuggcguacgugguccagcugccccucuacggcgugaucgacacccccugcuggaagcugcacacgagcccccugugcaccaccaacaccaaggagggguccaacaucugccucacgcgcaccgaccggggcugguacugcgacaacgccggcagcgucuccuucuucccgcaggccgagaccugcaaggugcagagcaaccgcguguucugcgacaccaugaacucccugacgcugcccagcgagguaaaccucugcaacgucgacaucuucaaccccaaguacgacugcaagaucaugaccuccaagaccgacgugagcuccagcgugaucaccucccugggggccaucgucagcugcuacggcaagacgaagugcaccgccagcaacaagugccgggggaucaucaagaccuucuccaacggcugcgacuacgugagcaacaagggcguggacaccguguccgucgggaacacccuguacuacgugaacaagcaggagggccagagccucuacgugaagggggagcccaucaucaacuucuacgacccgcuggucuuccccuccgacgaguucgacgcgagcaucucccaggugaacgagaagaucaaccagagccuggccuucauccgcaaguccgacgagcugcuccacaacgugaacgccggcaagagcacgaccaacaucaugaucaccaccaucaucaucgucaucaucgugauccugcugucccucaucgccguggggcugcugcucuacugcaaggcccggagcacgcccgucacccuguccaaggaccagcugagcggcaucaacaacaucgcguucuccaacugaggacuaguggaagcauuuuccuggcugauuaaaagaaauuacucagcuauggucaucuguuccuguuagaaggcuaugcagcauauuauauacuaugcgcauguuaugaaaugcauaauaaaaaauuuuaaaaaaucuaaaagaucuaaaaaaaaaaaaaaaaaaaaaaaaaaaaaaaaaaaaaaaaaaaaaaaaaaaaaaaaaaaaaaaaugcaucccccccccccccccccccccccccccccccaaaggcucuuuucagagccaccagaauu

SEQ ID NO: 7854 - RNA, 1985 nt, Artificial Sequence
  mRNA product Design h-3 comprising derived and/or modified sequence from HRSV(A2)__F_DSCav1_mut8 (opt1)
gggagacccgugacccggaaguuguacggcuacgcgacuuucccucccacaaacccucgcgcccuuccuuuccuacuugggcccggcagaaagcuuaccauggagcugcucauccugaaggccaacgccaucaccaccauccugacggcggugaccuucugcuucgccagcggccagaacaucaccgaggaguucuaccaguccacgugcagcgccgucuccaagggguaccucggcgcccugcgcaccgggugguacaccagcgugaucaccaucgagcuguccaacaucaaggagaucaagugcaacggcaccgacgccaaggugaagcucaucaagcaggagcuggacaaguacaagaacgcggucacggaccugcagcuccugaugcagagcacccccgccaccggguccggcagcgccaucgccuccggcguggcggugugcaagguccugcaccucgagggggaggugaacaagaucaagagcgcccugcuguccaccaacaaggccguggucagccucuccggcugcggggugagcgugcugacguucaagguccuggaccucaagaacuacaucgacaagcagcugcugccgauccucaacaagcaguccugcagcauccccaacaucgagaccgugaucgaguuccagcagaagaacaaccggcugcuggagaucacccgcgaguucuccgugaacgccggcgucaccacgcccgugagcaccuacaugcucaccaacuccgagcugcugagccucaucaacgacaugcccaucaccaacgaccagaagaagcugaugagcaacaacgugcagaucguccggcagcaguccuacagcaucaugugcaucaucaaggaggaggugcuggccuacgugguccagcucccgcuguacggggugaucgacacgcccugcuggaagcugcacaccagcccccucugcaccaccaacacgaaggagggcuccaacaucugccugacccgcaccgaccggggcugguacugcgacaacgcgggguccgugagcuucuucccccaggccgagaccugcaagguccaguccaaccgcguguucugcgacacgaugaacagccugacccucccguccgaggucaaccugugcaacguggacaucuucaaccccaaguacgacugcaagaucaugaccagcaagaccgacguguccagcuccgucaucacgagccugggcgccaucguguccugcuacgggaagaccaagugcaccgccagcaacaagugccggggcaucaucaagaccuucuccaacggcugcgacuacgugagcaacaagggggucgacacgguguccgugggcaacacccucuacuacgucaacaagcaggaggggcagagccuguacgugaagggcgagcccaucaucaacuucuacgacccccugguguucccgagcgacgaguucgacgccuccaucagccaggucaacgagaagaucaaccagucccucgcguucauccgcaagagcgacgagcugcugcacaacgugaacgccgggaaguccaccaccaacaucaugaucaccacgaucaucaucgugaucaucgucauccuccugagccugaucgccgugggccuccugcuguacugcaaggcccgguccacccccgugacccugagcaaggaccagcucuccggcaucaacaacaucgccuucagcaacugaggacuaguggaagcauuuuccuggcugauuaaaagaaauuacucagcuauggucaucuguuccuguuagaaggcuaugcagcauauuauauacuaugcgcauguuaugaaaugcauaauaaaaaauuuuaaaaaaucuaaaagaucuaaaaaaaaaaaaaaaaaaaaaaaaaaaaaaaaaaaaaaaaaaaaaaaaaaaaaaaaaaaaaaaaugcaucccccccccccccccccccccccccccccccaaaggcucuuuucagagccaccagaauu

SEQ ID NO: 7855 - RNA, 1985 nt, Artificial Sequence
  mRNA product Design h-3 comprising derived and/or modified sequence from HRSV(A2)__F_DSCav1_mut8 (opt2)
gggagacccgugacccggaaguuguacggcuacgcgacuuucccucccacaaacccucgcgcccuuccuuuccuacuugggcccggcagaaagcuuaccauggagcuccucauccucaaggccaacgccaucaccaccauccucaccgccgucaccuucugcuucgccuccggccagaacaucaccgaggaguucuaccaguccaccugcuccgccgucuccaagggcuaccucggcgcccuccgcaccggcugguacaccuccgucaucaccaucgagcucuccaacaucaaggagaucaagugcaacggcaccgacgccaaggucaagcucaucaagcaggagcucgacaaguacaagaacgccgucaccgaccuccagcuccucaugcaguccacccccgccaccggcuccggcuccgccaucgccuccggcgucgccgucugcaagguccuccaccucgagggcgaggucaacaagaucaaguccgcccuccucuccaccaacaaggccgucgucucccucuccggcugcggcgucuccguccucaccuucaagguccucgaccucaagaacuacaucgacaagcagcuccuccccauccucaacaagcaguccugcuccauccccaacaucgagaccgucaucgaguuccagcagaagaacaaccgccuccucgagaucacccgcgaguucuccgucaacgccggcgucaccacccccgucuccaccuacaugcucaccaacuccgagcuccucucccucaucaacgacaugcccaucaccaacgaccagaagaagcucauguccaacaacguccagaucguccgccagcaguccuacuccaucaugugcaucaucaaggaggagguccucgccuacgucguccagcucccccucuacggcgucaucgacacccccugcuggaagcuccacaccuccccccucugcaccaccaacaccaaggagggcuccaacaucugccucacccgcaccgaccgcggcugguacugcgacaacgccggcuccgucuccuucuucccccaggccgagaccugcaagguccaguccaaccgcgucuucugcgacaccaugaacucccucacccuccccuccgaggucaaccucugcaacgucgacaucuucaaccccaaguacgacugcaagaucaugaccuccaagaccgacgucuccuccuccgucaucaccucccucggcgccaucgucuccugcuacggcaagaccaagugcaccgccuccaacaagugccgcggcaucaucaagaccuucuccaacggcugcgacuacgucuccaacaagggcgucgacaccgucuccgucggcaacacccucuacuacgucaacaagcaggagggccagucccucuacgucaagggcgagcccaucaucaacuucuacgacccccucgucuuccccuccgacgaguucgacgccuccaucucccaggucaacgagaagaucaaccagucccucgccuucauccgcaaguccgacgagcuccuccacaacgucaacgccggcaaguccaccaccaacaucaugaucaccaccaucaucaucgucaucaucgucauccuccucucccucaucgccgucggccuccuccucuacugcaaggcccgcuccacccccgucacccucuccaaggaccagcucuccggcaucaacaacaucgccuucuccaacugaggacuaguggaagcauuuuccuggcugauuaaaagaaauuacucagcuauggucaucuguuccuguuagaaggcuaugcagcauauuauauacuaugcgcauguuaugaaaugcauaauaaaaaauuuuaaaaaaucuaaaagaucuaaaaaaaaaaaaaaaaaaaaaaaaaaaaaaaaaaaaaaaaaaaaaaaaaaaaaaaaaaaaaaaaugcaucccccccccccccccccccccccccccccccaaaggcucuuuucagagccaccagaauu

SEQ ID NO: 7856 - RNA, 1985 nt, Artificial Sequence
  mRNA product Design h-3 comprising derived and/or modified sequence from HRSV(A2)__F_DSCav1_mut8 (opt3)
gggagacccgugacccggaaguuguacggcuacgcgacuuucccucccacaaacccucgcgcccuuccuuuccuacuugggcccggcagaaagcuuaccauggagcugcucauccuuaaggccaacgcuauuaccacaauacugacugcagugacguucugcuuugccagcggccagaauaucaccgaagaguucuaccaauccacauguucugcggucucaaaaggguauuugggagcuuuaagaacugguugguacaccaguguuauuacaaucgaacugagcaacauuaaggagaucaaaugcaauggcaccgacgccaaggugaaacuaauaaagcaggaacucgauaaguauaaaaacgcaguaacugaccugcagcuucugaugcaguccacacccgccaccgggucuggaucggcuaucgcaucaggcguggccgucuguaagguguugcaccucgagggugagguuaauaaaauuaagagcgcucugcugaguacgaacaaagccguggucucccucucugggugcggagugagcguauuaacuuuuaagguucuggaucuuaagaauuacaucgacaaacaauugcugccuauucuaaacaagcaguccuguucaaucccaaauauagaaaccgugauugaguuccagcagaaaaacaauaggcuccuggaaaucacacgggaguuuagugucaacgcgggcgugacuaccccggugagcacauauaugcuuaccaauucugagcuguugucccucauuaacgauaugcccaucacgaaugaccaaaagaaacugaugucaaacaacguccagaucguucgccagcagagcuacaguauuaugugcauaaucaaggaagagguguuagcauauguagugcaacugccucucuacggcgucauugauacuccauguuggaaacuucauacaucuccccugugcaccacuaauacaaaggaaggguccaacaucuguuugacccgaacggaccguggaugguacugcgauaaugccgguagcgugucguucuuuccucaggcugagaccuguaagguucagucuaacagaguguucugcgacacaaugaacucccuaacucugccaucagaagucaaucucugcaauguggauauauuuaaccccaaauaugacuguaagauuaugaccaguaaaacagauguaagcuccucuguuaucacuagccugggcgccaucgugucaugcuacgggaagaccaaauguacagcaaguaauaagugcaggggaauuaucaagaccuucuccaacggcugugacuaugucagcaauaaagguguggacacugucucuguggggaacacgcuuuacuauguuaauaagcaagagggacagucacuguacgugaaaggcgagccuauuauaaacuuuuaugauccauugguauucccgagugacgaauuugaugcuagcaucucccaggucaaugagaagauuaaccagucucucgccuucauccggaaaucggacgaacuguuacacaacgugaaugcgggcaagagcacaaccaacaucaugauuacuaccauaaucauuguuaucauugugauccugcuaucccucauagccgucgggcugcuuuuguacugcaaggcacgcucaacacccgugacccugaguaaagaucaacucucuggaaucaauaacauugcuuucagcaauugaggacuaguggaagcauuuuccuggcugauuaaaagaaauuacucagcuauggucaucuguuccuguuagaaggcuaugcagcauauuauauacuaugcgcauguuaugaaaugcauaauaaaaaauuuuaaaaaaucuaaaagaucuaaaaaaaaaaaaaaaaaaaaaaaaaaaaaaaaaaaaaaaaaaaaaaaaaaaaaaaaaaaaaaaaugcaucccccccccccccccccccccccccccccccaaaggcucuuuucagagccaccagaauu

SEQ ID NO: 7857 - RNA, 1985 nt, Artificial Sequence
  mRNA product Design h-3 comprising derived and/or modified sequence from HRSV(A2)__F_DSCav1_mut8 (opt4)
gggagacccgugacccggaaguuguacggcuacgcgacuuucccucccacaaacccucgcgcccuuccuuuccuacuugggcccggcagaaagcuuaccauggagcugcugauccugaaggccaacgccaucaccaccauccugaccgccgugaccuucugcuucgccagcggccagaacaucaccgaggaguucuaccagagcaccugcagcgccgugagcaagggcuaccugggcgcccugagaaccggcugguacaccagcgugaucaccaucgagcugagcaacaucaaggagaucaagugcaacggcaccgacgccaaggugaagcugaucaagcaggagcuggacaaguacaagaacgccgugaccgaccugcagcugcugaugcagagcacccccgccaccggcagcggcagcgccaucgccagcggcguggccgugugcaaggugcugcaccuggagggcgaggugaacaagaucaagagcgcccugcugagcaccaacaaggccguggugagccugagcggcugcggcgugagcgugcugaccuucaaggugcuggaccugaagaacuacaucgacaagcagcugcugcccauccugaacaagcagagcugcagcauccccaacaucgagaccgugaucgaguuccagcagaagaacaacagacugcuggagaucaccagagaguucagcgugaacgccggcgugaccacccccgugagcaccuacaugcugaccaacagcgagcugcugagccugaucaacgacaugcccaucaccaacgaccagaagaagcugaugagcaacaacgugcagaucgugagacagcagagcuacagcaucaugugcaucaucaaggaggaggugcuggccuacguggugcagcugccccuguacggcgugaucgacacccccugcuggaagcugcacaccagcccccugugcaccaccaacaccaaggagggcagcaacaucugccugaccagaaccgacagaggcugguacugcgacaacgccggcagcgugagcuucuucccccaggccgagaccugcaaggugcagagcaacagaguguucugcgacaccaugaacagccugacccugcccagcgaggugaaccugugcaacguggacaucuucaaccccaaguacgacugcaagaucaugaccagcaagaccgacgugagcagcagcgugaucaccagccugggcgccaucgugagcugcuacggcaagaccaagugcaccgccagcaacaagugcagaggcaucaucaagaccuucagcaacggcugcgacuacgugagcaacaagggcguggacaccgugagcgugggcaacacccuguacuacgugaacaagcaggagggccagagccuguacgugaagggcgagcccaucaucaacuucuacgacccccugguguuccccagcgacgaguucgacgccagcaucagccaggugaacgagaagaucaaccagagccuggccuucaucagaaagagcgacgagcugcugcacaacgugaacgccggcaagagcaccaccaacaucaugaucaccaccaucaucaucgugaucaucgugauccugcugagccugaucgccgugggccugcugcuguacugcaaggccagaagcacccccgugacccugagcaaggaccagcugagcggcaucaacaacaucgccuucagcaacugaggacuaguggaagcauuuuccuggcugauuaaaagaaauuacucagcuauggucaucuguuccuguuagaaggcuaugcagcauauuauauacuaugcgcauguuaugaaaugcauaauaaaaaauuuuaaaaaaucuaaaagaucuaaaaaaaaaaaaaaaaaaaaaaaaaaaaaaaaaaaaaaaaaaaaaaaaaaaaaaaaaaaaaaaaugcaucccccccccccccccccccccccccccccccaaaggcucuuuucagagccaccagaauu

SEQ ID NO: 7858 - RNA, 1985 nt, Artificial Sequence
  mRNA product Design h-3 comprising derived and/or modified sequence from HRSV(A2)__F_DSCav1_mut8 (opt5)
gggagacccgugacccggaaguuguacggcuacgcgacuuucccucccacaaacccucgcgcccuuccuuuccuacuugggcccggcagaaagcuuaccauggagcugcucauccugaaggccaacgcuauuaccacaauccuuacggccgugaccuucugcuuugcgagcggccagaauauuacagaagaguucuaccaauccaccuguucugcugucagcaaaggguaucugggagcccucagaacaggcugguacaccuccguuaucacaauugaacugucuaacaucaaggagaucaaaugcaaugggaccgacgccaaggugaaacuuauuaagcaggaacuggauaaguauaaaaacgcugugacggaccuccagcugcugaugcagagcacccccgccacaggauccggcucugcuaucgccagcggggucgcgguguguaagguucuccaccuggagggagaggugaauaaaauuaaguccgcccuucugagcaccaacaaagcugucgugucucucuccggcugcggcguuagcgugcugacauuuaagguccuugaucugaagaauuacaucgacaaacaacuccugccuauucugaacaagcagucuuguuccaucccgaauauugaaaccgugaucgaguuccagcagaaaaacaaucggcuccuggaaaucacgcgcgaguuuagcgugaacgccggggucacaacccccguuucuacauauaugcuuaccaauuccgagcugcucagccugauuaacgauaugccuaucaccaaugaccaaaagaaacuuauguccaacaacgugcagauugugagacagcagucuuacagcaucaugugcauuaucaaggaagagguccuggcuuaugugguucaacucccccuguacggagugaucgauacaccuuguuggaaacugcauacgagcccccucugcaccacaaauaccaaggaaggcagcaacauuugucugacacggaccgaccgcgggugguacugcgauaaugccggaucugucuccuucuuuccucaggcggagacguguaaggugcagagcaacagaguuuucugcgacacaaugaacucucuuacccugccgagcgaagugaaucucugcaaugucgauaucuuuaaccccaaauaugacuguaagauuaugaccuccaaaacagaugugucuagcuccgucaucaccagccugggcgccauugugucuugcuacgggaagacaaaauguacggcuuccaauaagugccggggaaucaucaagaccuucagcaacggcugugacuauguuucuaauaaaggcguggacacagucuccguggggaacacccuuuacuauguuaauaagcaagagggacagagccuguacgugaaaggcgagccuauuaucaacuuuuaugauccccucgucuucccuuccgacgaauuugaugccucuauuagccaggugaaugagaagaucaaccagucccuggcuuucauucgcaaaucugacgaacugcuccacaacgugaaugccgggaaguccacaaccaacaucaugauuacgaccaucaucauuguuaucauugucauccugcuuucccugauugccgugggacuccugcuguacugcaaggcuagaagcacacccgugacccuuucuaaagaucaacucuccggcaucaauaacaucgcguucagcaauugaggacuaguggaagcauuuuccuggcugauuaaaagaaauuacucagcuauggucaucuguuccuguuagaaggcuaugcagcauauuauauacuaugcgcauguuaugaaaugcauaauaaaaaauuuuaaaaaaucuaaaagaucuaaaaaaaaaaaaaaaaaaaaaaaaaaaaaaaaaaaaaaaaaaaaaaaaaaaaaaaaaaaaaaaaugcaucccccccccccccccccccccccccccccccaaaggcucuuuucagagccaccagaauu

SEQ ID NO: 7859 - RNA, 1985 nt, Artificial Sequence
  mRNA product Design h-3 comprising derived and/or modified sequence from HRSV(A2)__F_DSCav1_mut8 (opt6)
gggagacccgugacccggaaguuguacggcuacgcgacuuucccucccacaaacccucgcgcccuuccuuuccuacuugggcccggcagaaagcuuaccauggaacuauuaauauuaaaagcaaacgcaaucacaacuauacuaacagcaguaacauucugcuuugccucaggucaaaacauaacagaggaauuuuaccaauccacaugcucugcuguaagcaaaggauaccucggagcauuaagaacuggaugguacaccucaguaauaacuauagaacuaucaaacauaaaagaaauaaaauguaauggcacagacgcaaaagugaaauuaaucaaacaagaacucgauaaauacaaaaaugccguaaccgaucuccaacuuuuaaugcaaagcacacccgcaacagguuccgggucagcaauagcaagcggaguugcaguaugcaaaguacuacacuuagaaggagaaguaaauaaaaucaaaucagccuuacuaucaacaaauaaagcaguuguaucacucucaggaugcggaguauccguacuaacauuuaaaguacuagaucuaaaaaacuacauagauaaacaacucuuaccaauacuaaauaaacaaucauguuccauacccaacauagaaaccguuaucgaauuucaacaaaaaaacaacagauuacuagaaaucacacgagaauuuucaguaaaugcuggagucacaacaccaguuaguacauacaugcucaccaauucagaacuacuaaguuuaauuaacgauaugccaauaacaaacgaccaaaaaaaacuaaugucaaauaacguacaaauaguaagacaacaaucauacucaaucaugugcauaauaaaagaagaaguacuagccuauguaguccaauuaccacucuacggcguaaucgacaccccaugcuggaaauuacacacaagcccauuaugcaccaccaacacaaaagaagguucaaacauuugcuuaaccagaaccgaucgaggaugguacugcgauaacgcaggaucugucuccuuuuucccacaagccgaaacaugcaaaguucaaucaaaccgaguuuucugugacacuaugaacucacucacacuuccaagcgaaguaaaccuaugcaacguagauauauuuaacccuaaauacgacugcaaaauaaugacaagcaaaacagacguuaguucaucaguaauuacaagucuaggcgcaauagugucaugcuacggaaaaacaaaaugcaccgcauccaauaaaugccgaggaaucauuaaaacauucucaaacggaugcgacuacgucagcaauaaaggaguagacacuguuucuguaggaaacacccuauacuauguaaacaaacaagaaggucaaucacuauacguaaagggagaaccaauuauaaauuuuuacgaccccuuaguauuuccaagugaugaauuugacgcaucuauaagucaaguuaacgaaaaaauuaaccaaucacuugcauuuauaagaaaaucagacgaacuacuccauaauguaaacgcagguaaaucaacaacaaacaucaugaucacaaccauaauaauaguaauaauuguaauauuacuaucacuaauagcaguaggauuacuacucuacugcaaagcuagaucuaccccggucacacucucaaaagaccaauuaucuggaauaaacaauauagcauucagcaacuaaggacuaguggaagcauuuuccuggcugauuaaaagaaauuacucagcuauggucaucuguuccuguuagaaggcuaugcagcauauuauauacuaugcgcauguuaugaaaugcauaauaaaaaauuuuaaaaaaucuaaaagaucuaaaaaaaaaaaaaaaaaaaaaaaaaaaaaaaaaaaaaaaaaaaaaaaaaaaaaaaaaaaaaaaaugcaucccccccccccccccccccccccccccccccaaaggcucuuuucagagccaccagaauu

SEQ ID NO: 7860 - RNA, 1985 nt, Artificial Sequence
  mRNA product Design h-3 comprising derived and/or modified sequence from HRSV(A2)__F_DSCav1_mut8 (opt11)
gggagacccgugacccggaaguuguacggcuacgcgacuuucccucccacaaacccucgcgcccuuccuuuccuacuugggcccggcagaaagcuuaccauggaacuccucauccuuaaagccaacgccauaaccaccauccucaccgccgucaccuucugcuucgcuucuggccaaaacauaaccgaagaguucuaccaauccacgugcucugccgugucaaaaggcuaccucggagcccuccgcacagggugguacacuuccgucaucaccaucgaacucucuaacaucaaagaaaucaagugcaacggcacagacgcgaaagucaagcucaucaaacaagaacuagacaaauacaaaaacgccguaacagaccuccaacuccuaaugcaguccacaccagccacaggcuccggcagcgccaucgccuccggcgucgcugucugcaaaguccuacaccucgaaggcgaagucaacaaaaucaagucagcccuccuuagcaccaacaaagcagucgucucuuuaagcgggugcggagucucuguccuaaccuuuaaaguacucgaccucaaaaacuacaucgacaaacaacuacuaccaauacuaaacaaacagagcugcuccauucccaacaucgaaaccguuaucgaguuccaacaaaagaacaaccgccuccucgaaaucacccgcgaguucuccgucaacgcaggcgucaccaccccagucuccaccuauaugcuaaccaacagcgaacuccucagccucaucaaugacaugccaaucaccaacgaccaaaagaaacucauguccaacaacguacagauaguccgccagcaguccuacagcaucaugugcaucaucaaagaagaagugcucgccuacgugguacaacucccucucuacggagucauugauacacccugcuggaaacuccacacaagcccccucugcacuacaaacaccaaagaaggcucuaacauaugccucacccgcacagaccgugguugguacugcgacaacgccggcuccguauccuucuuuccacaagcugaaaccugcaaaguucaaucaaaccgagucuucugcgacaccaugaacucccucacauugcccagcgaagucaaccucugcaacgucgacaucuucaaccccaaguacgacugcaaaaucaugaccuccaaaaccgacgucagcuccagcgugaucacaagccuaggcgcgaucgucagcugcuacggcaaaaccaaaugcacagccuccaacaaaugccgcggaaucauaaaaacauucaguaacggcugcgacuacguguccaauaaaggagucgacaccguauccgucggaaacacccucuacuacgucaacaaacaagaaggacaaucccucuaugucaaaggcgaacccauuaucaacuucuacgacccccuaguuuuccccuccgacgaguucgacgcaagcauuucccaagucaacgaaaagaucaaucaaucccucgccuucauacgcaaaagcgacgaacuacuacacaacguaaacgccggcaaaagcaccaccaacaucaugaucacaacaaucaucaucgucaucaucgucauccuacucucacucaucgccguuggccuacuacucuacugcaaagcccgcuccacacccgucacccucucaaaagaccaacucuccggcaucaacaacaucgcauucagcaacugaggacuaguggaagcauuuuccuggcugauuaaaagaaauuacucagcuauggucaucuguuccuguuagaaggcuaugcagcauauuauauacuaugcgcauguuaugaaaugcauaauaaaaaauuuuaaaaaaucuaaaagaucuaaaaaaaaaaaaaaaaaaaaaaaaaaaaaaaaaaaaaaaaaaaaaaaaaaaaaaaaaaaaaaaaugcaucccccccccccccccccccccccccccccccaaaggcucuuuucagagccaccagaauu

SEQ ID NO: 7861 - RNA, 2048 nt, Artificial Sequence
  mRNA product Design h-4 comprising derived and/or modified sequence from HRSV(A2)__F_DSCav1_mut8 (opt1)
gggagagggcgcuuggcuugcaaggacccugagcugcggcauugaagcacacccaacccaacucgacugaagucagccucacugaaccggaucugagaaucuucucucucugggcuugccagggcucuccgaaccuagcuagcauccucuucaauuccaacuagaaagcuuaccauggagcugcucauccugaaggccaacgccaucaccaccauccugacggcggugaccuucugcuucgccagcggccagaacaucaccgaggaguucuaccaguccacgugcagcgccgucuccaagggguaccucggcgcccugcggaccggcugguacaccuccgugaucaccaucgagcugagcaacaucaaggagaucaagugcaacgggaccgacgccaaggugaagcucaucaagcaggagcuggacaaguacaagaacgcggucacggaccugcagcuccugaugcaguccaccccggcaaccggcuccggcuccgccaucgcgagcggcgucgccgugugcaaggugcugcaccucgagggggaggucaacaagaucaagagcgcccugcuguccaccaacaaggccguggugagccucuccggcugcggcgucagcgugcugaccuucaaggugcuggaccucaagaacuacaucgacaagcagcugcugcccauccugaacaagcagagcugcuccauccccaacaucgagacggugaucgaguuccagcagaagaacaaccggcuccuggagaucacccgcgaguucagcgugaacgccggggucaccacccccguguccacguacaugcugaccaacagcgagcuccugucccugaucaacgacaugccgaucaccaacgaccagaagaagcucaugagcaacaacgugcagaucguccggcagcaguccuacagcaucaugugcaucaucaaggaggaggugcuggcguacgugguccagcugccccucuacggcgugaucgacacccccugcuggaagcugcacacgagcccccugugcaccaccaacaccaaggagggguccaacaucugccucacgcgcaccgaccggggcugguacugcgacaacgccggcagcgucuccuucuucccgcaggccgagaccugcaaggugcagagcaaccgcguguucugcgacaccaugaacucccugacgcugcccagcgagguaaaccucugcaacgucgacaucuucaaccccaaguacgacugcaagaucaugaccuccaagaccgacgugagcuccagcgugaucaccucccugggggccaucgucagcugcuacggcaagacgaagugcaccgccagcaacaagugccgggggaucaucaagaccuucuccaacggcugcgacuacgugagcaacaagggcguggacaccguguccgucgggaacacccuguacuacgugaacaagcaggagggccagagccucuacgugaagggggagcccaucaucaacuucuacgacccgcuggucuuccccuccgacgaguucgacgcgagcaucucccaggugaacgagaagaucaaccagagccuggccuucauccgcaaguccgacgagcugcuccacaacgugaacgccggcaagagcacgaccaacaucaugaucaccaccaucaucaucgucaucaucgugauccugcugucccucaucgccguggggcugcugcucuacugcaaggcccggagcacgcccgucacccuguccaaggaccagcugagcggcaucaacaacaucgcguucuccaacugaggacuaguaauaaggaaacuguaugaaugucugugggcaggaagugaagagauccuucuguaaagguuuuuggaauuaugucugcugaauaauaaacuuuuuugaaauaauaaaucugguagaaaaaugagaucuaaaaaaaaaaaaaaaaaaaaaaaaaaaaaaaaaaaaaaaaaaaaaaaaaaaaaaaaaaaaaaaaugcaucccccccccccccccccccccccccccccccaaaggcucuuuucagagccaccagaauu

SEQ ID NO: 7862 - RNA, 2048 nt, Artificial Sequence
  mRNA product Design h-4 comprising derived and/or modified sequence from HRSV(A2)__F_DSCav1_mut8 (opt1)
gggagagggcgcuuggcuugcaaggacccugagcugcggcauugaagcacacccaacccaacucgacugaagucagccucacugaaccggaucugagaaucuucucucucugggcuugccagggcucuccgaaccuagcuagcauccucuucaauuccaacuagaaagcuuaccauggagcugcucauccugaaggccaacgccaucaccaccauccugacggcggugaccuucugcuucgccagcggccagaacaucaccgaggaguucuaccaguccacgugcagcgccgucuccaagggguaccucggcgcccugcgcaccgggugguacaccagcgugaucaccaucgagcuguccaacaucaaggagaucaagugcaacggcaccgacgccaaggugaagcucaucaagcaggagcuggacaaguacaagaacgcggucacggaccugcagcuccugaugcagagcacccccgccaccggguccggcagcgccaucgccuccggcguggcggugugcaagguccugcaccucgagggggaggugaacaagaucaagagcgcccugcuguccaccaacaaggccguggucagccucuccggcugcggggugagcgugcugacguucaagguccuggaccucaagaacuacaucgacaagcagcugcugccgauccucaacaagcaguccugcagcauccccaacaucgagaccgugaucgaguuccagcagaagaacaaccggcugcuggagaucacccgcgaguucuccgugaacgccggcgucaccacgcccgugagcaccuacaugcucaccaacuccgagcugcugagccucaucaacgacaugcccaucaccaacgaccagaagaagcugaugagcaacaacgugcagaucguccggcagcaguccuacagcaucaugugcaucaucaaggaggaggugcuggccuacgugguccagcucccgcuguacggggugaucgacacgcccugcuggaagcugcacaccagcccccucugcaccaccaacacgaaggagggcuccaacaucugccugacccgcaccgaccggggcugguacugcgacaacgcgggguccgugagcuucuucccccaggccgagaccugcaagguccaguccaaccgcguguucugcgacacgaugaacagccugacccucccguccgaggucaaccugugcaacguggacaucuucaaccccaaguacgacugcaagaucaugaccagcaagaccgacguguccagcuccgucaucacgagccugggcgccaucguguccugcuacgggaagaccaagugcaccgccagcaacaagugccggggcaucaucaagaccuucuccaacggcugcgacuacgugagcaacaagggggucgacacgguguccgugggcaacacccucuacuacgucaacaagcaggaggggcagagccuguacgugaagggcgagcccaucaucaacuucuacgacccccugguguucccgagcgacgaguucgacgccuccaucagccaggucaacgagaagaucaaccagucccucgcguucauccgcaagagcgacgagcugcugcacaacgugaacgccgggaaguccaccaccaacaucaugaucaccacgaucaucaucgugaucaucgucauccuccugagccugaucgccgugggccuccugcuguacugcaaggcccgguccacccccgugacccugagcaaggaccagcucuccggcaucaacaacaucgccuucagcaacugaggacuaguaauaaggaaacuguaugaaugucugugggcaggaagugaagagauccuucuguaaagguuuuuggaauuaugucugcugaauaauaaacuuuuuugaaauaauaaaucugguagaaaaaugagaucuaaaaaaaaaaaaaaaaaaaaaaaaaaaaaaaaaaaaaaaaaaaaaaaaaaaaaaaaaaaaaaaaugcaucccccccccccccccccccccccccccccccaaaggcucuuuucagagccaccagaauu

SEQ ID NO: 7863 - RNA, 2048 nt, Artificial Sequence
  mRNA product Design h-4 comprising derived and/or modified sequence from HRSV(A2)__F_DSCav1_mut8 (opt2)
gggagagggcgcuuggcuugcaaggacccugagcugcggcauugaagcacacccaacccaacucgacugaagucagccucacugaaccggaucugagaaucuucucucucugggcuugccagggcucuccgaaccuagcuagcauccucuucaauuccaacuagaaagcuuaccauggagcuccucauccucaaggccaacgccaucaccaccauccucaccgccgucaccuucugcuucgccuccggccagaacaucaccgaggaguucuaccaguccaccugcuccgccgucuccaagggcuaccucggcgcccuccgcaccggcugguacaccuccgucaucaccaucgagcucuccaacaucaaggagaucaagugcaacggcaccgacgccaaggucaagcucaucaagcaggagcucgacaaguacaagaacgccgucaccgaccuccagcuccucaugcaguccacccccgccaccggcuccggcuccgccaucgccuccggcgucgccgucugcaagguccuccaccucgagggcgaggucaacaagaucaaguccgcccuccucuccaccaacaaggccgucgucucccucuccggcugcggcgucuccguccucaccuucaagguccucgaccucaagaacuacaucgacaagcagcuccuccccauccucaacaagcaguccugcuccauccccaacaucgagaccgucaucgaguuccagcagaagaacaaccgccuccucgagaucacccgcgaguucuccgucaacgccggcgucaccacccccgucuccaccuacaugcucaccaacuccgagcuccucucccucaucaacgacaugcccaucaccaacgaccagaagaagcucauguccaacaacguccagaucguccgccagcaguccuacuccaucaugugcaucaucaaggaggagguccucgccuacgucguccagcucccccucuacggcgucaucgacacccccugcuggaagcuccacaccuccccccucugcaccaccaacaccaaggagggcuccaacaucugccucacccgcaccgaccgcggcugguacugcgacaacgccggcuccgucuccuucuucccccaggccgagaccugcaagguccaguccaaccgcgucuucugcgacaccaugaacucccucacccuccccuccgaggucaaccucugcaacgucgacaucuucaaccccaaguacgacugcaagaucaugaccuccaagaccgacgucuccuccuccgucaucaccucccucggcgccaucgucuccugcuacggcaagaccaagugcaccgccuccaacaagugccgcggcaucaucaagaccuucuccaacggcugcgacuacgucuccaacaagggcgucgacaccgucuccgucggcaacacccucuacuacgucaacaagcaggagggccagucccucuacgucaagggcgagcccaucaucaacuucuacgacccccucgucuuccccuccgacgaguucgacgccuccaucucccaggucaacgagaagaucaaccagucccucgccuucauccgcaaguccgacgagcuccuccacaacgucaacgccggcaaguccaccaccaacaucaugaucaccaccaucaucaucgucaucaucgucauccuccucucccucaucgccgucggccuccuccucuacugcaaggcccgcuccacccccgucacccucuccaaggaccagcucuccggcaucaacaacaucgccuucuccaacugaggacuaguaauaaggaaacuguaugaaugucugugggcaggaagugaagagauccuucuguaaagguuuuuggaauuaugucugcugaauaauaaacuuuuuugaaauaauaaaucugguagaaaaaugagaucuaaaaaaaaaaaaaaaaaaaaaaaaaaaaaaaaaaaaaaaaaaaaaaaaaaaaaaaaaaaaaaaaugcaucccccccccccccccccccccccccccccccaaaggcucuuuucagagccaccagaauu

SEQ ID NO: 7864 - RNA, 2048 nt, Artificial Sequence
  mRNA product Design h-4 comprising derived and/or modified sequence from HRSV(A2)__F_DSCav1_mut8 (opt3)
gggagagggcgcuuggcuugcaaggacccugagcugcggcauugaagcacacccaacccaacucgacugaagucagccucacugaaccggaucugagaaucuucucucucugggcuugccagggcucuccgaaccuagcuagcauccucuucaauuccaacuagaaagcuuaccauggagcugcucauccuuaaggccaacgcuauuaccacaauacugacugcagugacguucugcuuugccagcggccagaauaucaccgaagaguucuaccaauccacauguucugcggucucaaaaggguauuugggagcuuuaagaacugguugguacaccaguguuauuacaaucgaacugagcaacauuaaggagaucaaaugcaauggcaccgacgccaaggugaaacuaauaaagcaggaacucgauaaguauaaaaacgcaguaacugaccugcagcuucugaugcaguccacacccgccaccgggucuggaucggcuaucgcaucaggcguggccgucuguaagguguugcaccucgagggugagguuaauaaaauuaagagcgcucugcugaguacgaacaaagccguggucucccucucugggugcggagugagcguauuaacuuuuaagguucuggaucuuaagaauuacaucgacaaacaauugcugccuauucuaaacaagcaguccuguucaaucccaaauauagaaaccgugauugaguuccagcagaaaaacaauaggcuccuggaaaucacacgggaguuuagugucaacgcgggcgugacuaccccggugagcacauauaugcuuaccaauucugagcuguugucccucauuaacgauaugcccaucacgaaugaccaaaagaaacugaugucaaacaacguccagaucguucgccagcagagcuacaguauuaugugcauaaucaaggaagagguguuagcauauguagugcaacugccucucuacggcgucauugauacuccauguuggaaacuucauacaucuccccugugcaccacuaauacaaaggaaggguccaacaucuguuugacccgaacggaccguggaugguacugcgauaaugccgguagcgugucguucuuuccucaggcugagaccuguaagguucagucuaacagaguguucugcgacacaaugaacucccuaacucugccaucagaagucaaucucugcaauguggauauauuuaaccccaaauaugacuguaagauuaugaccaguaaaacagauguaagcuccucuguuaucacuagccugggcgccaucgugucaugcuacgggaagaccaaauguacagcaaguaauaagugcaggggaauuaucaagaccuucuccaacggcugugacuaugucagcaauaaagguguggacacugucucuguggggaacacgcuuuacuauguuaauaagcaagagggacagucacuguacgugaaaggcgagccuauuauaaacuuuuaugauccauugguauucccgagugacgaauuugaugcuagcaucucccaggucaaugagaagauuaaccagucucucgccuucauccggaaaucggacgaacuguuacacaacgugaaugcgggcaagagcacaaccaacaucaugauuacuaccauaaucauuguuaucauugugauccugcuaucccucauagccgucgggcugcuuuuguacugcaaggcacgcucaacacccgugacccugaguaaagaucaacucucuggaaucaauaacauugcuuucagcaauugaggacuaguaauaaggaaacuguaugaaugucugugggcaggaagugaagagauccuucuguaaagguuuuuggaauuaugucugcugaauaauaaacuuuuuugaaauaauaaaucugguagaaaaaugagaucuaaaaaaaaaaaaaaaaaaaaaaaaaaaaaaaaaaaaaaaaaaaaaaaaaaaaaaaaaaaaaaaaugcaucccccccccccccccccccccccccccccccaaaggcucuuuucagagccaccagaauu

SEQ ID NO: 7865 - RNA, 2048 nt, Artificial Sequence
  mRNA product Design h-4 comprising derived and/or modified sequence from HRSV(A2)__F_DSCav1_mut8 (opt4)
gggagagggcgcuuggcuugcaaggacccugagcugcggcauugaagcacacccaacccaacucgacugaagucagccucacugaaccggaucugagaaucuucucucucugggcuugccagggcucuccgaaccuagcuagcauccucuucaauuccaacuagaaagcuuaccauggagcugcugauccugaaggccaacgccaucaccaccauccugaccgccgugaccuucugcuucgccagcggccagaacaucaccgaggaguucuaccagagcaccugcagcgccgugagcaagggcuaccugggcgcccugagaaccggcugguacaccagcgugaucaccaucgagcugagcaacaucaaggagaucaagugcaacggcaccgacgccaaggugaagcugaucaagcaggagcuggacaaguacaagaacgccgugaccgaccugcagcugcugaugcagagcacccccgccaccggcagcggcagcgccaucgccagcggcguggccgugugcaaggugcugcaccuggagggcgaggugaacaagaucaagagcgcccugcugagcaccaacaaggccguggugagccugagcggcugcggcgugagcgugcugaccuucaaggugcuggaccugaagaacuacaucgacaagcagcugcugcccauccugaacaagcagagcugcagcauccccaacaucgagaccgugaucgaguuccagcagaagaacaacagacugcuggagaucaccagagaguucagcgugaacgccggcgugaccacccccgugagcaccuacaugcugaccaacagcgagcugcugagccugaucaacgacaugcccaucaccaacgaccagaagaagcugaugagcaacaacgugcagaucgugagacagcagagcuacagcaucaugugcaucaucaaggaggaggugcuggccuacguggugcagcugccccuguacggcgugaucgacacccccugcuggaagcugcacaccagcccccugugcaccaccaacaccaaggagggcagcaacaucugccugaccagaaccgacagaggcugguacugcgacaacgccggcagcgugagcuucuucccccaggccgagaccugcaaggugcagagcaacagaguguucugcgacaccaugaacagccugacccugcccagcgaggugaaccugugcaacguggacaucuucaaccccaaguacgacugcaagaucaugaccagcaagaccgacgugagcagcagcgugaucaccagccugggcgccaucgugagcugcuacggcaagaccaagugcaccgccagcaacaagugcagaggcaucaucaagaccuucagcaacggcugcgacuacgugagcaacaagggcguggacaccgugagcgugggcaacacccuguacuacgugaacaagcaggagggccagagccuguacgugaagggcgagcccaucaucaacuucuacgacccccugguguuccccagcgacgaguucgacgccagcaucagccaggugaacgagaagaucaaccagagccuggccuucaucagaaagagcgacgagcugcugcacaacgugaacgccggcaagagcaccaccaacaucaugaucaccaccaucaucaucgugaucaucgugauccugcugagccugaucgccgugggccugcugcuguacugcaaggccagaagcacccccgugacccugagcaaggaccagcugagcggcaucaacaacaucgccuucagcaacugaggacuaguaauaaggaaacuguaugaaugucugugggcaggaagugaagagauccuucuguaaagguuuuuggaauuaugucugcugaauaauaaacuuuuuugaaauaauaaaucugguagaaaaaugagaucuaaaaaaaaaaaaaaaaaaaaaaaaaaaaaaaaaaaaaaaaaaaaaaaaaaaaaaaaaaaaaaaaugcaucccccccccccccccccccccccccccccccaaaggcucuuuucagagccaccagaauu

SEQ ID NO: 7866 - RNA, 2048 nt, Artificial Sequence
  mRNA product Design h-4 comprising derived and/or modified sequence from HRSV(A2)__F_DSCav1_mut8 (opt5)
gggagagggcgcuuggcuugcaaggacccugagcugcggcauugaagcacacccaacccaacucgacugaagucagccucacugaaccggaucugagaaucuucucucucugggcuugccagggcucuccgaaccuagcuagcauccucuucaauuccaacuagaaagcuuaccauggagcugcucauccugaaggccaacgcuauuaccacaauccuuacggccgugaccuucugcuuugcgagcggccagaauauuacagaagaguucuaccaauccaccuguucugcugucagcaaaggguaucugggagcccucagaacaggcugguacaccuccguuaucacaauugaacugucuaacaucaaggagaucaaaugcaaugggaccgacgccaaggugaaacuuauuaagcaggaacuggauaaguauaaaaacgcugugacggaccuccagcugcugaugcagagcacccccgccacaggauccggcucugcuaucgccagcggggucgcgguguguaagguucuccaccuggagggagaggugaauaaaauuaaguccgcccuucugagcaccaacaaagcugucgugucucucuccggcugcggcguuagcgugcugacauuuaagguccuugaucugaagaauuacaucgacaaacaacuccugccuauucugaacaagcagucuuguuccaucccgaauauugaaaccgugaucgaguuccagcagaaaaacaaucggcuccuggaaaucacgcgcgaguuuagcgugaacgccggggucacaacccccguuucuacauauaugcuuaccaauuccgagcugcucagccugauuaacgauaugccuaucaccaaugaccaaaagaaacuuauguccaacaacgugcagauugugagacagcagucuuacagcaucaugugcauuaucaaggaagagguccuggcuuaugugguucaacucccccuguacggagugaucgauacaccuuguuggaaacugcauacgagcccccucugcaccacaaauaccaaggaaggcagcaacauuugucugacacggaccgaccgcgggugguacugcgauaaugccggaucugucuccuucuuuccucaggcggagacguguaaggugcagagcaacagaguuuucugcgacacaaugaacucucuuacccugccgagcgaagugaaucucugcaaugucgauaucuuuaaccccaaauaugacuguaagauuaugaccuccaaaacagaugugucuagcuccgucaucaccagccugggcgccauugugucuugcuacgggaagacaaaauguacggcuuccaauaagugccggggaaucaucaagaccuucagcaacggcugugacuauguuucuaauaaaggcguggacacagucuccguggggaacacccuuuacuauguuaauaagcaagagggacagagccuguacgugaaaggcgagccuauuaucaacuuuuaugauccccucgucuucccuuccgacgaauuugaugccucuauuagccaggugaaugagaagaucaaccagucccuggcuuucauucgcaaaucugacgaacugcuccacaacgugaaugccgggaaguccacaaccaacaucaugauuacgaccaucaucauuguuaucauugucauccugcuuucccugauugccgugggacuccugcuguacugcaaggcuagaagcacacccgugacccuuucuaaagaucaacucuccggcaucaauaacaucgcguucagcaauugaggacuaguaauaaggaaacuguaugaaugucugugggcaggaagugaagagauccuucuguaaagguuuuuggaauuaugucugcugaauaauaaacuuuuuugaaauaauaaaucugguagaaaaaugagaucuaaaaaaaaaaaaaaaaaaaaaaaaaaaaaaaaaaaaaaaaaaaaaaaaaaaaaaaaaaaaaaaaugcaucccccccccccccccccccccccccccccccaaaggcucuuuucagagccaccagaauu

SEQ ID NO: 7867 - RNA, 2048 nt, Artificial Sequence
  mRNA product Design h-4 comprising derived and/or modified sequence from HRSV(A2)__F_DSCav1_mut8 (opt6)
gggagagggcgcuuggcuugcaaggacccugagcugcggcauugaagcacacccaacccaacucgacugaagucagccucacugaaccggaucugagaaucuucucucucugggcuugccagggcucuccgaaccuagcuagcauccucuucaauuccaacuagaaagcuuaccauggaacuauuaauauuaaaagcaaacgcaaucacaacuauacuaacagcaguaacauucugcuuugccucaggucaaaacauaacagaggaauuuuaccaauccacaugcucugcuguaagcaaaggauaccucggagcauuaagaacuggaugguacaccucaguaauaacuauagaacuaucaaacauaaaagaaauaaaauguaauggcacagacgcaaaagugaaauuaaucaaacaagaacucgauaaauacaaaaaugccguaaccgaucuccaacuuuuaaugcaaagcacacccgcaacagguuccgggucagcaauagcaagcggaguugcaguaugcaaaguacuacacuuagaaggagaaguaaauaaaaucaaaucagccuuacuaucaacaaauaaagcaguuguaucacucucaggaugcggaguauccguacuaacauuuaaaguacuagaucuaaaaaacuacauagauaaacaacucuuaccaauacuaaauaaacaaucauguuccauacccaacauagaaaccguuaucgaauuucaacaaaaaaacaacagauuacuagaaaucacacgagaauuuucaguaaaugcuggagucacaacaccaguuaguacauacaugcucaccaauucagaacuacuaaguuuaauuaacgauaugccaauaacaaacgaccaaaaaaaacuaaugucaaauaacguacaaauaguaagacaacaaucauacucaaucaugugcauaauaaaagaagaaguacuagccuauguaguccaauuaccacucuacggcguaaucgacaccccaugcuggaaauuacacacaagcccauuaugcaccaccaacacaaaagaagguucaaacauuugcuuaaccagaaccgaucgaggaugguacugcgauaacgcaggaucugucuccuuuuucccacaagccgaaacaugcaaaguucaaucaaaccgaguuuucugugacacuaugaacucacucacacuuccaagcgaaguaaaccuaugcaacguagauauauuuaacccuaaauacgacugcaaaauaaugacaagcaaaacagacguuaguucaucaguaauuacaagucuaggcgcaauagugucaugcuacggaaaaacaaaaugcaccgcauccaauaaaugccgaggaaucauuaaaacauucucaaacggaugcgacuacgucagcaauaaaggaguagacacuguuucuguaggaaacacccuauacuauguaaacaaacaagaaggucaaucacuauacguaaagggagaaccaauuauaaauuuuuacgaccccuuaguauuuccaagugaugaauuugacgcaucuauaagucaaguuaacgaaaaaauuaaccaaucacuugcauuuauaagaaaaucagacgaacuacuccauaauguaaacgcagguaaaucaacaacaaacaucaugaucacaaccauaauaauaguaauaauuguaauauuacuaucacuaauagcaguaggauuacuacucuacugcaaagcuagaucuaccccggucacacucucaaaagaccaauuaucuggaauaaacaauauagcauucagcaacuaaggacuaguaauaaggaaacuguaugaaugucugugggcaggaagugaagagauccuucuguaaagguuuuuggaauuaugucugcugaauaauaaacuuuuuugaaauaauaaaucugguagaaaaaugagaucuaaaaaaaaaaaaaaaaaaaaaaaaaaaaaaaaaaaaaaaaaaaaaaaaaaaaaaaaaaaaaaaaugcaucccccccccccccccccccccccccccccccaaaggcucuuuucagagccaccagaauu

SEQ ID NO: 7868 - RNA, 2048 nt, Artificial Sequence
  mRNA product Design h-4 comprising derived and/or modified sequence from HRSV(A2)__F_DSCav1_mut8 (opt11)
gggagagggcgcuuggcuugcaaggacccugagcugcggcauugaagcacacccaacccaacucgacugaagucagccucacugaaccggaucugagaaucuucucucucugggcuugccagggcucuccgaaccuagcuagcauccucuucaauuccaacuagaaagcuuaccauggaacuccucauccuuaaagccaacgccauaaccaccauccucaccgccgucaccuucugcuucgcuucuggccaaaacauaaccgaagaguucuaccaauccacgugcucugccgugucaaaaggcuaccucggagcccuccgcacagggugguacacuuccgucaucaccaucgaacucucuaacaucaaagaaaucaagugcaacggcacagacgcgaaagucaagcucaucaaacaagaacuagacaaauacaaaaacgccguaacagaccuccaacuccuaaugcaguccacaccagccacaggcuccggcagcgccaucgccuccggcgucgcugucugcaaaguccuacaccucgaaggcgaagucaacaaaaucaagucagcccuccuuagcaccaacaaagcagucgucucuuuaagcgggugcggagucucuguccuaaccuuuaaaguacucgaccucaaaaacuacaucgacaaacaacuacuaccaauacuaaacaaacagagcugcuccauucccaacaucgaaaccguuaucgaguuccaacaaaagaacaaccgccuccucgaaaucacccgcgaguucuccgucaacgcaggcgucaccaccccagucuccaccuauaugcuaaccaacagcgaacuccucagccucaucaaugacaugccaaucaccaacgaccaaaagaaacucauguccaacaacguacagauaguccgccagcaguccuacagcaucaugugcaucaucaaagaagaagugcucgccuacgugguacaacucccucucuacggagucauugauacacccugcuggaaacuccacacaagcccccucugcacuacaaacaccaaagaaggcucuaacauaugccucacccgcacagaccgugguugguacugcgacaacgccggcuccguauccuucuuuccacaagcugaaaccugcaaaguucaaucaaaccgagucuucugcgacaccaugaacucccucacauugcccagcgaagucaaccucugcaacgucgacaucuucaaccccaaguacgacugcaaaaucaugaccuccaaaaccgacgucagcuccagcgugaucacaagccuaggcgcgaucgucagcugcuacggcaaaaccaaaugcacagccuccaacaaaugccgcggaaucauaaaaacauucaguaacggcugcgacuacguguccaauaaaggagucgacaccguauccgucggaaacacccucuacuacgucaacaaacaagaaggacaaucccucuaugucaaaggcgaacccauuaucaacuucuacgacccccuaguuuuccccuccgacgaguucgacgcaagcauuucccaagucaacgaaaagaucaaucaaucccucgccuucauacgcaaaagcgacgaacuacuacacaacguaaacgccggcaaaagcaccaccaacaucaugaucacaacaaucaucaucgucaucaucgucauccuacucucacucaucgccguuggccuacuacucuacugcaaagcccgcuccacacccgucacccucucaaaagaccaacucuccggcaucaacaacaucgcauucagcaacugaggacuaguaauaaggaaacuguaugaaugucugugggcaggaagugaagagauccuucuguaaagguuuuuggaauuaugucugcugaauaauaaacuuuuuugaaauaauaaaucugguagaaaaaugagaucuaaaaaaaaaaaaaaaaaaaaaaaaaaaaaaaaaaaaaaaaaaaaaaaaaaaaaaaaaaaaaaaaugcaucccccccccccccccccccccccccccccccaaaggcucuuuucagagccaccagaauu

SEQ ID NO: 7869 - RNA, 2064 nt, Artificial Sequence
  mRNA product Design h-5 comprising derived and/or modified sequence from HRSV(A2)__F_DSCav1_mut8 (opt1)
gggagagggcgcuuggcuugcaaggacccugagcugcggcauugaagcacacccaacccaacucgacugaagucagccucacugaaccggaucugagaaucuucucucucugggcuugccagggcucuccgaaccuagcuagcauccucuucaauuccaacuagaaagcuuaccauggagcugcucauccugaaggccaacgccaucaccaccauccugacggcggugaccuucugcuucgccagcggccagaacaucaccgaggaguucuaccaguccacgugcagcgccgucuccaagggguaccucggcgcccugcggaccggcugguacaccuccgugaucaccaucgagcugagcaacaucaaggagaucaagugcaacgggaccgacgccaaggugaagcucaucaagcaggagcuggacaaguacaagaacgcggucacggaccugcagcuccugaugcaguccaccccggcaaccggcuccggcuccgccaucgcgagcggcgucgccgugugcaaggugcugcaccucgagggggaggucaacaagaucaagagcgcccugcuguccaccaacaaggccguggugagccucuccggcugcggcgucagcgugcugaccuucaaggugcuggaccucaagaacuacaucgacaagcagcugcugcccauccugaacaagcagagcugcuccauccccaacaucgagacggugaucgaguuccagcagaagaacaaccggcuccuggagaucacccgcgaguucagcgugaacgccggggucaccacccccguguccacguacaugcugaccaacagcgagcuccugucccugaucaacgacaugccgaucaccaacgaccagaagaagcucaugagcaacaacgugcagaucguccggcagcaguccuacagcaucaugugcaucaucaaggaggaggugcuggcguacgugguccagcugccccucuacggcgugaucgacacccccugcuggaagcugcacacgagcccccugugcaccaccaacaccaaggagggguccaacaucugccucacgcgcaccgaccggggcugguacugcgacaacgccggcagcgucuccuucuucccgcaggccgagaccugcaaggugcagagcaaccgcguguucugcgacaccaugaacucccugacgcugcccagcgagguaaaccucugcaacgucgacaucuucaaccccaaguacgacugcaagaucaugaccuccaagaccgacgugagcuccagcgugaucaccucccugggggccaucgucagcugcuacggcaagacgaagugcaccgccagcaacaagugccgggggaucaucaagaccuucuccaacggcugcgacuacgugagcaacaagggcguggacaccguguccgucgggaacacccuguacuacgugaacaagcaggagggccagagccucuacgugaagggggagcccaucaucaacuucuacgacccgcuggucuuccccuccgacgaguucgacgcgagcaucucccaggugaacgagaagaucaaccagagccuggccuucauccgcaaguccgacgagcugcuccacaacgugaacgccggcaagagcacgaccaacaucaugaucaccaccaucaucaucgucaucaucgugauccugcugucccucaucgccguggggcugcugcucuacugcaaggcccggagcacgcccgucacccuguccaaggaccagcugagcggcaucaacaacaucgcguucuccaacugaggacuaguacuggcugcaucucccuuuccucuguccuccauccuucucccaggauggugaagggggaccugguacccagugauccccaccccaggauccuaaaucaugacuuaccugcuaauaaaaacucauuggaaaagugagaagaucuaaaaaaaaaaaaaaaaaaaaaaaaaaaaaaaaaaaaaaaaaaaaaaaaaaaaaaaaaaaaaaaaugcaucccccccccccccccccccccccccccccccaaaggcucuuuucagagccaccagaauu

SEQ ID NO: 7870 - RNA, 2064 nt, Artificial Sequence
  mRNA product Design h-5 comprising derived and/or modified sequence from HRSV(A2)__F_DSCav1_mut8 (opt1)
gggagagggcgcuuggcuugcaaggacccugagcugcggcauugaagcacacccaacccaacucgacugaagucagccucacugaaccggaucugagaaucuucucucucugggcuugccagggcucuccgaaccuagcuagcauccucuucaauuccaacuagaaagcuuaccauggagcugcucauccugaaggccaacgccaucaccaccauccugacggcggugaccuucugcuucgccagcggccagaacaucaccgaggaguucuaccaguccacgugcagcgccgucuccaagggguaccucggcgcccugcgcaccgggugguacaccagcgugaucaccaucgagcuguccaacaucaaggagaucaagugcaacggcaccgacgccaaggugaagcucaucaagcaggagcuggacaaguacaagaacgcggucacggaccugcagcuccugaugcagagcacccccgccaccggguccggcagcgccaucgccuccggcguggcggugugcaagguccugcaccucgagggggaggugaacaagaucaagagcgcccugcuguccaccaacaaggccguggucagccucuccggcugcggggugagcgugcugacguucaagguccuggaccucaagaacuacaucgacaagcagcugcugccgauccucaacaagcaguccugcagcauccccaacaucgagaccgugaucgaguuccagcagaagaacaaccggcugcuggagaucacccgcgaguucuccgugaacgccggcgucaccacgcccgugagcaccuacaugcucaccaacuccgagcugcugagccucaucaacgacaugcccaucaccaacgaccagaagaagcugaugagcaacaacgugcagaucguccggcagcaguccuacagcaucaugugcaucaucaaggaggaggugcuggccuacgugguccagcucccgcuguacggggugaucgacacgcccugcuggaagcugcacaccagcccccucugcaccaccaacacgaaggagggcuccaacaucugccugacccgcaccgaccggggcugguacugcgacaacgcgggguccgugagcuucuucccccaggccgagaccugcaagguccaguccaaccgcguguucugcgacacgaugaacagccugacccucccguccgaggucaaccugugcaacguggacaucuucaaccccaaguacgacugcaagaucaugaccagcaagaccgacguguccagcuccgucaucacgagccugggcgccaucguguccugcuacgggaagaccaagugcaccgccagcaacaagugccggggcaucaucaagaccuucuccaacggcugcgacuacgugagcaacaagggggucgacacgguguccgugggcaacacccucuacuacgucaacaagcaggaggggcagagccuguacgugaagggcgagcccaucaucaacuucuacgacccccugguguucccgagcgacgaguucgacgccuccaucagccaggucaacgagaagaucaaccagucccucgcguucauccgcaagagcgacgagcugcugcacaacgugaacgccgggaaguccaccaccaacaucaugaucaccacgaucaucaucgugaucaucgucauccuccugagccugaucgccgugggccuccugcuguacugcaaggcccgguccacccccgugacccugagcaaggaccagcucuccggcaucaacaacaucgccuucagcaacugaggacuaguacuggcugcaucucccuuuccucuguccuccauccuucucccaggauggugaagggggaccugguacccagugauccccaccccaggauccuaaaucaugacuuaccugcuaauaaaaacucauuggaaaagugagaagaucuaaaaaaaaaaaaaaaaaaaaaaaaaaaaaaaaaaaaaaaaaaaaaaaaaaaaaaaaaaaaaaaaugcaucccccccccccccccccccccccccccccccaaaggcucuuuucagagccaccagaauu

SEQ ID NO: 7871 - RNA, 2064 nt, Artificial Sequence
  mRNA product Design h-5 comprising derived and/or modified sequence from HRSV(A2)__F_DSCav1_mut8 (opt2)
gggagagggcgcuuggcuugcaaggacccugagcugcggcauugaagcacacccaacccaacucgacugaagucagccucacugaaccggaucugagaaucuucucucucugggcuugccagggcucuccgaaccuagcuagcauccucuucaauuccaacuagaaagcuuaccauggagcuccucauccucaaggccaacgccaucaccaccauccucaccgccgucaccuucugcuucgccuccggccagaacaucaccgaggaguucuaccaguccaccugcuccgccgucuccaagggcuaccucggcgcccuccgcaccggcugguacaccuccgucaucaccaucgagcucuccaacaucaaggagaucaagugcaacggcaccgacgccaaggucaagcucaucaagcaggagcucgacaaguacaagaacgccgucaccgaccuccagcuccucaugcaguccacccccgccaccggcuccggcuccgccaucgccuccggcgucgccgucugcaagguccuccaccucgagggcgaggucaacaagaucaaguccgcccuccucuccaccaacaaggccgucgucucccucuccggcugcggcgucuccguccucaccuucaagguccucgaccucaagaacuacaucgacaagcagcuccuccccauccucaacaagcaguccugcuccauccccaacaucgagaccgucaucgaguuccagcagaagaacaaccgccuccucgagaucacccgcgaguucuccgucaacgccggcgucaccacccccgucuccaccuacaugcucaccaacuccgagcuccucucccucaucaacgacaugcccaucaccaacgaccagaagaagcucauguccaacaacguccagaucguccgccagcaguccuacuccaucaugugcaucaucaaggaggagguccucgccuacgucguccagcucccccucuacggcgucaucgacacccccugcuggaagcuccacaccuccccccucugcaccaccaacaccaaggagggcuccaacaucugccucacccgcaccgaccgcggcugguacugcgacaacgccggcuccgucuccuucuucccccaggccgagaccugcaagguccaguccaaccgcgucuucugcgacaccaugaacucccucacccuccccuccgaggucaaccucugcaacgucgacaucuucaaccccaaguacgacugcaagaucaugaccuccaagaccgacgucuccuccuccgucaucaccucccucggcgccaucgucuccugcuacggcaagaccaagugcaccgccuccaacaagugccgcggcaucaucaagaccuucuccaacggcugcgacuacgucuccaacaagggcgucgacaccgucuccgucggcaacacccucuacuacgucaacaagcaggagggccagucccucuacgucaagggcgagcccaucaucaacuucuacgacccccucgucuuccccuccgacgaguucgacgccuccaucucccaggucaacgagaagaucaaccagucccucgccuucauccgcaaguccgacgagcuccuccacaacgucaacgccggcaaguccaccaccaacaucaugaucaccaccaucaucaucgucaucaucgucauccuccucucccucaucgccgucggccuccuccucuacugcaaggcccgcuccacccccgucacccucuccaaggaccagcucuccggcaucaacaacaucgccuucuccaacugaggacuaguacuggcugcaucucccuuuccucuguccuccauccuucucccaggauggugaagggggaccugguacccagugauccccaccccaggauccuaaaucaugacuuaccugcuaauaaaaacucauuggaaaagugagaagaucuaaaaaaaaaaaaaaaaaaaaaaaaaaaaaaaaaaaaaaaaaaaaaaaaaaaaaaaaaaaaaaaaugcaucccccccccccccccccccccccccccccccaaaggcucuuuucagagccaccagaauu

SEQ ID NO: 7872 - RNA, 2064 nt, Artificial Sequence
  mRNA product Design h-5 comprising derived and/or modified sequence from HRSV(A2)__F_DSCav1_mut8 (opt3)
gggagagggcgcuuggcuugcaaggacccugagcugcggcauugaagcacacccaacccaacucgacugaagucagccucacugaaccggaucugagaaucuucucucucugggcuugccagggcucuccgaaccuagcuagcauccucuucaauuccaacuagaaagcuuaccauggagcugcucauccuuaaggccaacgcuauuaccacaauacugacugcagugacguucugcuuugccagcggccagaauaucaccgaagaguucuaccaauccacauguucugcggucucaaaaggguauuugggagcuuuaagaacugguugguacaccaguguuauuacaaucgaacugagcaacauuaaggagaucaaaugcaauggcaccgacgccaaggugaaacuaauaaagcaggaacucgauaaguauaaaaacgcaguaacugaccugcagcuucugaugcaguccacacccgccaccgggucuggaucggcuaucgcaucaggcguggccgucuguaagguguugcaccucgagggugagguuaauaaaauuaagagcgcucugcugaguacgaacaaagccguggucucccucucugggugcggagugagcguauuaacuuuuaagguucuggaucuuaagaauuacaucgacaaacaauugcugccuauucuaaacaagcaguccuguucaaucccaaauauagaaaccgugauugaguuccagcagaaaaacaauaggcuccuggaaaucacacgggaguuuagugucaacgcgggcgugacuaccccggugagcacauauaugcuuaccaauucugagcuguugucccucauuaacgauaugcccaucacgaaugaccaaaagaaacugaugucaaacaacguccagaucguucgccagcagagcuacaguauuaugugcauaaucaaggaagagguguuagcauauguagugcaacugccucucuacggcgucauugauacuccauguuggaaacuucauacaucuccccugugcaccacuaauacaaaggaaggguccaacaucuguuugacccgaacggaccguggaugguacugcgauaaugccgguagcgugucguucuuuccucaggcugagaccuguaagguucagucuaacagaguguucugcgacacaaugaacucccuaacucugccaucagaagucaaucucugcaauguggauauauuuaaccccaaauaugacuguaagauuaugaccaguaaaacagauguaagcuccucuguuaucacuagccugggcgccaucgugucaugcuacgggaagaccaaauguacagcaaguaauaagugcaggggaauuaucaagaccuucuccaacggcugugacuaugucagcaauaaagguguggacacugucucuguggggaacacgcuuuacuauguuaauaagcaagagggacagucacuguacgugaaaggcgagccuauuauaaacuuuuaugauccauugguauucccgagugacgaauuugaugcuagcaucucccaggucaaugagaagauuaaccagucucucgccuucauccggaaaucggacgaacuguuacacaacgugaaugcgggcaagagcacaaccaacaucaugauuacuaccauaaucauuguuaucauugugauccugcuaucccucauagccgucgggcugcuuuuguacugcaaggcacgcucaacacccgugacccugaguaaagaucaacucucuggaaucaauaacauugcuuucagcaauugaggacuaguacuggcugcaucucccuuuccucuguccuccauccuucucccaggauggugaagggggaccugguacccagugauccccaccccaggauccuaaaucaugacuuaccugcuaauaaaaacucauuggaaaagugagaagaucuaaaaaaaaaaaaaaaaaaaaaaaaaaaaaaaaaaaaaaaaaaaaaaaaaaaaaaaaaaaaaaaaugcaucccccccccccccccccccccccccccccccaaaggcucuuuucagagccaccagaauu

SEQ ID NO: 7873 - RNA, 2064 nt, Artificial Sequence
  mRNA product Design h-5 comprising derived and/or modified sequence from HRSV(A2)__F_DSCav1_mut8 (opt4)
gggagagggcgcuuggcuugcaaggacccugagcugcggcauugaagcacacccaacccaacucgacugaagucagccucacugaaccggaucugagaaucuucucucucugggcuugccagggcucuccgaaccuagcuagcauccucuucaauuccaacuagaaagcuuaccauggagcugcugauccugaaggccaacgccaucaccaccauccugaccgccgugaccuucugcuucgccagcggccagaacaucaccgaggaguucuaccagagcaccugcagcgccgugagcaagggcuaccugggcgcccugagaaccggcugguacaccagcgugaucaccaucgagcugagcaacaucaaggagaucaagugcaacggcaccgacgccaaggugaagcugaucaagcaggagcuggacaaguacaagaacgccgugaccgaccugcagcugcugaugcagagcacccccgccaccggcagcggcagcgccaucgccagcggcguggccgugugcaaggugcugcaccuggagggcgaggugaacaagaucaagagcgcccugcugagcaccaacaaggccguggugagccugagcggcugcggcgugagcgugcugaccuucaaggugcuggaccugaagaacuacaucgacaagcagcugcugcccauccugaacaagcagagcugcagcauccccaacaucgagaccgugaucgaguuccagcagaagaacaacagacugcuggagaucaccagagaguucagcgugaacgccggcgugaccacccccgugagcaccuacaugcugaccaacagcgagcugcugagccugaucaacgacaugcccaucaccaacgaccagaagaagcugaugagcaacaacgugcagaucgugagacagcagagcuacagcaucaugugcaucaucaaggaggaggugcuggccuacguggugcagcugccccuguacggcgugaucgacacccccugcuggaagcugcacaccagcccccugugcaccaccaacaccaaggagggcagcaacaucugccugaccagaaccgacagaggcugguacugcgacaacgccggcagcgugagcuucuucccccaggccgagaccugcaaggugcagagcaacagaguguucugcgacaccaugaacagccugacccugcccagcgaggugaaccugugcaacguggacaucuucaaccccaaguacgacugcaagaucaugaccagcaagaccgacgugagcagcagcgugaucaccagccugggcgccaucgugagcugcuacggcaagaccaagugcaccgccagcaacaagugcagaggcaucaucaagaccuucagcaacggcugcgacuacgugagcaacaagggcguggacaccgugagcgugggcaacacccuguacuacgugaacaagcaggagggccagagccuguacgugaagggcgagcccaucaucaacuucuacgacccccugguguuccccagcgacgaguucgacgccagcaucagccaggugaacgagaagaucaaccagagccuggccuucaucagaaagagcgacgagcugcugcacaacgugaacgccggcaagagcaccaccaacaucaugaucaccaccaucaucaucgugaucaucgugauccugcugagccugaucgccgugggccugcugcuguacugcaaggccagaagcacccccgugacccugagcaaggaccagcugagcggcaucaacaacaucgccuucagcaacugaggacuaguacuggcugcaucucccuuuccucuguccuccauccuucucccaggauggugaagggggaccugguacccagugauccccaccccaggauccuaaaucaugacuuaccugcuaauaaaaacucauuggaaaagugagaagaucuaaaaaaaaaaaaaaaaaaaaaaaaaaaaaaaaaaaaaaaaaaaaaaaaaaaaaaaaaaaaaaaaugcaucccccccccccccccccccccccccccccccaaaggcucuuuucagagccaccagaauu

SEQ ID NO: 7874 - RNA, 2064 nt, Artificial Sequence
  mRNA product Design h-5 comprising derived and/or modified sequence from HRSV(A2)__F_DSCav1_mut8 (opt5)
gggagagggcgcuuggcuugcaaggacccugagcugcggcauugaagcacacccaacccaacucgacugaagucagccucacugaaccggaucugagaaucuucucucucugggcuugccagggcucuccgaaccuagcuagcauccucuucaauuccaacuagaaagcuuaccauggagcugcucauccugaaggccaacgcuauuaccacaauccuuacggccgugaccuucugcuuugcgagcggccagaauauuacagaagaguucuaccaauccaccuguucugcugucagcaaaggguaucugggagcccucagaacaggcugguacaccuccguuaucacaauugaacugucuaacaucaaggagaucaaaugcaaugggaccgacgccaaggugaaacuuauuaagcaggaacuggauaaguauaaaaacgcugugacggaccuccagcugcugaugcagagcacccccgccacaggauccggcucugcuaucgccagcggggucgcgguguguaagguucuccaccuggagggagaggugaauaaaauuaaguccgcccuucugagcaccaacaaagcugucgugucucucuccggcugcggcguuagcgugcugacauuuaagguccuugaucugaagaauuacaucgacaaacaacuccugccuauucugaacaagcagucuuguuccaucccgaauauugaaaccgugaucgaguuccagcagaaaaacaaucggcuccuggaaaucacgcgcgaguuuagcgugaacgccggggucacaacccccguuucuacauauaugcuuaccaauuccgagcugcucagccugauuaacgauaugccuaucaccaaugaccaaaagaaacuuauguccaacaacgugcagauugugagacagcagucuuacagcaucaugugcauuaucaaggaagagguccuggcuuaugugguucaacucccccuguacggagugaucgauacaccuuguuggaaacugcauacgagcccccucugcaccacaaauaccaaggaaggcagcaacauuugucugacacggaccgaccgcgggugguacugcgauaaugccggaucugucuccuucuuuccucaggcggagacguguaaggugcagagcaacagaguuuucugcgacacaaugaacucucuuacccugccgagcgaagugaaucucugcaaugucgauaucuuuaaccccaaauaugacuguaagauuaugaccuccaaaacagaugugucuagcuccgucaucaccagccugggcgccauugugucuugcuacgggaagacaaaauguacggcuuccaauaagugccggggaaucaucaagaccuucagcaacggcugugacuauguuucuaauaaaggcguggacacagucuccguggggaacacccuuuacuauguuaauaagcaagagggacagagccuguacgugaaaggcgagccuauuaucaacuuuuaugauccccucgucuucccuuccgacgaauuugaugccucuauuagccaggugaaugagaagaucaaccagucccuggcuuucauucgcaaaucugacgaacugcuccacaacgugaaugccgggaaguccacaaccaacaucaugauuacgaccaucaucauuguuaucauugucauccugcuuucccugauugccgugggacuccugcuguacugcaaggcuagaagcacacccgugacccuuucuaaagaucaacucuccggcaucaauaacaucgcguucagcaauugaggacuaguacuggcugcaucucccuuuccucuguccuccauccuucucccaggauggugaagggggaccugguacccagugauccccaccccaggauccuaaaucaugacuuaccugcuaauaaaaacucauuggaaaagugagaagaucuaaaaaaaaaaaaaaaaaaaaaaaaaaaaaaaaaaaaaaaaaaaaaaaaaaaaaaaaaaaaaaaaugcaucccccccccccccccccccccccccccccccaaaggcucuuuucagagccaccagaauu

SEQ ID NO: 7875 - RNA, 2064 nt, Artificial Sequence
  mRNA product Design h-5 comprising derived and/or modified sequence from HRSV(A2)__F_DSCav1_mut8 (opt6)
gggagagggcgcuuggcuugcaaggacccugagcugcggcauugaagcacacccaacccaacucgacugaagucagccucacugaaccggaucugagaaucuucucucucugggcuugccagggcucuccgaaccuagcuagcauccucuucaauuccaacuagaaagcuuaccauggaacuauuaauauuaaaagcaaacgcaaucacaacuauacuaacagcaguaacauucugcuuugccucaggucaaaacauaacagaggaauuuuaccaauccacaugcucugcuguaagcaaaggauaccucggagcauuaagaacuggaugguacaccucaguaauaacuauagaacuaucaaacauaaaagaaauaaaauguaauggcacagacgcaaaagugaaauuaaucaaacaagaacucgauaaauacaaaaaugccguaaccgaucuccaacuuuuaaugcaaagcacacccgcaacagguuccgggucagcaauagcaagcggaguugcaguaugcaaaguacuacacuuagaaggagaaguaaauaaaaucaaaucagccuuacuaucaacaaauaaagcaguuguaucacucucaggaugcggaguauccguacuaacauuuaaaguacuagaucuaaaaaacuacauagauaaacaacucuuaccaauacuaaauaaacaaucauguuccauacccaacauagaaaccguuaucgaauuucaacaaaaaaacaacagauuacuagaaaucacacgagaauuuucaguaaaugcuggagucacaacaccaguuaguacauacaugcucaccaauucagaacuacuaaguuuaauuaacgauaugccaauaacaaacgaccaaaaaaaacuaaugucaaauaacguacaaauaguaagacaacaaucauacucaaucaugugcauaauaaaagaagaaguacuagccuauguaguccaauuaccacucuacggcguaaucgacaccccaugcuggaaauuacacacaagcccauuaugcaccaccaacacaaaagaagguucaaacauuugcuuaaccagaaccgaucgaggaugguacugcgauaacgcaggaucugucuccuuuuucccacaagccgaaacaugcaaaguucaaucaaaccgaguuuucugugacacuaugaacucacucacacuuccaagcgaaguaaaccuaugcaacguagauauauuuaacccuaaauacgacugcaaaauaaugacaagcaaaacagacguuaguucaucaguaauuacaagucuaggcgcaauagugucaugcuacggaaaaacaaaaugcaccgcauccaauaaaugccgaggaaucauuaaaacauucucaaacggaugcgacuacgucagcaauaaaggaguagacacuguuucuguaggaaacacccuauacuauguaaacaaacaagaaggucaaucacuauacguaaagggagaaccaauuauaaauuuuuacgaccccuuaguauuuccaagugaugaauuugacgcaucuauaagucaaguuaacgaaaaaauuaaccaaucacuugcauuuauaagaaaaucagacgaacuacuccauaauguaaacgcagguaaaucaacaacaaacaucaugaucacaaccauaauaauaguaauaauuguaauauuacuaucacuaauagcaguaggauuacuacucuacugcaaagcuagaucuaccccggucacacucucaaaagaccaauuaucuggaauaaacaauauagcauucagcaacuaaggacuaguacuggcugcaucucccuuuccucuguccuccauccuucucccaggauggugaagggggaccugguacccagugauccccaccccaggauccuaaaucaugacuuaccugcuaauaaaaacucauuggaaaagugagaagaucuaaaaaaaaaaaaaaaaaaaaaaaaaaaaaaaaaaaaaaaaaaaaaaaaaaaaaaaaaaaaaaaaugcaucccccccccccccccccccccccccccccccaaaggcucuuuucagagccaccagaauu

SEQ ID NO: 7876 - RNA, 2064 nt, Artificial Sequence
  mRNA product Design h-5 comprising derived and/or modified sequence from HRSV(A2)__F_DSCav1_mut8 (opt11)
gggagagggcgcuuggcuugcaaggacccugagcugcggcauugaagcacacccaacccaacucgacugaagucagccucacugaaccggaucugagaaucuucucucucugggcuugccagggcucuccgaaccuagcuagcauccucuucaauuccaacuagaaagcuuaccauggaacuccucauccuuaaagccaacgccauaaccaccauccucaccgccgucaccuucugcuucgcuucuggccaaaacauaaccgaagaguucuaccaauccacgugcucugccgugucaaaaggcuaccucggagcccuccgcacagggugguacacuuccgucaucaccaucgaacucucuaacaucaaagaaaucaagugcaacggcacagacgcgaaagucaagcucaucaaacaagaacuagacaaauacaaaaacgccguaacagaccuccaacuccuaaugcaguccacaccagccacaggcuccggcagcgccaucgccuccggcgucgcugucugcaaaguccuacaccucgaaggcgaagucaacaaaaucaagucagcccuccuuagcaccaacaaagcagucgucucuuuaagcgggugcggagucucuguccuaaccuuuaaaguacucgaccucaaaaacuacaucgacaaacaacuacuaccaauacuaaacaaacagagcugcuccauucccaacaucgaaaccguuaucgaguuccaacaaaagaacaaccgccuccucgaaaucacccgcgaguucuccgucaacgcaggcgucaccaccccagucuccaccuauaugcuaaccaacagcgaacuccucagccucaucaaugacaugccaaucaccaacgaccaaaagaaacucauguccaacaacguacagauaguccgccagcaguccuacagcaucaugugcaucaucaaagaagaagugcucgccuacgugguacaacucccucucuacggagucauugauacacccugcuggaaacuccacacaagcccccucugcacuacaaacaccaaagaaggcucuaacauaugccucacccgcacagaccgugguugguacugcgacaacgccggcuccguauccuucuuuccacaagcugaaaccugcaaaguucaaucaaaccgagucuucugcgacaccaugaacucccucacauugcccagcgaagucaaccucugcaacgucgacaucuucaaccccaaguacgacugcaaaaucaugaccuccaaaaccgacgucagcuccagcgugaucacaagccuaggcgcgaucgucagcugcuacggcaaaaccaaaugcacagccuccaacaaaugccgcggaaucauaaaaacauucaguaacggcugcgacuacguguccaauaaaggagucgacaccguauccgucggaaacacccucuacuacgucaacaaacaagaaggacaaucccucuaugucaaaggcgaacccauuaucaacuucuacgacccccuaguuuuccccuccgacgaguucgacgcaagcauuucccaagucaacgaaaagaucaaucaaucccucgccuucauacgcaaaagcgacgaacuacuacacaacguaaacgccggcaaaagcaccaccaacaucaugaucacaacaaucaucaucgucaucaucgucauccuacucucacucaucgccguuggccuacuacucuacugcaaagcccgcuccacacccgucacccucucaaaagaccaacucuccggcaucaacaacaucgcauucagcaacugaggacuaguacuggcugcaucucccuuuccucuguccuccauccuucucccaggauggugaagggggaccugguacccagugauccccaccccaggauccuaaaucaugacuuaccugcuaauaaaaacucauuggaaaagugagaagaucuaaaaaaaaaaaaaaaaaaaaaaaaaaaaaaaaaaaaaaaaaaaaaaaaaaaaaaaaaaaaaaaaugcaucccccccccccccccccccccccccccccccaaaggcucuuuucagagccaccagaauu

SEQ ID NO: 7877 - RNA, 1997 nt, Artificial Sequence
  mRNA product Design i-1 comprising derived and/or modified sequence from HRSV(A2)__F_DSCav1_mut8 (opt1)
gggagagggcgcuuggcuugcaaggacccugagcugcggcauugaagcacacccaacccaacucgacugaagucagccucacugaaccggaucugagaaucuucucucucugggcuugccagggcucuccgaaccuagcuagcauccucuucaauuccaacuagaaagcuuaccauggagcugcucauccugaaggccaacgccaucaccaccauccugacggcggugaccuucugcuucgccagcggccagaacaucaccgaggaguucuaccaguccacgugcagcgccgucuccaagggguaccucggcgcccugcggaccggcugguacaccuccgugaucaccaucgagcugagcaacaucaaggagaucaagugcaacgggaccgacgccaaggugaagcucaucaagcaggagcuggacaaguacaagaacgcggucacggaccugcagcuccugaugcaguccaccccggcaaccggcuccggcuccgccaucgcgagcggcgucgccgugugcaaggugcugcaccucgagggggaggucaacaagaucaagagcgcccugcuguccaccaacaaggccguggugagccucuccggcugcggcgucagcgugcugaccuucaaggugcuggaccucaagaacuacaucgacaagcagcugcugcccauccugaacaagcagagcugcuccauccccaacaucgagacggugaucgaguuccagcagaagaacaaccggcuccuggagaucacccgcgaguucagcgugaacgccggggucaccacccccguguccacguacaugcugaccaacagcgagcuccugucccugaucaacgacaugccgaucaccaacgaccagaagaagcucaugagcaacaacgugcagaucguccggcagcaguccuacagcaucaugugcaucaucaaggaggaggugcuggcguacgugguccagcugccccucuacggcgugaucgacacccccugcuggaagcugcacacgagcccccugugcaccaccaacaccaaggagggguccaacaucugccucacgcgcaccgaccggggcugguacugcgacaacgccggcagcgucuccuucuucccgcaggccgagaccugcaaggugcagagcaaccgcguguucugcgacaccaugaacucccugacgcugcccagcgagguaaaccucugcaacgucgacaucuucaaccccaaguacgacugcaagaucaugaccuccaagaccgacgugagcuccagcgugaucaccucccugggggccaucgucagcugcuacggcaagacgaagugcaccgccagcaacaagugccgggggaucaucaagaccuucuccaacggcugcgacuacgugagcaacaagggcguggacaccguguccgucgggaacacccuguacuacgugaacaagcaggagggccagagccucuacgugaagggggagcccaucaucaacuucuacgacccgcuggucuuccccuccgacgaguucgacgcgagcaucucccaggugaacgagaagaucaaccagagccuggccuucauccgcaaguccgacgagcugcuccacaacgugaacgccggcaagagcacgaccaacaucaugaucaccaccaucaucaucgucaucaucgugauccugcugucccucaucgccguggggcugcugcucuacugcaaggcccggagcacgcccgucacccuguccaaggaccagcugagcggcaucaacaacaucgcguucuccaacugaggacuaguguccaccugucccuccugggcugcuggauugucucguuuuccugccaaauaaacaggaucagcgcuuuacagaucuaaaaaaaaaaaaaaaaaaaaaaaaaaaaaaaaaaaaaaaaaaaaaaaaaaaaaaaaaaaaaaaaugcaucccccccccccccccccccccccccccccccaaaggcucuuuucagagccaccagaauu

SEQ ID NO: 7878 - RNA, 1997 nt, Artificial Sequence
  mRNA product Design i-1 comprising derived and/or modified sequence from HRSV(A2)__F_DSCav1_mut8 (opt1)
gggagagggcgcuuggcuugcaaggacccugagcugcggcauugaagcacacccaacccaacucgacugaagucagccucacugaaccggaucugagaaucuucucucucugggcuugccagggcucuccgaaccuagcuagcauccucuucaauuccaacuagaaagcuuaccauggagcugcucauccugaaggccaacgccaucaccaccauccugacggcggugaccuucugcuucgccagcggccagaacaucaccgaggaguucuaccaguccacgugcagcgccgucuccaagggguaccucggcgcccugcgcaccgggugguacaccagcgugaucaccaucgagcuguccaacaucaaggagaucaagugcaacggcaccgacgccaaggugaagcucaucaagcaggagcuggacaaguacaagaacgcggucacggaccugcagcuccugaugcagagcacccccgccaccggguccggcagcgccaucgccuccggcguggcggugugcaagguccugcaccucgagggggaggugaacaagaucaagagcgcccugcuguccaccaacaaggccguggucagccucuccggcugcggggugagcgugcugacguucaagguccuggaccucaagaacuacaucgacaagcagcugcugccgauccucaacaagcaguccugcagcauccccaacaucgagaccgugaucgaguuccagcagaagaacaaccggcugcuggagaucacccgcgaguucuccgugaacgccggcgucaccacgcccgugagcaccuacaugcucaccaacuccgagcugcugagccucaucaacgacaugcccaucaccaacgaccagaagaagcugaugagcaacaacgugcagaucguccggcagcaguccuacagcaucaugugcaucaucaaggaggaggugcuggccuacgugguccagcucccgcuguacggggugaucgacacgcccugcuggaagcugcacaccagcccccucugcaccaccaacacgaaggagggcuccaacaucugccugacccgcaccgaccggggcugguacugcgacaacgcgggguccgugagcuucuucccccaggccgagaccugcaagguccaguccaaccgcguguucugcgacacgaugaacagccugacccucccguccgaggucaaccugugcaacguggacaucuucaaccccaaguacgacugcaagaucaugaccagcaagaccgacguguccagcuccgucaucacgagccugggcgccaucguguccugcuacgggaagaccaagugcaccgccagcaacaagugccggggcaucaucaagaccuucuccaacggcugcgacuacgugagcaacaagggggucgacacgguguccgugggcaacacccucuacuacgucaacaagcaggaggggcagagccuguacgugaagggcgagcccaucaucaacuucuacgacccccugguguucccgagcgacgaguucgacgccuccaucagccaggucaacgagaagaucaaccagucccucgcguucauccgcaagagcgacgagcugcugcacaacgugaacgccgggaaguccaccaccaacaucaugaucaccacgaucaucaucgugaucaucgucauccuccugagccugaucgccgugggccuccugcuguacugcaaggcccgguccacccccgugacccugagcaaggaccagcucuccggcaucaacaacaucgccuucagcaacugaggacuaguguccaccugucccuccugggcugcuggauugucucguuuuccugccaaauaaacaggaucagcgcuuuacagaucuaaaaaaaaaaaaaaaaaaaaaaaaaaaaaaaaaaaaaaaaaaaaaaaaaaaaaaaaaaaaaaaaugcaucccccccccccccccccccccccccccccccaaaggcucuuuucagagccaccagaauu

SEQ ID NO: 7879 - RNA, 1997 nt, Artificial Sequence
  mRNA product Design i-1 comprising derived and/or modified sequence from HRSV(A2)__F_DSCav1_mut8 (opt2)
gggagagggcgcuuggcuugcaaggacccugagcugcggcauugaagcacacccaacccaacucgacugaagucagccucacugaaccggaucugagaaucuucucucucugggcuugccagggcucuccgaaccuagcuagcauccucuucaauuccaacuagaaagcuuaccauggagcuccucauccucaaggccaacgccaucaccaccauccucaccgccgucaccuucugcuucgccuccggccagaacaucaccgaggaguucuaccaguccaccugcuccgccgucuccaagggcuaccucggcgcccuccgcaccggcugguacaccuccgucaucaccaucgagcucuccaacaucaaggagaucaagugcaacggcaccgacgccaaggucaagcucaucaagcaggagcucgacaaguacaagaacgccgucaccgaccuccagcuccucaugcaguccacccccgccaccggcuccggcuccgccaucgccuccggcgucgccgucugcaagguccuccaccucgagggcgaggucaacaagaucaaguccgcccuccucuccaccaacaaggccgucgucucccucuccggcugcggcgucuccguccucaccuucaagguccucgaccucaagaacuacaucgacaagcagcuccuccccauccucaacaagcaguccugcuccauccccaacaucgagaccgucaucgaguuccagcagaagaacaaccgccuccucgagaucacccgcgaguucuccgucaacgccggcgucaccacccccgucuccaccuacaugcucaccaacuccgagcuccucucccucaucaacgacaugcccaucaccaacgaccagaagaagcucauguccaacaacguccagaucguccgccagcaguccuacuccaucaugugcaucaucaaggaggagguccucgccuacgucguccagcucccccucuacggcgucaucgacacccccugcuggaagcuccacaccuccccccucugcaccaccaacaccaaggagggcuccaacaucugccucacccgcaccgaccgcggcugguacugcgacaacgccggcuccgucuccuucuucccccaggccgagaccugcaagguccaguccaaccgcgucuucugcgacaccaugaacucccucacccuccccuccgaggucaaccucugcaacgucgacaucuucaaccccaaguacgacugcaagaucaugaccuccaagaccgacgucuccuccuccgucaucaccucccucggcgccaucgucuccugcuacggcaagaccaagugcaccgccuccaacaagugccgcggcaucaucaagaccuucuccaacggcugcgacuacgucuccaacaagggcgucgacaccgucuccgucggcaacacccucuacuacgucaacaagcaggagggccagucccucuacgucaagggcgagcccaucaucaacuucuacgacccccucgucuuccccuccgacgaguucgacgccuccaucucccaggucaacgagaagaucaaccagucccucgccuucauccgcaaguccgacgagcuccuccacaacgucaacgccggcaaguccaccaccaacaucaugaucaccaccaucaucaucgucaucaucgucauccuccucucccucaucgccgucggccuccuccucuacugcaaggcccgcuccacccccgucacccucuccaaggaccagcucuccggcaucaacaacaucgccuucuccaacugaggacuaguguccaccugucccuccugggcugcuggauugucucguuuuccugccaaauaaacaggaucagcgcuuuacagaucuaaaaaaaaaaaaaaaaaaaaaaaaaaaaaaaaaaaaaaaaaaaaaaaaaaaaaaaaaaaaaaaaugcaucccccccccccccccccccccccccccccccaaaggcucuuuucagagccaccagaauu

SEQ ID NO: 7880 - RNA, 1997 nt, Artificial Sequence
  mRNA product Design i-1 comprising derived and/or modified sequence from HRSV(A2)__F_DSCav1_mut8 (opt3)
gggagagggcgcuuggcuugcaaggacccugagcugcggcauugaagcacacccaacccaacucgacugaagucagccucacugaaccggaucugagaaucuucucucucugggcuugccagggcucuccgaaccuagcuagcauccucuucaauuccaacuagaaagcuuaccauggagcugcucauccuuaaggccaacgcuauuaccacaauacugacugcagugacguucugcuuugccagcggccagaauaucaccgaagaguucuaccaauccacauguucugcggucucaaaaggguauuugggagcuuuaagaacugguugguacaccaguguuauuacaaucgaacugagcaacauuaaggagaucaaaugcaauggcaccgacgccaaggugaaacuaauaaagcaggaacucgauaaguauaaaaacgcaguaacugaccugcagcuucugaugcaguccacacccgccaccgggucuggaucggcuaucgcaucaggcguggccgucuguaagguguugcaccucgagggugagguuaauaaaauuaagagcgcucugcugaguacgaacaaagccguggucucccucucugggugcggagugagcguauuaacuuuuaagguucuggaucuuaagaauuacaucgacaaacaauugcugccuauucuaaacaagcaguccuguucaaucccaaauauagaaaccgugauugaguuccagcagaaaaacaauaggcuccuggaaaucacacgggaguuuagugucaacgcgggcgugacuaccccggugagcacauauaugcuuaccaauucugagcuguugucccucauuaacgauaugcccaucacgaaugaccaaaagaaacugaugucaaacaacguccagaucguucgccagcagagcuacaguauuaugugcauaaucaaggaagagguguuagcauauguagugcaacugccucucuacggcgucauugauacuccauguuggaaacuucauacaucuccccugugcaccacuaauacaaaggaaggguccaacaucuguuugacccgaacggaccguggaugguacugcgauaaugccgguagcgugucguucuuuccucaggcugagaccuguaagguucagucuaacagaguguucugcgacacaaugaacucccuaacucugccaucagaagucaaucucugcaauguggauauauuuaaccccaaauaugacuguaagauuaugaccaguaaaacagauguaagcuccucuguuaucacuagccugggcgccaucgugucaugcuacgggaagaccaaauguacagcaaguaauaagugcaggggaauuaucaagaccuucuccaacggcugugacuaugucagcaauaaagguguggacacugucucuguggggaacacgcuuuacuauguuaauaagcaagagggacagucacuguacgugaaaggcgagccuauuauaaacuuuuaugauccauugguauucccgagugacgaauuugaugcuagcaucucccaggucaaugagaagauuaaccagucucucgccuucauccggaaaucggacgaacuguuacacaacgugaaugcgggcaagagcacaaccaacaucaugauuacuaccauaaucauuguuaucauugugauccugcuaucccucauagccgucgggcugcuuuuguacugcaaggcacgcucaacacccgugacccugaguaaagaucaacucucuggaaucaauaacauugcuuucagcaauugaggacuaguguccaccugucccuccugggcugcuggauugucucguuuuccugccaaauaaacaggaucagcgcuuuacagaucuaaaaaaaaaaaaaaaaaaaaaaaaaaaaaaaaaaaaaaaaaaaaaaaaaaaaaaaaaaaaaaaaugcaucccccccccccccccccccccccccccccccaaaggcucuuuucagagccaccagaauu

SEQ ID NO: 7881 - RNA, 1997 nt, Artificial Sequence
  mRNA product Design i-1 comprising derived and/or modified sequence from HRSV(A2)__F_DSCav1_mut8 (opt4)
gggagagggcgcuuggcuugcaaggacccugagcugcggcauugaagcacacccaacccaacucgacugaagucagccucacugaaccggaucugagaaucuucucucucugggcuugccagggcucuccgaaccuagcuagcauccucuucaauuccaacuagaaagcuuaccauggagcugcugauccugaaggccaacgccaucaccaccauccugaccgccgugaccuucugcuucgccagcggccagaacaucaccgaggaguucuaccagagcaccugcagcgccgugagcaagggcuaccugggcgcccugagaaccggcugguacaccagcgugaucaccaucgagcugagcaacaucaaggagaucaagugcaacggcaccgacgccaaggugaagcugaucaagcaggagcuggacaaguacaagaacgccgugaccgaccugcagcugcugaugcagagcacccccgccaccggcagcggcagcgccaucgccagcggcguggccgugugcaaggugcugcaccuggagggcgaggugaacaagaucaagagcgcccugcugagcaccaacaaggccguggugagccugagcggcugcggcgugagcgugcugaccuucaaggugcuggaccugaagaacuacaucgacaagcagcugcugcccauccugaacaagcagagcugcagcauccccaacaucgagaccgugaucgaguuccagcagaagaacaacagacugcuggagaucaccagagaguucagcgugaacgccggcgugaccacccccgugagcaccuacaugcugaccaacagcgagcugcugagccugaucaacgacaugcccaucaccaacgaccagaagaagcugaugagcaacaacgugcagaucgugagacagcagagcuacagcaucaugugcaucaucaaggaggaggugcuggccuacguggugcagcugccccuguacggcgugaucgacacccccugcuggaagcugcacaccagcccccugugcaccaccaacaccaaggagggcagcaacaucugccugaccagaaccgacagaggcugguacugcgacaacgccggcagcgugagcuucuucccccaggccgagaccugcaaggugcagagcaacagaguguucugcgacaccaugaacagccugacccugcccagcgaggugaaccugugcaacguggacaucuucaaccccaaguacgacugcaagaucaugaccagcaagaccgacgugagcagcagcgugaucaccagccugggcgccaucgugagcugcuacggcaagaccaagugcaccgccagcaacaagugcagaggcaucaucaagaccuucagcaacggcugcgacuacgugagcaacaagggcguggacaccgugagcgugggcaacacccuguacuacgugaacaagcaggagggccagagccuguacgugaagggcgagcccaucaucaacuucuacgacccccugguguuccccagcgacgaguucgacgccagcaucagccaggugaacgagaagaucaaccagagccuggccuucaucagaaagagcgacgagcugcugcacaacgugaacgccggcaagagcaccaccaacaucaugaucaccaccaucaucaucgugaucaucgugauccugcugagccugaucgccgugggccugcugcuguacugcaaggccagaagcacccccgugacccugagcaaggaccagcugagcggcaucaacaacaucgccuucagcaacugaggacuaguguccaccugucccuccugggcugcuggauugucucguuuuccugccaaauaaacaggaucagcgcuuuacagaucuaaaaaaaaaaaaaaaaaaaaaaaaaaaaaaaaaaaaaaaaaaaaaaaaaaaaaaaaaaaaaaaaugcaucccccccccccccccccccccccccccccccaaaggcucuuuucagagccaccagaauu

SEQ ID NO: 7882 - RNA, 1997 nt, Artificial Sequence
  mRNA product Design i-1 comprising derived and/or modified sequence from HRSV(A2)__F_DSCav1_mut8 (opt5)
gggagagggcgcuuggcuugcaaggacccugagcugcggcauugaagcacacccaacccaacucgacugaagucagccucacugaaccggaucugagaaucuucucucucugggcuugccagggcucuccgaaccuagcuagcauccucuucaauuccaacuagaaagcuuaccauggagcugcucauccugaaggccaacgcuauuaccacaauccuuacggccgugaccuucugcuuugcgagcggccagaauauuacagaagaguucuaccaauccaccuguucugcugucagcaaaggguaucugggagcccucagaacaggcugguacaccuccguuaucacaauugaacugucuaacaucaaggagaucaaaugcaaugggaccgacgccaaggugaaacuuauuaagcaggaacuggauaaguauaaaaacgcugugacggaccuccagcugcugaugcagagcacccccgccacaggauccggcucugcuaucgccagcggggucgcgguguguaagguucuccaccuggagggagaggugaauaaaauuaaguccgcccuucugagcaccaacaaagcugucgugucucucuccggcugcggcguuagcgugcugacauuuaagguccuugaucugaagaauuacaucgacaaacaacuccugccuauucugaacaagcagucuuguuccaucccgaauauugaaaccgugaucgaguuccagcagaaaaacaaucggcuccuggaaaucacgcgcgaguuuagcgugaacgccggggucacaacccccguuucuacauauaugcuuaccaauuccgagcugcucagccugauuaacgauaugccuaucaccaaugaccaaaagaaacuuauguccaacaacgugcagauugugagacagcagucuuacagcaucaugugcauuaucaaggaagagguccuggcuuaugugguucaacucccccuguacggagugaucgauacaccuuguuggaaacugcauacgagcccccucugcaccacaaauaccaaggaaggcagcaacauuugucugacacggaccgaccgcgggugguacugcgauaaugccggaucugucuccuucuuuccucaggcggagacguguaaggugcagagcaacagaguuuucugcgacacaaugaacucucuuacccugccgagcgaagugaaucucugcaaugucgauaucuuuaaccccaaauaugacuguaagauuaugaccuccaaaacagaugugucuagcuccgucaucaccagccugggcgccauugugucuugcuacgggaagacaaaauguacggcuuccaauaagugccggggaaucaucaagaccuucagcaacggcugugacuauguuucuaauaaaggcguggacacagucuccguggggaacacccuuuacuauguuaauaagcaagagggacagagccuguacgugaaaggcgagccuauuaucaacuuuuaugauccccucgucuucccuuccgacgaauuugaugccucuauuagccaggugaaugagaagaucaaccagucccuggcuuucauucgcaaaucugacgaacugcuccacaacgugaaugccgggaaguccacaaccaacaucaugauuacgaccaucaucauuguuaucauugucauccugcuuucccugauugccgugggacuccugcuguacugcaaggcuagaagcacacccgugacccuuucuaaagaucaacucuccggcaucaauaacaucgcguucagcaauugaggacuaguguccaccugucccuccugggcugcuggauugucucguuuuccugccaaauaaacaggaucagcgcuuuacagaucuaaaaaaaaaaaaaaaaaaaaaaaaaaaaaaaaaaaaaaaaaaaaaaaaaaaaaaaaaaaaaaaaugcaucccccccccccccccccccccccccccccccaaaggcucuuuucagagccaccagaauu

SEQ ID NO: 7883 - RNA, 1997 nt, Artificial Sequence
  mRNA product Design i-1 comprising derived and/or modified sequence from HRSV(A2)__F_DSCav1_mut8 (opt6)
gggagagggcgcuuggcuugcaaggacccugagcugcggcauugaagcacacccaacccaacucgacugaagucagccucacugaaccggaucugagaaucuucucucucugggcuugccagggcucuccgaaccuagcuagcauccucuucaauuccaacuagaaagcuuaccauggaacuauuaauauuaaaagcaaacgcaaucacaacuauacuaacagcaguaacauucugcuuugccucaggucaaaacauaacagaggaauuuuaccaauccacaugcucugcuguaagcaaaggauaccucggagcauuaagaacuggaugguacaccucaguaauaacuauagaacuaucaaacauaaaagaaauaaaauguaauggcacagacgcaaaagugaaauuaaucaaacaagaacucgauaaauacaaaaaugccguaaccgaucuccaacuuuuaaugcaaagcacacccgcaacagguuccgggucagcaauagcaagcggaguugcaguaugcaaaguacuacacuuagaaggagaaguaaauaaaaucaaaucagccuuacuaucaacaaauaaagcaguuguaucacucucaggaugcggaguauccguacuaacauuuaaaguacuagaucuaaaaaacuacauagauaaacaacucuuaccaauacuaaauaaacaaucauguuccauacccaacauagaaaccguuaucgaauuucaacaaaaaaacaacagauuacuagaaaucacacgagaauuuucaguaaaugcuggagucacaacaccaguuaguacauacaugcucaccaauucagaacuacuaaguuuaauuaacgauaugccaauaacaaacgaccaaaaaaaacuaaugucaaauaacguacaaauaguaagacaacaaucauacucaaucaugugcauaauaaaagaagaaguacuagccuauguaguccaauuaccacucuacggcguaaucgacaccccaugcuggaaauuacacacaagcccauuaugcaccaccaacacaaaagaagguucaaacauuugcuuaaccagaaccgaucgaggaugguacugcgauaacgcaggaucugucuccuuuuucccacaagccgaaacaugcaaaguucaaucaaaccgaguuuucugugacacuaugaacucacucacacuuccaagcgaaguaaaccuaugcaacguagauauauuuaacccuaaauacgacugcaaaauaaugacaagcaaaacagacguuaguucaucaguaauuacaagucuaggcgcaauagugucaugcuacggaaaaacaaaaugcaccgcauccaauaaaugccgaggaaucauuaaaacauucucaaacggaugcgacuacgucagcaauaaaggaguagacacuguuucuguaggaaacacccuauacuauguaaacaaacaagaaggucaaucacuauacguaaagggagaaccaauuauaaauuuuuacgaccccuuaguauuuccaagugaugaauuugacgcaucuauaagucaaguuaacgaaaaaauuaaccaaucacuugcauuuauaagaaaaucagacgaacuacuccauaauguaaacgcagguaaaucaacaacaaacaucaugaucacaaccauaauaauaguaauaauuguaauauuacuaucacuaauagcaguaggauuacuacucuacugcaaagcuagaucuaccccggucacacucucaaaagaccaauuaucuggaauaaacaauauagcauucagcaacuaaggacuaguguccaccugucccuccugggcugcuggauugucucguuuuccugccaaauaaacaggaucagcgcuuuacagaucuaaaaaaaaaaaaaaaaaaaaaaaaaaaaaaaaaaaaaaaaaaaaaaaaaaaaaaaaaaaaaaaaugcaucccccccccccccccccccccccccccccccaaaggcucuuuucagagccaccagaauu

SEQ ID NO: 7884 - RNA, 1997 nt, Artificial Sequence
  mRNA product Design i-1 comprising derived and/or modified sequence from HRSV(A2)__F_DSCav1_mut8 (opt11)
gggagagggcgcuuggcuugcaaggacccugagcugcggcauugaagcacacccaacccaacucgacugaagucagccucacugaaccggaucugagaaucuucucucucugggcuugccagggcucuccgaaccuagcuagcauccucuucaauuccaacuagaaagcuuaccauggaacuccucauccuuaaagccaacgccauaaccaccauccucaccgccgucaccuucugcuucgcuucuggccaaaacauaaccgaagaguucuaccaauccacgugcucugccgugucaaaaggcuaccucggagcccuccgcacagggugguacacuuccgucaucaccaucgaacucucuaacaucaaagaaaucaagugcaacggcacagacgcgaaagucaagcucaucaaacaagaacuagacaaauacaaaaacgccguaacagaccuccaacuccuaaugcaguccacaccagccacaggcuccggcagcgccaucgccuccggcgucgcugucugcaaaguccuacaccucgaaggcgaagucaacaaaaucaagucagcccuccuuagcaccaacaaagcagucgucucuuuaagcgggugcggagucucuguccuaaccuuuaaaguacucgaccucaaaaacuacaucgacaaacaacuacuaccaauacuaaacaaacagagcugcuccauucccaacaucgaaaccguuaucgaguuccaacaaaagaacaaccgccuccucgaaaucacccgcgaguucuccgucaacgcaggcgucaccaccccagucuccaccuauaugcuaaccaacagcgaacuccucagccucaucaaugacaugccaaucaccaacgaccaaaagaaacucauguccaacaacguacagauaguccgccagcaguccuacagcaucaugugcaucaucaaagaagaagugcucgccuacgugguacaacucccucucuacggagucauugauacacccugcuggaaacuccacacaagcccccucugcacuacaaacaccaaagaaggcucuaacauaugccucacccgcacagaccgugguugguacugcgacaacgccggcuccguauccuucuuuccacaagcugaaaccugcaaaguucaaucaaaccgagucuucugcgacaccaugaacucccucacauugcccagcgaagucaaccucugcaacgucgacaucuucaaccccaaguacgacugcaaaaucaugaccuccaaaaccgacgucagcuccagcgugaucacaagccuaggcgcgaucgucagcugcuacggcaaaaccaaaugcacagccuccaacaaaugccgcggaaucauaaaaacauucaguaacggcugcgacuacguguccaauaaaggagucgacaccguauccgucggaaacacccucuacuacgucaacaaacaagaaggacaaucccucuaugucaaaggcgaacccauuaucaacuucuacgacccccuaguuuuccccuccgacgaguucgacgcaagcauuucccaagucaacgaaaagaucaaucaaucccucgccuucauacgcaaaagcgacgaacuacuacacaacguaaacgccggcaaaagcaccaccaacaucaugaucacaacaaucaucaucgucaucaucgucauccuacucucacucaucgccguuggccuacuacucuacugcaaagcccgcuccacacccgucacccucucaaaagaccaacucuccggcaucaacaacaucgcauucagcaacugaggacuaguguccaccugucccuccugggcugcuggauugucucguuuuccugccaaauaaacaggaucagcgcuuuacagaucuaaaaaaaaaaaaaaaaaaaaaaaaaaaaaaaaaaaaaaaaaaaaaaaaaaaaaaaaaaaaaaaaugcaucccccccccccccccccccccccccccccccaaaggcucuuuucagagccaccagaauu

SEQ ID NO: 7885 - RNA, 1997 nt, Artificial Sequence
  mRNA product Design i-2 comprising derived and/or modified sequence from HRSV(A2)__F_DSCav1_mut8 (opt1)
gggagaggcgcugccuacggagguggcagccaucuccuucucggcaucaagcuuaccauggagcugcucauccugaaggccaacgccaucaccaccauccugacggcggugaccuucugcuucgccagcggccagaacaucaccgaggaguucuaccaguccacgugcagcgccgucuccaagggguaccucggcgcccugcggaccggcugguacaccuccgugaucaccaucgagcugagcaacaucaaggagaucaagugcaacgggaccgacgccaaggugaagcucaucaagcaggagcuggacaaguacaagaacgcggucacggaccugcagcuccugaugcaguccaccccggcaaccggcuccggcuccgccaucgcgagcggcgucgccgugugcaaggugcugcaccucgagggggaggucaacaagaucaagagcgcccugcuguccaccaacaaggccguggugagccucuccggcugcggcgucagcgugcugaccuucaaggugcuggaccucaagaacuacaucgacaagcagcugcugcccauccugaacaagcagagcugcuccauccccaacaucgagacggugaucgaguuccagcagaagaacaaccggcuccuggagaucacccgcgaguucagcgugaacgccggggucaccacccccguguccacguacaugcugaccaacagcgagcuccugucccugaucaacgacaugccgaucaccaacgaccagaagaagcucaugagcaacaacgugcagaucguccggcagcaguccuacagcaucaugugcaucaucaaggaggaggugcuggcguacgugguccagcugccccucuacggcgugaucgacacccccugcuggaagcugcacacgagcccccugugcaccaccaacaccaaggagggguccaacaucugccucacgcgcaccgaccggggcugguacugcgacaacgccggcagcgucuccuucuucccgcaggccgagaccugcaaggugcagagcaaccgcguguucugcgacaccaugaacucccugacgcugcccagcgagguaaaccucugcaacgucgacaucuucaaccccaaguacgacugcaagaucaugaccuccaagaccgacgugagcuccagcgugaucaccucccugggggccaucgucagcugcuacggcaagacgaagugcaccgccagcaacaagugccgggggaucaucaagaccuucuccaacggcugcgacuacgugagcaacaagggcguggacaccguguccgucgggaacacccuguacuacgugaacaagcaggagggccagagccucuacgugaagggggagcccaucaucaacuucuacgacccgcuggucuuccccuccgacgaguucgacgcgagcaucucccaggugaacgagaagaucaaccagagccuggccuucauccgcaaguccgacgagcugcuccacaacgugaacgccggcaagagcacgaccaacaucaugaucaccaccaucaucaucgucaucaucgugauccugcugucccucaucgccguggggcugcugcucuacugcaaggcccggagcacgcccgucacccuguccaaggaccagcugagcggcaucaacaacaucgcguucuccaacugaggacuagugcaucacauuuaaaagcaucucagccuaccaugagaauaagagaaagaaaaugaagaucaauagcuuauucaucucuuuuucuuuuucguugguguaaagccaacacccugucuaaaaaacauaaauuucuuuaaucauuuugccucuuuucucugugcuucaauuaauaaaaaauggaaagaaccuagaucuaaaaaaaaaaaaaaaaaaaaaaaaaaaaaaaaaaaaaaaaaaaaaaaaaaaaaaaaaaaaaaaaugcaucccccccccccccccccccccccccccccccaaaggcucuuuucagagccaccagaauu

SEQ ID NO: 7886 - RNA, 1997 nt, Artificial Sequence
  mRNA product Design i-2 comprising derived and/or modified sequence from HRSV(A2)__F_DSCav1_mut8 (opt1)
gggagaggcgcugccuacggagguggcagccaucuccuucucggcaucaagcuuaccauggagcugcucauccugaaggccaacgccaucaccaccauccugacggcggugaccuucugcuucgccagcggccagaacaucaccgaggaguucuaccaguccacgugcagcgccgucuccaagggguaccucggcgcccugcgcaccgggugguacaccagcgugaucaccaucgagcuguccaacaucaaggagaucaagugcaacggcaccgacgccaaggugaagcucaucaagcaggagcuggacaaguacaagaacgcggucacggaccugcagcuccugaugcagagcacccccgccaccggguccggcagcgccaucgccuccggcguggcggugugcaagguccugcaccucgagggggaggugaacaagaucaagagcgcccugcuguccaccaacaaggccguggucagccucuccggcugcggggugagcgugcugacguucaagguccuggaccucaagaacuacaucgacaagcagcugcugccgauccucaacaagcaguccugcagcauccccaacaucgagaccgugaucgaguuccagcagaagaacaaccggcugcuggagaucacccgcgaguucuccgugaacgccggcgucaccacgcccgugagcaccuacaugcucaccaacuccgagcugcugagccucaucaacgacaugcccaucaccaacgaccagaagaagcugaugagcaacaacgugcagaucguccggcagcaguccuacagcaucaugugcaucaucaaggaggaggugcuggccuacgugguccagcucccgcuguacggggugaucgacacgcccugcuggaagcugcacaccagcccccucugcaccaccaacacgaaggagggcuccaacaucugccugacccgcaccgaccggggcugguacugcgacaacgcgggguccgugagcuucuucccccaggccgagaccugcaagguccaguccaaccgcguguucugcgacacgaugaacagccugacccucccguccgaggucaaccugugcaacguggacaucuucaaccccaaguacgacugcaagaucaugaccagcaagaccgacguguccagcuccgucaucacgagccugggcgccaucguguccugcuacgggaagaccaagugcaccgccagcaacaagugccggggcaucaucaagaccuucuccaacggcugcgacuacgugagcaacaagggggucgacacgguguccgugggcaacacccucuacuacgucaacaagcaggaggggcagagccuguacgugaagggcgagcccaucaucaacuucuacgacccccugguguucccgagcgacgaguucgacgccuccaucagccaggucaacgagaagaucaaccagucccucgcguucauccgcaagagcgacgagcugcugcacaacgugaacgccgggaaguccaccaccaacaucaugaucaccacgaucaucaucgugaucaucgucauccuccugagccugaucgccgugggccuccugcuguacugcaaggcccgguccacccccgugacccugagcaaggaccagcucuccggcaucaacaacaucgccuucagcaacugaggacuagugcaucacauuuaaaagcaucucagccuaccaugagaauaagagaaagaaaaugaagaucaauagcuuauucaucucuuuuucuuuuucguugguguaaagccaacacccugucuaaaaaacauaaauuucuuuaaucauuuugccucuuuucucugugcuucaauuaauaaaaaauggaaagaaccuagaucuaaaaaaaaaaaaaaaaaaaaaaaaaaaaaaaaaaaaaaaaaaaaaaaaaaaaaaaaaaaaaaaaugcaucccccccccccccccccccccccccccccccaaaggcucuuuucagagccaccagaauu

SEQ ID NO: 7887 - RNA, 1997 nt, Artificial Sequence
  mRNA product Design i-2 comprising derived and/or modified sequence from HRSV(A2)__F_DSCav1_mut8 (opt2)
gggagaggcgcugccuacggagguggcagccaucuccuucucggcaucaagcuuaccauggagcuccucauccucaaggccaacgccaucaccaccauccucaccgccgucaccuucugcuucgccuccggccagaacaucaccgaggaguucuaccaguccaccugcuccgccgucuccaagggcuaccucggcgcccuccgcaccggcugguacaccuccgucaucaccaucgagcucuccaacaucaaggagaucaagugcaacggcaccgacgccaaggucaagcucaucaagcaggagcucgacaaguacaagaacgccgucaccgaccuccagcuccucaugcaguccacccccgccaccggcuccggcuccgccaucgccuccggcgucgccgucugcaagguccuccaccucgagggcgaggucaacaagaucaaguccgcccuccucuccaccaacaaggccgucgucucccucuccggcugcggcgucuccguccucaccuucaagguccucgaccucaagaacuacaucgacaagcagcuccuccccauccucaacaagcaguccugcuccauccccaacaucgagaccgucaucgaguuccagcagaagaacaaccgccuccucgagaucacccgcgaguucuccgucaacgccggcgucaccacccccgucuccaccuacaugcucaccaacuccgagcuccucucccucaucaacgacaugcccaucaccaacgaccagaagaagcucauguccaacaacguccagaucguccgccagcaguccuacuccaucaugugcaucaucaaggaggagguccucgccuacgucguccagcucccccucuacggcgucaucgacacccccugcuggaagcuccacaccuccccccucugcaccaccaacaccaaggagggcuccaacaucugccucacccgcaccgaccgcggcugguacugcgacaacgccggcuccgucuccuucuucccccaggccgagaccugcaagguccaguccaaccgcgucuucugcgacaccaugaacucccucacccuccccuccgaggucaaccucugcaacgucgacaucuucaaccccaaguacgacugcaagaucaugaccuccaagaccgacgucuccuccuccgucaucaccucccucggcgccaucgucuccugcuacggcaagaccaagugcaccgccuccaacaagugccgcggcaucaucaagaccuucuccaacggcugcgacuacgucuccaacaagggcgucgacaccgucuccgucggcaacacccucuacuacgucaacaagcaggagggccagucccucuacgucaagggcgagcccaucaucaacuucuacgacccccucgucuuccccuccgacgaguucgacgccuccaucucccaggucaacgagaagaucaaccagucccucgccuucauccgcaaguccgacgagcuccuccacaacgucaacgccggcaaguccaccaccaacaucaugaucaccaccaucaucaucgucaucaucgucauccuccucucccucaucgccgucggccuccuccucuacugcaaggcccgcuccacccccgucacccucuccaaggaccagcucuccggcaucaacaacaucgccuucuccaacugaggacuagugcaucacauuuaaaagcaucucagccuaccaugagaauaagagaaagaaaaugaagaucaauagcuuauucaucucuuuuucuuuuucguugguguaaagccaacacccugucuaaaaaacauaaauuucuuuaaucauuuugccucuuuucucugugcuucaauuaauaaaaaauggaaagaaccuagaucuaaaaaaaaaaaaaaaaaaaaaaaaaaaaaaaaaaaaaaaaaaaaaaaaaaaaaaaaaaaaaaaaugcaucccccccccccccccccccccccccccccccaaaggcucuuuucagagccaccagaauu

SEQ ID NO: 7888 - RNA, 1997 nt, Artificial Sequence
  mRNA product Design i-2 comprising derived and/or modified sequence from HRSV(A2)__F_DSCav1_mut8 (opt3)
gggagaggcgcugccuacggagguggcagccaucuccuucucggcaucaagcuuaccauggagcugcucauccuuaaggccaacgcuauuaccacaauacugacugcagugacguucugcuuugccagcggccagaauaucaccgaagaguucuaccaauccacauguucugcggucucaaaaggguauuugggagcuuuaagaacugguugguacaccaguguuauuacaaucgaacugagcaacauuaaggagaucaaaugcaauggcaccgacgccaaggugaaacuaauaaagcaggaacucgauaaguauaaaaacgcaguaacugaccugcagcuucugaugcaguccacacccgccaccgggucuggaucggcuaucgcaucaggcguggccgucuguaagguguugcaccucgagggugagguuaauaaaauuaagagcgcucugcugaguacgaacaaagccguggucucccucucugggugcggagugagcguauuaacuuuuaagguucuggaucuuaagaauuacaucgacaaacaauugcugccuauucuaaacaagcaguccuguucaaucccaaauauagaaaccgugauugaguuccagcagaaaaacaauaggcuccuggaaaucacacgggaguuuagugucaacgcgggcgugacuaccccggugagcacauauaugcuuaccaauucugagcuguugucccucauuaacgauaugcccaucacgaaugaccaaaagaaacugaugucaaacaacguccagaucguucgccagcagagcuacaguauuaugugcauaaucaaggaagagguguuagcauauguagugcaacugccucucuacggcgucauugauacuccauguuggaaacuucauacaucuccccugugcaccacuaauacaaaggaaggguccaacaucuguuugacccgaacggaccguggaugguacugcgauaaugccgguagcgugucguucuuuccucaggcugagaccuguaagguucagucuaacagaguguucugcgacacaaugaacucccuaacucugccaucagaagucaaucucugcaauguggauauauuuaaccccaaauaugacuguaagauuaugaccaguaaaacagauguaagcuccucuguuaucacuagccugggcgccaucgugucaugcuacgggaagaccaaauguacagcaaguaauaagugcaggggaauuaucaagaccuucuccaacggcugugacuaugucagcaauaaagguguggacacugucucuguggggaacacgcuuuacuauguuaauaagcaagagggacagucacuguacgugaaaggcgagccuauuauaaacuuuuaugauccauugguauucccgagugacgaauuugaugcuagcaucucccaggucaaugagaagauuaaccagucucucgccuucauccggaaaucggacgaacuguuacacaacgugaaugcgggcaagagcacaaccaacaucaugauuacuaccauaaucauuguuaucauugugauccugcuaucccucauagccgucgggcugcuuuuguacugcaaggcacgcucaacacccgugacccugaguaaagaucaacucucuggaaucaauaacauugcuuucagcaauugaggacuagugcaucacauuuaaaagcaucucagccuaccaugagaauaagagaaagaaaaugaagaucaauagcuuauucaucucuuuuucuuuuucguugguguaaagccaacacccugucuaaaaaacauaaauuucuuuaaucauuuugccucuuuucucugugcuucaauuaauaaaaaauggaaagaaccuagaucuaaaaaaaaaaaaaaaaaaaaaaaaaaaaaaaaaaaaaaaaaaaaaaaaaaaaaaaaaaaaaaaaugcaucccccccccccccccccccccccccccccccaaaggcucuuuucagagccaccagaauu

SEQ ID NO: 7889 - RNA, 1997 nt, Artificial Sequence
  mRNA product Design i-2 comprising derived and/or modified sequence from HRSV(A2)__F_DSCav1_mut8 (opt4)
gggagaggcgcugccuacggagguggcagccaucuccuucucggcaucaagcuuaccauggagcugcugauccugaaggccaacgccaucaccaccauccugaccgccgugaccuucugcuucgccagcggccagaacaucaccgaggaguucuaccagagcaccugcagcgccgugagcaagggcuaccugggcgcccugagaaccggcugguacaccagcgugaucaccaucgagcugagcaacaucaaggagaucaagugcaacggcaccgacgccaaggugaagcugaucaagcaggagcuggacaaguacaagaacgccgugaccgaccugcagcugcugaugcagagcacccccgccaccggcagcggcagcgccaucgccagcggcguggccgugugcaaggugcugcaccuggagggcgaggugaacaagaucaagagcgcccugcugagcaccaacaaggccguggugagccugagcggcugcggcgugagcgugcugaccuucaaggugcuggaccugaagaacuacaucgacaagcagcugcugcccauccugaacaagcagagcugcagcauccccaacaucgagaccgugaucgaguuccagcagaagaacaacagacugcuggagaucaccagagaguucagcgugaacgccggcgugaccacccccgugagcaccuacaugcugaccaacagcgagcugcugagccugaucaacgacaugcccaucaccaacgaccagaagaagcugaugagcaacaacgugcagaucgugagacagcagagcuacagcaucaugugcaucaucaaggaggaggugcuggccuacguggugcagcugccccuguacggcgugaucgacacccccugcuggaagcugcacaccagcccccugugcaccaccaacaccaaggagggcagcaacaucugccugaccagaaccgacagaggcugguacugcgacaacgccggcagcgugagcuucuucccccaggccgagaccugcaaggugcagagcaacagaguguucugcgacaccaugaacagccugacccugcccagcgaggugaaccugugcaacguggacaucuucaaccccaaguacgacugcaagaucaugaccagcaagaccgacgugagcagcagcgugaucaccagccugggcgccaucgugagcugcuacggcaagaccaagugcaccgccagcaacaagugcagaggcaucaucaagaccuucagcaacggcugcgacuacgugagcaacaagggcguggacaccgugagcgugggcaacacccuguacuacgugaacaagcaggagggccagagccuguacgugaagggcgagcccaucaucaacuucuacgacccccugguguuccccagcgacgaguucgacgccagcaucagccaggugaacgagaagaucaaccagagccuggccuucaucagaaagagcgacgagcugcugcacaacgugaacgccggcaagagcaccaccaacaucaugaucaccaccaucaucaucgugaucaucgugauccugcugagccugaucgccgugggccugcugcuguacugcaaggccagaagcacccccgugacccugagcaaggaccagcugagcggcaucaacaacaucgccuucagcaacugaggacuagugcaucacauuuaaaagcaucucagccuaccaugagaauaagagaaagaaaaugaagaucaauagcuuauucaucucuuuuucuuuuucguugguguaaagccaacacccugucuaaaaaacauaaauuucuuuaaucauuuugccucuuuucucugugcuucaauuaauaaaaaauggaaagaaccuagaucuaaaaaaaaaaaaaaaaaaaaaaaaaaaaaaaaaaaaaaaaaaaaaaaaaaaaaaaaaaaaaaaaugcaucccccccccccccccccccccccccccccccaaaggcucuuuucagagccaccagaauu

SEQ ID NO: 7890 - RNA, 1997 nt, Artificial Sequence
  mRNA product Design i-2 comprising derived and/or modified sequence from HRSV(A2)__F_DSCav1_mut8 (opt5)
gggagaggcgcugccuacggagguggcagccaucuccuucucggcaucaagcuuaccauggagcugcucauccugaaggccaacgcuauuaccacaauccuuacggccgugaccuucugcuuugcgagcggccagaauauuacagaagaguucuaccaauccaccuguucugcugucagcaaaggguaucugggagcccucagaacaggcugguacaccuccguuaucacaauugaacugucuaacaucaaggagaucaaaugcaaugggaccgacgccaaggugaaacuuauuaagcaggaacuggauaaguauaaaaacgcugugacggaccuccagcugcugaugcagagcacccccgccacaggauccggcucugcuaucgccagcggggucgcgguguguaagguucuccaccuggagggagaggugaauaaaauuaaguccgcccuucugagcaccaacaaagcugucgugucucucuccggcugcggcguuagcgugcugacauuuaagguccuugaucugaagaauuacaucgacaaacaacuccugccuauucugaacaagcagucuuguuccaucccgaauauugaaaccgugaucgaguuccagcagaaaaacaaucggcuccuggaaaucacgcgcgaguuuagcgugaacgccggggucacaacccccguuucuacauauaugcuuaccaauuccgagcugcucagccugauuaacgauaugccuaucaccaaugaccaaaagaaacuuauguccaacaacgugcagauugugagacagcagucuuacagcaucaugugcauuaucaaggaagagguccuggcuuaugugguucaacucccccuguacggagugaucgauacaccuuguuggaaacugcauacgagcccccucugcaccacaaauaccaaggaaggcagcaacauuugucugacacggaccgaccgcgggugguacugcgauaaugccggaucugucuccuucuuuccucaggcggagacguguaaggugcagagcaacagaguuuucugcgacacaaugaacucucuuacccugccgagcgaagugaaucucugcaaugucgauaucuuuaaccccaaauaugacuguaagauuaugaccuccaaaacagaugugucuagcuccgucaucaccagccugggcgccauugugucuugcuacgggaagacaaaauguacggcuuccaauaagugccggggaaucaucaagaccuucagcaacggcugugacuauguuucuaauaaaggcguggacacagucuccguggggaacacccuuuacuauguuaauaagcaagagggacagagccuguacgugaaaggcgagccuauuaucaacuuuuaugauccccucgucuucccuuccgacgaauuugaugccucuauuagccaggugaaugagaagaucaaccagucccuggcuuucauucgcaaaucugacgaacugcuccacaacgugaaugccgggaaguccacaaccaacaucaugauuacgaccaucaucauuguuaucauugucauccugcuuucccugauugccgugggacuccugcuguacugcaaggcuagaagcacacccgugacccuuucuaaagaucaacucuccggcaucaauaacaucgcguucagcaauugaggacuagugcaucacauuuaaaagcaucucagccuaccaugagaauaagagaaagaaaaugaagaucaauagcuuauucaucucuuuuucuuuuucguugguguaaagccaacacccugucuaaaaaacauaaauuucuuuaaucauuuugccucuuuucucugugcuucaauuaauaaaaaauggaaagaaccuagaucuaaaaaaaaaaaaaaaaaaaaaaaaaaaaaaaaaaaaaaaaaaaaaaaaaaaaaaaaaaaaaaaaugcaucccccccccccccccccccccccccccccccaaaggcucuuuucagagccaccagaauu

SEQ ID NO: 7891 - RNA, 1997 nt, Artificial Sequence
  mRNA product Design i-2 comprising derived and/or modified sequence from HRSV(A2)__F_DSCav1_mut8 (opt6)
gggagaggcgcugccuacggagguggcagccaucuccuucucggcaucaagcuuaccauggaacuauuaauauuaaaagcaaacgcaaucacaacuauacuaacagcaguaacauucugcuuugccucaggucaaaacauaacagaggaauuuuaccaauccacaugcucugcuguaagcaaaggauaccucggagcauuaagaacuggaugguacaccucaguaauaacuauagaacuaucaaacauaaaagaaauaaaauguaauggcacagacgcaaaagugaaauuaaucaaacaagaacucgauaaauacaaaaaugccguaaccgaucuccaacuuuuaaugcaaagcacacccgcaacagguuccgggucagcaauagcaagcggaguugcaguaugcaaaguacuacacuuagaaggagaaguaaauaaaaucaaaucagccuuacuaucaacaaauaaagcaguuguaucacucucaggaugcggaguauccguacuaacauuuaaaguacuagaucuaaaaaacuacauagauaaacaacucuuaccaauacuaaauaaacaaucauguuccauacccaacauagaaaccguuaucgaauuucaacaaaaaaacaacagauuacuagaaaucacacgagaauuuucaguaaaugcuggagucacaacaccaguuaguacauacaugcucaccaauucagaacuacuaaguuuaauuaacgauaugccaauaacaaacgaccaaaaaaaacuaaugucaaauaacguacaaauaguaagacaacaaucauacucaaucaugugcauaauaaaagaagaaguacuagccuauguaguccaauuaccacucuacggcguaaucgacaccccaugcuggaaauuacacacaagcccauuaugcaccaccaacacaaaagaagguucaaacauuugcuuaaccagaaccgaucgaggaugguacugcgauaacgcaggaucugucuccuuuuucccacaagccgaaacaugcaaaguucaaucaaaccgaguuuucugugacacuaugaacucacucacacuuccaagcgaaguaaaccuaugcaacguagauauauuuaacccuaaauacgacugcaaaauaaugacaagcaaaacagacguuaguucaucaguaauuacaagucuaggcgcaauagugucaugcuacggaaaaacaaaaugcaccgcauccaauaaaugccgaggaaucauuaaaacauucucaaacggaugcgacuacgucagcaauaaaggaguagacacuguuucuguaggaaacacccuauacuauguaaacaaacaagaaggucaaucacuauacguaaagggagaaccaauuauaaauuuuuacgaccccuuaguauuuccaagugaugaauuugacgcaucuauaagucaaguuaacgaaaaaauuaaccaaucacuugcauuuauaagaaaaucagacgaacuacuccauaauguaaacgcagguaaaucaacaacaaacaucaugaucacaaccauaauaauaguaauaauuguaauauuacuaucacuaauagcaguaggauuacuacucuacugcaaagcuagaucuaccccggucacacucucaaaagaccaauuaucuggaauaaacaauauagcauucagcaacuaaggacuagugcaucacauuuaaaagcaucucagccuaccaugagaauaagagaaagaaaaugaagaucaauagcuuauucaucucuuuuucuuuuucguugguguaaagccaacacccugucuaaaaaacauaaauuucuuuaaucauuuugccucuuuucucugugcuucaauuaauaaaaaauggaaagaaccuagaucuaaaaaaaaaaaaaaaaaaaaaaaaaaaaaaaaaaaaaaaaaaaaaaaaaaaaaaaaaaaaaaaaugcaucccccccccccccccccccccccccccccccaaaggcucuuuucagagccaccagaauu

SEQ ID NO: 7892 - RNA, 1997 nt, Artificial Sequence
  mRNA product Design i-2 comprising derived and/or modified sequence from HRSV(A2)__F_DSCav1_mut8 (opt11)
gggagaggcgcugccuacggagguggcagccaucuccuucucggcaucaagcuuaccauggaacuccucauccuuaaagccaacgccauaaccaccauccucaccgccgucaccuucugcuucgcuucuggccaaaacauaaccgaagaguucuaccaauccacgugcucugccgugucaaaaggcuaccucggagcccuccgcacagggugguacacuuccgucaucaccaucgaacucucuaacaucaaagaaaucaagugcaacggcacagacgcgaaagucaagcucaucaaacaagaacuagacaaauacaaaaacgccguaacagaccuccaacuccuaaugcaguccacaccagccacaggcuccggcagcgccaucgccuccggcgucgcugucugcaaaguccuacaccucgaaggcgaagucaacaaaaucaagucagcccuccuuagcaccaacaaagcagucgucucuuuaagcgggugcggagucucuguccuaaccuuuaaaguacucgaccucaaaaacuacaucgacaaacaacuacuaccaauacuaaacaaacagagcugcuccauucccaacaucgaaaccguuaucgaguuccaacaaaagaacaaccgccuccucgaaaucacccgcgaguucuccgucaacgcaggcgucaccaccccagucuccaccuauaugcuaaccaacagcgaacuccucagccucaucaaugacaugccaaucaccaacgaccaaaagaaacucauguccaacaacguacagauaguccgccagcaguccuacagcaucaugugcaucaucaaagaagaagugcucgccuacgugguacaacucccucucuacggagucauugauacacccugcuggaaacuccacacaagcccccucugcacuacaaacaccaaagaaggcucuaacauaugccucacccgcacagaccgugguugguacugcgacaacgccggcuccguauccuucuuuccacaagcugaaaccugcaaaguucaaucaaaccgagucuucugcgacaccaugaacucccucacauugcccagcgaagucaaccucugcaacgucgacaucuucaaccccaaguacgacugcaaaaucaugaccuccaaaaccgacgucagcuccagcgugaucacaagccuaggcgcgaucgucagcugcuacggcaaaaccaaaugcacagccuccaacaaaugccgcggaaucauaaaaacauucaguaacggcugcgacuacguguccaauaaaggagucgacaccguauccgucggaaacacccucuacuacgucaacaaacaagaaggacaaucccucuaugucaaaggcgaacccauuaucaacuucuacgacccccuaguuuuccccuccgacgaguucgacgcaagcauuucccaagucaacgaaaagaucaaucaaucccucgccuucauacgcaaaagcgacgaacuacuacacaacguaaacgccggcaaaagcaccaccaacaucaugaucacaacaaucaucaucgucaucaucgucauccuacucucacucaucgccguuggccuacuacucuacugcaaagcccgcuccacacccgucacccucucaaaagaccaacucuccggcaucaacaacaucgcauucagcaacugaggacuagugcaucacauuuaaaagcaucucagccuaccaugagaauaagagaaagaaaaugaagaucaauagcuuauucaucucuuuuucuuuuucguugguguaaagccaacacccugucuaaaaaacauaaauuucuuuaaucauuuugccucuuuucucugugcuucaauuaauaaaaaauggaaagaaccuagaucuaaaaaaaaaaaaaaaaaaaaaaaaaaaaaaaaaaaaaaaaaaaaaaaaaaaaaaaaaaaaaaaaugcaucccccccccccccccccccccccccccccccaaaggcucuuuucagagccaccagaauu

SEQ ID NO: 7893 - RNA, 1993 nt, Artificial Sequence
  mRNA product Design i-2 comprising derived and/or modified sequence from HRSV(A2)__F_DSCav1_mut8 (opt1)
ggggcgcugccuacggagguggcagccaucuccuucucggcaucaagcuuaccauggagcugcucauccugaaggccaacgccaucaccaccauccugacggcggugaccuucugcuucgccagcggccagaacaucaccgaggaguucuaccaguccacgugcagcgccgucuccaagggguaccucggcgcccugcggaccggcugguacaccuccgugaucaccaucgagcugagcaacaucaaggagaucaagugcaacgggaccgacgccaaggugaagcucaucaagcaggagcuggacaaguacaagaacgcggucacggaccugcagcuccugaugcaguccaccccggcaaccggcuccggcuccgccaucgcgagcggcgucgccgugugcaaggugcugcaccucgagggggaggucaacaagaucaagagcgcccugcuguccaccaacaaggccguggugagccucuccggcugcggcgucagcgugcugaccuucaaggugcuggaccucaagaacuacaucgacaagcagcugcugcccauccugaacaagcagagcugcuccauccccaacaucgagacggugaucgaguuccagcagaagaacaaccggcuccuggagaucacccgcgaguucagcgugaacgccggggucaccacccccguguccacguacaugcugaccaacagcgagcuccugucccugaucaacgacaugccgaucaccaacgaccagaagaagcucaugagcaacaacgugcagaucguccggcagcaguccuacagcaucaugugcaucaucaaggaggaggugcuggcguacgugguccagcugccccucuacggcgugaucgacacccccugcuggaagcugcacacgagcccccugugcaccaccaacaccaaggagggguccaacaucugccucacgcgcaccgaccggggcugguacugcgacaacgccggcagcgucuccuucuucccgcaggccgagaccugcaaggugcagagcaaccgcguguucugcgacaccaugaacucccugacgcugcccagcgagguaaaccucugcaacgucgacaucuucaaccccaaguacgacugcaagaucaugaccuccaagaccgacgugagcuccagcgugaucaccucccugggggccaucgucagcugcuacggcaagacgaagugcaccgccagcaacaagugccgggggaucaucaagaccuucuccaacggcugcgacuacgugagcaacaagggcguggacaccguguccgucgggaacacccuguacuacgugaacaagcaggagggccagagccucuacgugaagggggagcccaucaucaacuucuacgacccgcuggucuuccccuccgacgaguucgacgcgagcaucucccaggugaacgagaagaucaaccagagccuggccuucauccgcaaguccgacgagcugcuccacaacgugaacgccggcaagagcacgaccaacaucaugaucaccaccaucaucaucgucaucaucgugauccugcugucccucaucgccguggggcugcugcucuacugcaaggcccggagcacgcccgucacccuguccaaggaccagcugagcggcaucaacaacaucgcguucuccaacugaggacuagugcaucacauuuaaaagcaucucagccuaccaugagaauaagagaaagaaaaugaagaucaauagcuuauucaucucuuuuucuuuuucguugguguaaagccaacacccugucuaaaaaacauaaauuucuuuaaucauuuugccucuuuucucugugcuucaauuaauaaaaaauggaaagaaccuagaucuaaaaaaaaaaaaaaaaaaaaaaaaaaaaaaaaaaaaaaaaaaaaaaaaaaaaaaaaaaaaaaaaugcaucccccccccccccccccccccccccccccccaaaggcucuuuucagagccaccagaauu

SEQ ID NO: 7894 - RNA, 1993 nt, Artificial Sequence
  mRNA product Design i-2 comprising derived and/or modified sequence from HRSV(A2)__F_DSCav1_mut8 (opt1)
ggggcgcugccuacggagguggcagccaucuccuucucggcaucaagcuuaccauggagcugcucauccugaaggccaacgccaucaccaccauccugacggcggugaccuucugcuucgccagcggccagaacaucaccgaggaguucuaccaguccacgugcagcgccgucuccaagggguaccucggcgcccugcgcaccgggugguacaccagcgugaucaccaucgagcuguccaacaucaaggagaucaagugcaacggcaccgacgccaaggugaagcucaucaagcaggagcuggacaaguacaagaacgcggucacggaccugcagcuccugaugcagagcacccccgccaccggguccggcagcgccaucgccuccggcguggcggugugcaagguccugcaccucgagggggaggugaacaagaucaagagcgcccugcuguccaccaacaaggccguggucagccucuccggcugcggggugagcgugcugacguucaagguccuggaccucaagaacuacaucgacaagcagcugcugccgauccucaacaagcaguccugcagcauccccaacaucgagaccgugaucgaguuccagcagaagaacaaccggcugcuggagaucacccgcgaguucuccgugaacgccggcgucaccacgcccgugagcaccuacaugcucaccaacuccgagcugcugagccucaucaacgacaugcccaucaccaacgaccagaagaagcugaugagcaacaacgugcagaucguccggcagcaguccuacagcaucaugugcaucaucaaggaggaggugcuggccuacgugguccagcucccgcuguacggggugaucgacacgcccugcuggaagcugcacaccagcccccucugcaccaccaacacgaaggagggcuccaacaucugccugacccgcaccgaccggggcugguacugcgacaacgcgggguccgugagcuucuucccccaggccgagaccugcaagguccaguccaaccgcguguucugcgacacgaugaacagccugacccucccguccgaggucaaccugugcaacguggacaucuucaaccccaaguacgacugcaagaucaugaccagcaagaccgacguguccagcuccgucaucacgagccugggcgccaucguguccugcuacgggaagaccaagugcaccgccagcaacaagugccggggcaucaucaagaccuucuccaacggcugcgacuacgugagcaacaagggggucgacacgguguccgugggcaacacccucuacuacgucaacaagcaggaggggcagagccuguacgugaagggcgagcccaucaucaacuucuacgacccccugguguucccgagcgacgaguucgacgccuccaucagccaggucaacgagaagaucaaccagucccucgcguucauccgcaagagcgacgagcugcugcacaacgugaacgccgggaaguccaccaccaacaucaugaucaccacgaucaucaucgugaucaucgucauccuccugagccugaucgccgugggccuccugcuguacugcaaggcccgguccacccccgugacccugagcaaggaccagcucuccggcaucaacaacaucgccuucagcaacugaggacuagugcaucacauuuaaaagcaucucagccuaccaugagaauaagagaaagaaaaugaagaucaauagcuuauucaucucuuuuucuuuuucguugguguaaagccaacacccugucuaaaaaacauaaauuucuuuaaucauuuugccucuuuucucugugcuucaauuaauaaaaaauggaaagaaccuagaucuaaaaaaaaaaaaaaaaaaaaaaaaaaaaaaaaaaaaaaaaaaaaaaaaaaaaaaaaaaaaaaaaugcaucccccccccccccccccccccccccccccccaaaggcucuuuucagagccaccagaauu

SEQ ID NO: 7895 - RNA, 1993 nt, Artificial Sequence
  mRNA product Design i-2 comprising derived and/or modified sequence from HRSV(A2)__F_DSCav1_mut8 (opt2)
ggggcgcugccuacggagguggcagccaucuccuucucggcaucaagcuuaccauggagcuccucauccucaaggccaacgccaucaccaccauccucaccgccgucaccuucugcuucgccuccggccagaacaucaccgaggaguucuaccaguccaccugcuccgccgucuccaagggcuaccucggcgcccuccgcaccggcugguacaccuccgucaucaccaucgagcucuccaacaucaaggagaucaagugcaacggcaccgacgccaaggucaagcucaucaagcaggagcucgacaaguacaagaacgccgucaccgaccuccagcuccucaugcaguccacccccgccaccggcuccggcuccgccaucgccuccggcgucgccgucugcaagguccuccaccucgagggcgaggucaacaagaucaaguccgcccuccucuccaccaacaaggccgucgucucccucuccggcugcggcgucuccguccucaccuucaagguccucgaccucaagaacuacaucgacaagcagcuccuccccauccucaacaagcaguccugcuccauccccaacaucgagaccgucaucgaguuccagcagaagaacaaccgccuccucgagaucacccgcgaguucuccgucaacgccggcgucaccacccccgucuccaccuacaugcucaccaacuccgagcuccucucccucaucaacgacaugcccaucaccaacgaccagaagaagcucauguccaacaacguccagaucguccgccagcaguccuacuccaucaugugcaucaucaaggaggagguccucgccuacgucguccagcucccccucuacggcgucaucgacacccccugcuggaagcuccacaccuccccccucugcaccaccaacaccaaggagggcuccaacaucugccucacccgcaccgaccgcggcugguacugcgacaacgccggcuccgucuccuucuucccccaggccgagaccugcaagguccaguccaaccgcgucuucugcgacaccaugaacucccucacccuccccuccgaggucaaccucugcaacgucgacaucuucaaccccaaguacgacugcaagaucaugaccuccaagaccgacgucuccuccuccgucaucaccucccucggcgccaucgucuccugcuacggcaagaccaagugcaccgccuccaacaagugccgcggcaucaucaagaccuucuccaacggcugcgacuacgucuccaacaagggcgucgacaccgucuccgucggcaacacccucuacuacgucaacaagcaggagggccagucccucuacgucaagggcgagcccaucaucaacuucuacgacccccucgucuuccccuccgacgaguucgacgccuccaucucccaggucaacgagaagaucaaccagucccucgccuucauccgcaaguccgacgagcuccuccacaacgucaacgccggcaaguccaccaccaacaucaugaucaccaccaucaucaucgucaucaucgucauccuccucucccucaucgccgucggccuccuccucuacugcaaggcccgcuccacccccgucacccucuccaaggaccagcucuccggcaucaacaacaucgccuucuccaacugaggacuagugcaucacauuuaaaagcaucucagccuaccaugagaauaagagaaagaaaaugaagaucaauagcuuauucaucucuuuuucuuuuucguugguguaaagccaacacccugucuaaaaaacauaaauuucuuuaaucauuuugccucuuuucucugugcuucaauuaauaaaaaauggaaagaaccuagaucuaaaaaaaaaaaaaaaaaaaaaaaaaaaaaaaaaaaaaaaaaaaaaaaaaaaaaaaaaaaaaaaaugcaucccccccccccccccccccccccccccccccaaaggcucuuuucagagccaccagaauu

SEQ ID NO: 7896 - RNA, 1993 nt, Artificial Sequence
  mRNA product Design i-2 comprising derived and/or modified sequence from HRSV(A2)__F_DSCav1_mut8 (opt3)
ggggcgcugccuacggagguggcagccaucuccuucucggcaucaagcuuaccauggagcugcucauccuuaaggccaacgcuauuaccacaauacugacugcagugacguucugcuuugccagcggccagaauaucaccgaagaguucuaccaauccacauguucugcggucucaaaaggguauuugggagcuuuaagaacugguugguacaccaguguuauuacaaucgaacugagcaacauuaaggagaucaaaugcaauggcaccgacgccaaggugaaacuaauaaagcaggaacucgauaaguauaaaaacgcaguaacugaccugcagcuucugaugcaguccacacccgccaccgggucuggaucggcuaucgcaucaggcguggccgucuguaagguguugcaccucgagggugagguuaauaaaauuaagagcgcucugcugaguacgaacaaagccguggucucccucucugggugcggagugagcguauuaacuuuuaagguucuggaucuuaagaauuacaucgacaaacaauugcugccuauucuaaacaagcaguccuguucaaucccaaauauagaaaccgugauugaguuccagcagaaaaacaauaggcuccuggaaaucacacgggaguuuagugucaacgcgggcgugacuaccccggugagcacauauaugcuuaccaauucugagcuguugucccucauuaacgauaugcccaucacgaaugaccaaaagaaacugaugucaaacaacguccagaucguucgccagcagagcuacaguauuaugugcauaaucaaggaagagguguuagcauauguagugcaacugccucucuacggcgucauugauacuccauguuggaaacuucauacaucuccccugugcaccacuaauacaaaggaaggguccaacaucuguuugacccgaacggaccguggaugguacugcgauaaugccgguagcgugucguucuuuccucaggcugagaccuguaagguucagucuaacagaguguucugcgacacaaugaacucccuaacucugccaucagaagucaaucucugcaauguggauauauuuaaccccaaauaugacuguaagauuaugaccaguaaaacagauguaagcuccucuguuaucacuagccugggcgccaucgugucaugcuacgggaagaccaaauguacagcaaguaauaagugcaggggaauuaucaagaccuucuccaacggcugugacuaugucagcaauaaagguguggacacugucucuguggggaacacgcuuuacuauguuaauaagcaagagggacagucacuguacgugaaaggcgagccuauuauaaacuuuuaugauccauugguauucccgagugacgaauuugaugcuagcaucucccaggucaaugagaagauuaaccagucucucgccuucauccggaaaucggacgaacuguuacacaacgugaaugcgggcaagagcacaaccaacaucaugauuacuaccauaaucauuguuaucauugugauccugcuaucccucauagccgucgggcugcuuuuguacugcaaggcacgcucaacacccgugacccugaguaaagaucaacucucuggaaucaauaacauugcuuucagcaauugaggacuagugcaucacauuuaaaagcaucucagccuaccaugagaauaagagaaagaaaaugaagaucaauagcuuauucaucucuuuuucuuuuucguugguguaaagccaacacccugucuaaaaaacauaaauuucuuuaaucauuuugccucuuuucucugugcuucaauuaauaaaaaauggaaagaaccuagaucuaaaaaaaaaaaaaaaaaaaaaaaaaaaaaaaaaaaaaaaaaaaaaaaaaaaaaaaaaaaaaaaaugcaucccccccccccccccccccccccccccccccaaaggcucuuuucagagccaccagaauu

SEQ ID NO: 7897 - RNA, 1993 nt, Artificial Sequence
  mRNA product Design i-2 comprising derived and/or modified sequence from HRSV(A2)__F_DSCav1_mut8 (opt4)
ggggcgcugccuacggagguggcagccaucuccuucucggcaucaagcuuaccauggagcugcugauccugaaggccaacgccaucaccaccauccugaccgccgugaccuucugcuucgccagcggccagaacaucaccgaggaguucuaccagagcaccugcagcgccgugagcaagggcuaccugggcgcccugagaaccggcugguacaccagcgugaucaccaucgagcugagcaacaucaaggagaucaagugcaacggcaccgacgccaaggugaagcugaucaagcaggagcuggacaaguacaagaacgccgugaccgaccugcagcugcugaugcagagcacccccgccaccggcagcggcagcgccaucgccagcggcguggccgugugcaaggugcugcaccuggagggcgaggugaacaagaucaagagcgcccugcugagcaccaacaaggccguggugagccugagcggcugcggcgugagcgugcugaccuucaaggugcuggaccugaagaacuacaucgacaagcagcugcugcccauccugaacaagcagagcugcagcauccccaacaucgagaccgugaucgaguuccagcagaagaacaacagacugcuggagaucaccagagaguucagcgugaacgccggcgugaccacccccgugagcaccuacaugcugaccaacagcgagcugcugagccugaucaacgacaugcccaucaccaacgaccagaagaagcugaugagcaacaacgugcagaucgugagacagcagagcuacagcaucaugugcaucaucaaggaggaggugcuggccuacguggugcagcugccccuguacggcgugaucgacacccccugcuggaagcugcacaccagcccccugugcaccaccaacaccaaggagggcagcaacaucugccugaccagaaccgacagaggcugguacugcgacaacgccggcagcgugagcuucuucccccaggccgagaccugcaaggugcagagcaacagaguguucugcgacaccaugaacagccugacccugcccagcgaggugaaccugugcaacguggacaucuucaaccccaaguacgacugcaagaucaugaccagcaagaccgacgugagcagcagcgugaucaccagccugggcgccaucgugagcugcuacggcaagaccaagugcaccgccagcaacaagugcagaggcaucaucaagaccuucagcaacggcugcgacuacgugagcaacaagggcguggacaccgugagcgugggcaacacccuguacuacgugaacaagcaggagggccagagccuguacgugaagggcgagcccaucaucaacuucuacgacccccugguguuccccagcgacgaguucgacgccagcaucagccaggugaacgagaagaucaaccagagccuggccuucaucagaaagagcgacgagcugcugcacaacgugaacgccggcaagagcaccaccaacaucaugaucaccaccaucaucaucgugaucaucgugauccugcugagccugaucgccgugggccugcugcuguacugcaaggccagaagcacccccgugacccugagcaaggaccagcugagcggcaucaacaacaucgccuucagcaacugaggacuagugcaucacauuuaaaagcaucucagccuaccaugagaauaagagaaagaaaaugaagaucaauagcuuauucaucucuuuuucuuuuucguugguguaaagccaacacccugucuaaaaaacauaaauuucuuuaaucauuuugccucuuuucucugugcuucaauuaauaaaaaauggaaagaaccuagaucuaaaaaaaaaaaaaaaaaaaaaaaaaaaaaaaaaaaaaaaaaaaaaaaaaaaaaaaaaaaaaaaaugcaucccccccccccccccccccccccccccccccaaaggcucuuuucagagccaccagaauu

SEQ ID NO: 7898 - RNA, 1993 nt, Artificial Sequence
  mRNA product Design i-2 comprising derived and/or modified sequence from HRSV(A2)__F_DSCav1_mut8 (opt5)
ggggcgcugccuacggagguggcagccaucuccuucucggcaucaagcuuaccauggagcugcucauccugaaggccaacgcuauuaccacaauccuuacggccgugaccuucugcuuugcgagcggccagaauauuacagaagaguucuaccaauccaccuguucugcugucagcaaaggguaucugggagcccucagaacaggcugguacaccuccguuaucacaauugaacugucuaacaucaaggagaucaaaugcaaugggaccgacgccaaggugaaacuuauuaagcaggaacuggauaaguauaaaaacgcugugacggaccuccagcugcugaugcagagcacccccgccacaggauccggcucugcuaucgccagcggggucgcgguguguaagguucuccaccuggagggagaggugaauaaaauuaaguccgcccuucugagcaccaacaaagcugucgugucucucuccggcugcggcguuagcgugcugacauuuaagguccuugaucugaagaauuacaucgacaaacaacuccugccuauucugaacaagcagucuuguuccaucccgaauauugaaaccgugaucgaguuccagcagaaaaacaaucggcuccuggaaaucacgcgcgaguuuagcgugaacgccggggucacaacccccguuucuacauauaugcuuaccaauuccgagcugcucagccugauuaacgauaugccuaucaccaaugaccaaaagaaacuuauguccaacaacgugcagauugugagacagcagucuuacagcaucaugugcauuaucaaggaagagguccuggcuuaugugguucaacucccccuguacggagugaucgauacaccuuguuggaaacugcauacgagcccccucugcaccacaaauaccaaggaaggcagcaacauuugucugacacggaccgaccgcgggugguacugcgauaaugccggaucugucuccuucuuuccucaggcggagacguguaaggugcagagcaacagaguuuucugcgacacaaugaacucucuuacccugccgagcgaagugaaucucugcaaugucgauaucuuuaaccccaaauaugacuguaagauuaugaccuccaaaacagaugugucuagcuccgucaucaccagccugggcgccauugugucuugcuacgggaagacaaaauguacggcuuccaauaagugccggggaaucaucaagaccuucagcaacggcugugacuauguuucuaauaaaggcguggacacagucuccguggggaacacccuuuacuauguuaauaagcaagagggacagagccuguacgugaaaggcgagccuauuaucaacuuuuaugauccccucgucuucccuuccgacgaauuugaugccucuauuagccaggugaaugagaagaucaaccagucccuggcuuucauucgcaaaucugacgaacugcuccacaacgugaaugccgggaaguccacaaccaacaucaugauuacgaccaucaucauuguuaucauugucauccugcuuucccugauugccgugggacuccugcuguacugcaaggcuagaagcacacccgugacccuuucuaaagaucaacucuccggcaucaauaacaucgcguucagcaauugaggacuagugcaucacauuuaaaagcaucucagccuaccaugagaauaagagaaagaaaaugaagaucaauagcuuauucaucucuuuuucuuuuucguugguguaaagccaacacccugucuaaaaaacauaaauuucuuuaaucauuuugccucuuuucucugugcuucaauuaauaaaaaauggaaagaaccuagaucuaaaaaaaaaaaaaaaaaaaaaaaaaaaaaaaaaaaaaaaaaaaaaaaaaaaaaaaaaaaaaaaaugcaucccccccccccccccccccccccccccccccaaaggcucuuuucagagccaccagaauu

SEQ ID NO: 7899 - RNA, 1993 nt, Artificial Sequence
  mRNA product Design i-2 comprising derived and/or modified sequence from HRSV(A2)__F_DSCav1_mut8 (opt6)
ggggcgcugccuacggagguggcagccaucuccuucucggcaucaagcuuaccauggaacuauuaauauuaaaagcaaacgcaaucacaacuauacuaacagcaguaacauucugcuuugccucaggucaaaacauaacagaggaauuuuaccaauccacaugcucugcuguaagcaaaggauaccucggagcauuaagaacuggaugguacaccucaguaauaacuauagaacuaucaaacauaaaagaaauaaaauguaauggcacagacgcaaaagugaaauuaaucaaacaagaacucgauaaauacaaaaaugccguaaccgaucuccaacuuuuaaugcaaagcacacccgcaacagguuccgggucagcaauagcaagcggaguugcaguaugcaaaguacuacacuuagaaggagaaguaaauaaaaucaaaucagccuuacuaucaacaaauaaagcaguuguaucacucucaggaugcggaguauccguacuaacauuuaaaguacuagaucuaaaaaacuacauagauaaacaacucuuaccaauacuaaauaaacaaucauguuccauacccaacauagaaaccguuaucgaauuucaacaaaaaaacaacagauuacuagaaaucacacgagaauuuucaguaaaugcuggagucacaacaccaguuaguacauacaugcucaccaauucagaacuacuaaguuuaauuaacgauaugccaauaacaaacgaccaaaaaaaacuaaugucaaauaacguacaaauaguaagacaacaaucauacucaaucaugugcauaauaaaagaagaaguacuagccuauguaguccaauuaccacucuacggcguaaucgacaccccaugcuggaaauuacacacaagcccauuaugcaccaccaacacaaaagaagguucaaacauuugcuuaaccagaaccgaucgaggaugguacugcgauaacgcaggaucugucuccuuuuucccacaagccgaaacaugcaaaguucaaucaaaccgaguuuucugugacacuaugaacucacucacacuuccaagcgaaguaaaccuaugcaacguagauauauuuaacccuaaauacgacugcaaaauaaugacaagcaaaacagacguuaguucaucaguaauuacaagucuaggcgcaauagugucaugcuacggaaaaacaaaaugcaccgcauccaauaaaugccgaggaaucauuaaaacauucucaaacggaugcgacuacgucagcaauaaaggaguagacacuguuucuguaggaaacacccuauacuauguaaacaaacaagaaggucaaucacuauacguaaagggagaaccaauuauaaauuuuuacgaccccuuaguauuuccaagugaugaauuugacgcaucuauaagucaaguuaacgaaaaaauuaaccaaucacuugcauuuauaagaaaaucagacgaacuacuccauaauguaaacgcagguaaaucaacaacaaacaucaugaucacaaccauaauaauaguaauaauuguaauauuacuaucacuaauagcaguaggauuacuacucuacugcaaagcuagaucuaccccggucacacucucaaaagaccaauuaucuggaauaaacaauauagcauucagcaacuaaggacuagugcaucacauuuaaaagcaucucagccuaccaugagaauaagagaaagaaaaugaagaucaauagcuuauucaucucuuuuucuuuuucguugguguaaagccaacacccugucuaaaaaacauaaauuucuuuaaucauuuugccucuuuucucugugcuucaauuaauaaaaaauggaaagaaccuagaucuaaaaaaaaaaaaaaaaaaaaaaaaaaaaaaaaaaaaaaaaaaaaaaaaaaaaaaaaaaaaaaaaugcaucccccccccccccccccccccccccccccccaaaggcucuuuucagagccaccagaauu

SEQ ID NO: 7900 - RNA, 1993 nt, Artificial Sequence
  mRNA product Design i-2 comprising derived and/or modified sequence from HRSV(A2)__F_DSCav1_mut8 (opt11)
ggggcgcugccuacggagguggcagccaucuccuucucggcaucaagcuuaccauggaacuccucauccuuaaagccaacgccauaaccaccauccucaccgccgucaccuucugcuucgcuucuggccaaaacauaaccgaagaguucuaccaauccacgugcucugccgugucaaaaggcuaccucggagcccuccgcacagggugguacacuuccgucaucaccaucgaacucucuaacaucaaagaaaucaagugcaacggcacagacgcgaaagucaagcucaucaaacaagaacuagacaaauacaaaaacgccguaacagaccuccaacuccuaaugcaguccacaccagccacaggcuccggcagcgccaucgccuccggcgucgcugucugcaaaguccuacaccucgaaggcgaagucaacaaaaucaagucagcccuccuuagcaccaacaaagcagucgucucuuuaagcgggugcggagucucuguccuaaccuuuaaaguacucgaccucaaaaacuacaucgacaaacaacuacuaccaauacuaaacaaacagagcugcuccauucccaacaucgaaaccguuaucgaguuccaacaaaagaacaaccgccuccucgaaaucacccgcgaguucuccgucaacgcaggcgucaccaccccagucuccaccuauaugcuaaccaacagcgaacuccucagccucaucaaugacaugccaaucaccaacgaccaaaagaaacucauguccaacaacguacagauaguccgccagcaguccuacagcaucaugugcaucaucaaagaagaagugcucgccuacgugguacaacucccucucuacggagucauugauacacccugcuggaaacuccacacaagcccccucugcacuacaaacaccaaagaaggcucuaacauaugccucacccgcacagaccgugguugguacugcgacaacgccggcuccguauccuucuuuccacaagcugaaaccugcaaaguucaaucaaaccgagucuucugcgacaccaugaacucccucacauugcccagcgaagucaaccucugcaacgucgacaucuucaaccccaaguacgacugcaaaaucaugaccuccaaaaccgacgucagcuccagcgugaucacaagccuaggcgcgaucgucagcugcuacggcaaaaccaaaugcacagccuccaacaaaugccgcggaaucauaaaaacauucaguaacggcugcgacuacguguccaauaaaggagucgacaccguauccgucggaaacacccucuacuacgucaacaaacaagaaggacaaucccucuaugucaaaggcgaacccauuaucaacuucuacgacccccuaguuuuccccuccgacgaguucgacgcaagcauuucccaagucaacgaaaagaucaaucaaucccucgccuucauacgcaaaagcgacgaacuacuacacaacguaaacgccggcaaaagcaccaccaacaucaugaucacaacaaucaucaucgucaucaucgucauccuacucucacucaucgccguuggccuacuacucuacugcaaagcccgcuccacacccgucacccucucaaaagaccaacucuccggcaucaacaacaucgcauucagcaacugaggacuagugcaucacauuuaaaagcaucucagccuaccaugagaauaagagaaagaaaaugaagaucaauagcuuauucaucucuuuuucuuuuucguugguguaaagccaacacccugucuaaaaaacauaaauuucuuuaaucauuuugccucuuuucucugugcuucaauuaauaaaaaauggaaagaaccuagaucuaaaaaaaaaaaaaaaaaaaaaaaaaaaaaaaaaaaaaaaaaaaaaaaaaaaaaaaaaaaaaaaaugcaucccccccccccccccccccccccccccccccaaaggcucuuuucagagccaccagaauu

SEQ ID NO: 7901 - RNA, 1828 nt, Artificial Sequence
  mRNA product Design i-3 comprising derived and/or modified sequence from HRSV(A2)__F_DSCav1_mut8 (opt1)
gggagaaagcuuaccauggagcugcucauccugaaggccaacgccaucaccaccauccugacggcggugaccuucugcuucgccagcggccagaacaucaccgaggaguucuaccaguccacgugcagcgccgucuccaagggguaccucggcgcccugcggaccggcugguacaccuccgugaucaccaucgagcugagcaacaucaaggagaucaagugcaacgggaccgacgccaaggugaagcucaucaagcaggagcuggacaaguacaagaacgcggucacggaccugcagcuccugaugcaguccaccccggcaaccggcuccggcuccgccaucgcgagcggcgucgccgugugcaaggugcugcaccucgagggggaggucaacaagaucaagagcgcccugcuguccaccaacaaggccguggugagccucuccggcugcggcgucagcgugcugaccuucaaggugcuggaccucaagaacuacaucgacaagcagcugcugcccauccugaacaagcagagcugcuccauccccaacaucgagacggugaucgaguuccagcagaagaacaaccggcuccuggagaucacccgcgaguucagcgugaacgccggggucaccacccccguguccacguacaugcugaccaacagcgagcuccugucccugaucaacgacaugccgaucaccaacgaccagaagaagcucaugagcaacaacgugcagaucguccggcagcaguccuacagcaucaugugcaucaucaaggaggaggugcuggcguacgugguccagcugccccucuacggcgugaucgacacccccugcuggaagcugcacacgagcccccugugcaccaccaacaccaaggagggguccaacaucugccucacgcgcaccgaccggggcugguacugcgacaacgccggcagcgucuccuucuucccgcaggccgagaccugcaaggugcagagcaaccgcguguucugcgacaccaugaacucccugacgcugcccagcgagguaaaccucugcaacgucgacaucuucaaccccaaguacgacugcaagaucaugaccuccaagaccgacgugagcuccagcgugaucaccucccugggggccaucgucagcugcuacggcaagacgaagugcaccgccagcaacaagugccgggggaucaucaagaccuucuccaacggcugcgacuacgugagcaacaagggcguggacaccguguccgucgggaacacccuguacuacgugaacaagcaggagggccagagccucuacgugaagggggagcccaucaucaacuucuacgacccgcuggucuuccccuccgacgaguucgacgcgagcaucucccaggugaacgagaagaucaaccagagccuggccuucauccgcaaguccgacgagcugcuccacaacgugaacgccggcaagagcacgaccaacaucaugaucaccaccaucaucaucgucaucaucgugauccugcugucccucaucgccguggggcugcugcucuacugcaaggcccggagcacgcccgucacccuguccaaggaccagcugagcggcaucaacaacaucgcguucuccaacugaggacuaguuauaagacugacuagcccgaugggccucccaacgggcccuccuccccuccuugcaccgagauuaauaaaaaaaaaaaaaaaaaaaaaaaaaaaaaaaaaaaaaaaaaaaaaaaaaaaaaaaaaaaaaaaaugcaucccccccccccccccccccccccccccccccaaaggcucuuuucagagccaccagaauu

SEQ ID NO: 7902 - RNA, 1828 nt, Artificial Sequence
  mRNA product Design i-3 comprising derived and/or modified sequence from HRSV(A2)__F_DSCav1_mut8 (opt1)
gggagaaagcuuaccauggagcugcucauccugaaggccaacgccaucaccaccauccugacggcggugaccuucugcuucgccagcggccagaacaucaccgaggaguucuaccaguccacgugcagcgccgucuccaagggguaccucggcgcccugcgcaccgggugguacaccagcgugaucaccaucgagcuguccaacaucaaggagaucaagugcaacggcaccgacgccaaggugaagcucaucaagcaggagcuggacaaguacaagaacgcggucacggaccugcagcuccugaugcagagcacccccgccaccggguccggcagcgccaucgccuccggcguggcggugugcaagguccugcaccucgagggggaggugaacaagaucaagagcgcccugcuguccaccaacaaggccguggucagccucuccggcugcggggugagcgugcugacguucaagguccuggaccucaagaacuacaucgacaagcagcugcugccgauccucaacaagcaguccugcagcauccccaacaucgagaccgugaucgaguuccagcagaagaacaaccggcugcuggagaucacccgcgaguucuccgugaacgccggcgucaccacgcccgugagcaccuacaugcucaccaacuccgagcugcugagccucaucaacgacaugcccaucaccaacgaccagaagaagcugaugagcaacaacgugcagaucguccggcagcaguccuacagcaucaugugcaucaucaaggaggaggugcuggccuacgugguccagcucccgcuguacggggugaucgacacgcccugcuggaagcugcacaccagcccccucugcaccaccaacacgaaggagggcuccaacaucugccugacccgcaccgaccggggcugguacugcgacaacgcgggguccgugagcuucuucccccaggccgagaccugcaagguccaguccaaccgcguguucugcgacacgaugaacagccugacccucccguccgaggucaaccugugcaacguggacaucuucaaccccaaguacgacugcaagaucaugaccagcaagaccgacguguccagcuccgucaucacgagccugggcgccaucguguccugcuacgggaagaccaagugcaccgccagcaacaagugccggggcaucaucaagaccuucuccaacggcugcgacuacgugagcaacaagggggucgacacgguguccgugggcaacacccucuacuacgucaacaagcaggaggggcagagccuguacgugaagggcgagcccaucaucaacuucuacgacccccugguguucccgagcgacgaguucgacgccuccaucagccaggucaacgagaagaucaaccagucccucgcguucauccgcaagagcgacgagcugcugcacaacgugaacgccgggaaguccaccaccaacaucaugaucaccacgaucaucaucgugaucaucgucauccuccugagccugaucgccgugggccuccugcuguacugcaaggcccgguccacccccgugacccugagcaaggaccagcucuccggcaucaacaacaucgccuucagcaacugaggacuaguuauaagacugacuagcccgaugggccucccaacgggcccuccuccccuccuugcaccgagauuaauaaaaaaaaaaaaaaaaaaaaaaaaaaaaaaaaaaaaaaaaaaaaaaaaaaaaaaaaaaaaaaaaugcaucccccccccccccccccccccccccccccccaaaggcucuuuucagagccaccagaauu

SEQ ID NO: 7903 - RNA, 1828 nt, Artificial Sequence
  mRNA product Design i-3 comprising derived and/or modified sequence from HRSV(A2)__F_DSCav1_mut8 (opt2)
gggagaaagcuuaccauggagcuccucauccucaaggccaacgccaucaccaccauccucaccgccgucaccuucugcuucgccuccggccagaacaucaccgaggaguucuaccaguccaccugcuccgccgucuccaagggcuaccucggcgcccuccgcaccggcugguacaccuccgucaucaccaucgagcucuccaacaucaaggagaucaagugcaacggcaccgacgccaaggucaagcucaucaagcaggagcucgacaaguacaagaacgccgucaccgaccuccagcuccucaugcaguccacccccgccaccggcuccggcuccgccaucgccuccggcgucgccgucugcaagguccuccaccucgagggcgaggucaacaagaucaaguccgcccuccucuccaccaacaaggccgucgucucccucuccggcugcggcgucuccguccucaccuucaagguccucgaccucaagaacuacaucgacaagcagcuccuccccauccucaacaagcaguccugcuccauccccaacaucgagaccgucaucgaguuccagcagaagaacaaccgccuccucgagaucacccgcgaguucuccgucaacgccggcgucaccacccccgucuccaccuacaugcucaccaacuccgagcuccucucccucaucaacgacaugcccaucaccaacgaccagaagaagcucauguccaacaacguccagaucguccgccagcaguccuacuccaucaugugcaucaucaaggaggagguccucgccuacgucguccagcucccccucuacggcgucaucgacacccccugcuggaagcuccacaccuccccccucugcaccaccaacaccaaggagggcuccaacaucugccucacccgcaccgaccgcggcugguacugcgacaacgccggcuccgucuccuucuucccccaggccgagaccugcaagguccaguccaaccgcgucuucugcgacaccaugaacucccucacccuccccuccgaggucaaccucugcaacgucgacaucuucaaccccaaguacgacugcaagaucaugaccuccaagaccgacgucuccuccuccgucaucaccucccucggcgccaucgucuccugcuacggcaagaccaagugcaccgccuccaacaagugccgcggcaucaucaagaccuucuccaacggcugcgacuacgucuccaacaagggcgucgacaccgucuccgucggcaacacccucuacuacgucaacaagcaggagggccagucccucuacgucaagggcgagcccaucaucaacuucuacgacccccucgucuuccccuccgacgaguucgacgccuccaucucccaggucaacgagaagaucaaccagucccucgccuucauccgcaaguccgacgagcuccuccacaacgucaacgccggcaaguccaccaccaacaucaugaucaccaccaucaucaucgucaucaucgucauccuccucucccucaucgccgucggccuccuccucuacugcaaggcccgcuccacccccgucacccucuccaaggaccagcucuccggcaucaacaacaucgccuucuccaacugaggacuaguuauaagacugacuagcccgaugggccucccaacgggcccuccuccccuccuugcaccgagauuaauaaaaaaaaaaaaaaaaaaaaaaaaaaaaaaaaaaaaaaaaaaaaaaaaaaaaaaaaaaaaaaaaugcaucccccccccccccccccccccccccccccccaaaggcucuuuucagagccaccagaauu

SEQ ID NO: 7904 - RNA, 1828 nt, Artificial Sequence
  mRNA product Design i-3 comprising derived and/or modified sequence from HRSV(A2)__F_DSCav1_mut8 (opt3)
gggagaaagcuuaccauggagcugcucauccuuaaggccaacgcuauuaccacaauacugacugcagugacguucugcuuugccagcggccagaauaucaccgaagaguucuaccaauccacauguucugcggucucaaaaggguauuugggagcuuuaagaacugguugguacaccaguguuauuacaaucgaacugagcaacauuaaggagaucaaaugcaauggcaccgacgccaaggugaaacuaauaaagcaggaacucgauaaguauaaaaacgcaguaacugaccugcagcuucugaugcaguccacacccgccaccgggucuggaucggcuaucgcaucaggcguggccgucuguaagguguugcaccucgagggugagguuaauaaaauuaagagcgcucugcugaguacgaacaaagccguggucucccucucugggugcggagugagcguauuaacuuuuaagguucuggaucuuaagaauuacaucgacaaacaauugcugccuauucuaaacaagcaguccuguucaaucccaaauauagaaaccgugauugaguuccagcagaaaaacaauaggcuccuggaaaucacacgggaguuuagugucaacgcgggcgugacuaccccggugagcacauauaugcuuaccaauucugagcuguugucccucauuaacgauaugcccaucacgaaugaccaaaagaaacugaugucaaacaacguccagaucguucgccagcagagcuacaguauuaugugcauaaucaaggaagagguguuagcauauguagugcaacugccucucuacggcgucauugauacuccauguuggaaacuucauacaucuccccugugcaccacuaauacaaaggaaggguccaacaucuguuugacccgaacggaccguggaugguacugcgauaaugccgguagcgugucguucuuuccucaggcugagaccuguaagguucagucuaacagaguguucugcgacacaaugaacucccuaacucugccaucagaagucaaucucugcaauguggauauauuuaaccccaaauaugacuguaagauuaugaccaguaaaacagauguaagcuccucuguuaucacuagccugggcgccaucgugucaugcuacgggaagaccaaauguacagcaaguaauaagugcaggggaauuaucaagaccuucuccaacggcugugacuaugucagcaauaaagguguggacacugucucuguggggaacacgcuuuacuauguuaauaagcaagagggacagucacuguacgugaaaggcgagccuauuauaaacuuuuaugauccauugguauucccgagugacgaauuugaugcuagcaucucccaggucaaugagaagauuaaccagucucucgccuucauccggaaaucggacgaacuguuacacaacgugaaugcgggcaagagcacaaccaacaucaugauuacuaccauaaucauuguuaucauugugauccugcuaucccucauagccgucgggcugcuuuuguacugcaaggcacgcucaacacccgugacccugaguaaagaucaacucucuggaaucaauaacauugcuuucagcaauugaggacuaguuauaagacugacuagcccgaugggccucccaacgggcccuccuccccuccuugcaccgagauuaauaaaaaaaaaaaaaaaaaaaaaaaaaaaaaaaaaaaaaaaaaaaaaaaaaaaaaaaaaaaaaaaaugcaucccccccccccccccccccccccccccccccaaaggcucuuuucagagccaccagaauu

SEQ ID NO: 7905 - RNA, 1828 nt, Artificial Sequence
  mRNA product Design i-3 comprising derived and/or modified sequence from HRSV(A2)__F_DSCav1_mut8 (opt4)
gggagaaagcuuaccauggagcugcugauccugaaggccaacgccaucaccaccauccugaccgccgugaccuucugcuucgccagcggccagaacaucaccgaggaguucuaccagagcaccugcagcgccgugagcaagggcuaccugggcgcccugagaaccggcugguacaccagcgugaucaccaucgagcugagcaacaucaaggagaucaagugcaacggcaccgacgccaaggugaagcugaucaagcaggagcuggacaaguacaagaacgccgugaccgaccugcagcugcugaugcagagcacccccgccaccggcagcggcagcgccaucgccagcggcguggccgugugcaaggugcugcaccuggagggcgaggugaacaagaucaagagcgcccugcugagcaccaacaaggccguggugagccugagcggcugcggcgugagcgugcugaccuucaaggugcuggaccugaagaacuacaucgacaagcagcugcugcccauccugaacaagcagagcugcagcauccccaacaucgagaccgugaucgaguuccagcagaagaacaacagacugcuggagaucaccagagaguucagcgugaacgccggcgugaccacccccgugagcaccuacaugcugaccaacagcgagcugcugagccugaucaacgacaugcccaucaccaacgaccagaagaagcugaugagcaacaacgugcagaucgugagacagcagagcuacagcaucaugugcaucaucaaggaggaggugcuggccuacguggugcagcugccccuguacggcgugaucgacacccccugcuggaagcugcacaccagcccccugugcaccaccaacaccaaggagggcagcaacaucugccugaccagaaccgacagaggcugguacugcgacaacgccggcagcgugagcuucuucccccaggccgagaccugcaaggugcagagcaacagaguguucugcgacaccaugaacagccugacccugcccagcgaggugaaccugugcaacguggacaucuucaaccccaaguacgacugcaagaucaugaccagcaagaccgacgugagcagcagcgugaucaccagccugggcgccaucgugagcugcuacggcaagaccaagugcaccgccagcaacaagugcagaggcaucaucaagaccuucagcaacggcugcgacuacgugagcaacaagggcguggacaccgugagcgugggcaacacccuguacuacgugaacaagcaggagggccagagccuguacgugaagggcgagcccaucaucaacuucuacgacccccugguguuccccagcgacgaguucgacgccagcaucagccaggugaacgagaagaucaaccagagccuggccuucaucagaaagagcgacgagcugcugcacaacgugaacgccggcaagagcaccaccaacaucaugaucaccaccaucaucaucgugaucaucgugauccugcugagccugaucgccgugggccugcugcuguacugcaaggccagaagcacccccgugacccugagcaaggaccagcugagcggcaucaacaacaucgccuucagcaacugaggacuaguuauaagacugacuagcccgaugggccucccaacgggcccuccuccccuccuugcaccgagauuaauaaaaaaaaaaaaaaaaaaaaaaaaaaaaaaaaaaaaaaaaaaaaaaaaaaaaaaaaaaaaaaaaugcaucccccccccccccccccccccccccccccccaaaggcucuuuucagagccaccagaauu

SEQ ID NO: 7906 - RNA, 1828 nt, Artificial Sequence
  mRNA product Design i-3 comprising derived and/or modified sequence from HRSV(A2)__F_DSCav1_mut8 (opt5)
gggagaaagcuuaccauggagcugcucauccugaaggccaacgcuauuaccacaauccuuacggccgugaccuucugcuuugcgagcggccagaauauuacagaagaguucuaccaauccaccuguucugcugucagcaaaggguaucugggagcccucagaacaggcugguacaccuccguuaucacaauugaacugucuaacaucaaggagaucaaaugcaaugggaccgacgccaaggugaaacuuauuaagcaggaacuggauaaguauaaaaacgcugugacggaccuccagcugcugaugcagagcacccccgccacaggauccggcucugcuaucgccagcggggucgcgguguguaagguucuccaccuggagggagaggugaauaaaauuaaguccgcccuucugagcaccaacaaagcugucgugucucucuccggcugcggcguuagcgugcugacauuuaagguccuugaucugaagaauuacaucgacaaacaacuccugccuauucugaacaagcagucuuguuccaucccgaauauugaaaccgugaucgaguuccagcagaaaaacaaucggcuccuggaaaucacgcgcgaguuuagcgugaacgccggggucacaacccccguuucuacauauaugcuuaccaauuccgagcugcucagccugauuaacgauaugccuaucaccaaugaccaaaagaaacuuauguccaacaacgugcagauugugagacagcagucuuacagcaucaugugcauuaucaaggaagagguccuggcuuaugugguucaacucccccuguacggagugaucgauacaccuuguuggaaacugcauacgagcccccucugcaccacaaauaccaaggaaggcagcaacauuugucugacacggaccgaccgcgggugguacugcgauaaugccggaucugucuccuucuuuccucaggcggagacguguaaggugcagagcaacagaguuuucugcgacacaaugaacucucuuacccugccgagcgaagugaaucucugcaaugucgauaucuuuaaccccaaauaugacuguaagauuaugaccuccaaaacagaugugucuagcuccgucaucaccagccugggcgccauugugucuugcuacgggaagacaaaauguacggcuuccaauaagugccggggaaucaucaagaccuucagcaacggcugugacuauguuucuaauaaaggcguggacacagucuccguggggaacacccuuuacuauguuaauaagcaagagggacagagccuguacgugaaaggcgagccuauuaucaacuuuuaugauccccucgucuucccuuccgacgaauuugaugccucuauuagccaggugaaugagaagaucaaccagucccuggcuuucauucgcaaaucugacgaacugcuccacaacgugaaugccgggaaguccacaaccaacaucaugauuacgaccaucaucauuguuaucauugucauccugcuuucccugauugccgugggacuccugcuguacugcaaggcuagaagcacacccgugacccuuucuaaagaucaacucuccggcaucaauaacaucgcguucagcaauugaggacuaguuauaagacugacuagcccgaugggccucccaacgggcccuccuccccuccuugcaccgagauuaauaaaaaaaaaaaaaaaaaaaaaaaaaaaaaaaaaaaaaaaaaaaaaaaaaaaaaaaaaaaaaaaaugcaucccccccccccccccccccccccccccccccaaaggcucuuuucagagccaccagaauu

SEQ ID NO: 7907 - RNA, 1828 nt, Artificial Sequence
  mRNA product Design i-3 comprising derived and/or modified sequence from HRSV(A2)__F_DSCav1_mut8 (opt6)
gggagaaagcuuaccauggaacuauuaauauuaaaagcaaacgcaaucacaacuauacuaacagcaguaacauucugcuuugccucaggucaaaacauaacagaggaauuuuaccaauccacaugcucugcuguaagcaaaggauaccucggagcauuaagaacuggaugguacaccucaguaauaacuauagaacuaucaaacauaaaagaaauaaaauguaauggcacagacgcaaaagugaaauuaaucaaacaagaacucgauaaauacaaaaaugccguaaccgaucuccaacuuuuaaugcaaagcacacccgcaacagguuccgggucagcaauagcaagcggaguugcaguaugcaaaguacuacacuuagaaggagaaguaaauaaaaucaaaucagccuuacuaucaacaaauaaagcaguuguaucacucucaggaugcggaguauccguacuaacauuuaaaguacuagaucuaaaaaacuacauagauaaacaacucuuaccaauacuaaauaaacaaucauguuccauacccaacauagaaaccguuaucgaauuucaacaaaaaaacaacagauuacuagaaaucacacgagaauuuucaguaaaugcuggagucacaacaccaguuaguacauacaugcucaccaauucagaacuacuaaguuuaauuaacgauaugccaauaacaaacgaccaaaaaaaacuaaugucaaauaacguacaaauaguaagacaacaaucauacucaaucaugugcauaauaaaagaagaaguacuagccuauguaguccaauuaccacucuacggcguaaucgacaccccaugcuggaaauuacacacaagcccauuaugcaccaccaacacaaaagaagguucaaacauuugcuuaaccagaaccgaucgaggaugguacugcgauaacgcaggaucugucuccuuuuucccacaagccgaaacaugcaaaguucaaucaaaccgaguuuucugugacacuaugaacucacucacacuuccaagcgaaguaaaccuaugcaacguagauauauuuaacccuaaauacgacugcaaaauaaugacaagcaaaacagacguuaguucaucaguaauuacaagucuaggcgcaauagugucaugcuacggaaaaacaaaaugcaccgcauccaauaaaugccgaggaaucauuaaaacauucucaaacggaugcgacuacgucagcaauaaaggaguagacacuguuucuguaggaaacacccuauacuauguaaacaaacaagaaggucaaucacuauacguaaagggagaaccaauuauaaauuuuuacgaccccuuaguauuuccaagugaugaauuugacgcaucuauaagucaaguuaacgaaaaaauuaaccaaucacuugcauuuauaagaaaaucagacgaacuacuccauaauguaaacgcagguaaaucaacaacaaacaucaugaucacaaccauaauaauaguaauaauuguaauauuacuaucacuaauagcaguaggauuacuacucuacugcaaagcuagaucuaccccggucacacucucaaaagaccaauuaucuggaauaaacaauauagcauucagcaacuaaggacuaguuauaagacugacuagcccgaugggccucccaacgggcccuccuccccuccuugcaccgagauuaauaaaaaaaaaaaaaaaaaaaaaaaaaaaaaaaaaaaaaaaaaaaaaaaaaaaaaaaaaaaaaaaaugcaucccccccccccccccccccccccccccccccaaaggcucuuuucagagccaccagaauu

SEQ ID NO: 7908 - RNA, 1828 nt, Artificial Sequence
  mRNA product Design i-3 comprising derived and/or modified sequence from HRSV(A2)__F_DSCav1_mut8 (opt11)
gggagaaagcuuaccauggaacuccucauccuuaaagccaacgccauaaccaccauccucaccgccgucaccuucugcuucgcuucuggccaaaacauaaccgaagaguucuaccaauccacgugcucugccgugucaaaaggcuaccucggagcccuccgcacagggugguacacuuccgucaucaccaucgaacucucuaacaucaaagaaaucaagugcaacggcacagacgcgaaagucaagcucaucaaacaagaacuagacaaauacaaaaacgccguaacagaccuccaacuccuaaugcaguccacaccagccacaggcuccggcagcgccaucgccuccggcgucgcugucugcaaaguccuacaccucgaaggcgaagucaacaaaaucaagucagcccuccuuagcaccaacaaagcagucgucucuuuaagcgggugcggagucucuguccuaaccuuuaaaguacucgaccucaaaaacuacaucgacaaacaacuacuaccaauacuaaacaaacagagcugcuccauucccaacaucgaaaccguuaucgaguuccaacaaaagaacaaccgccuccucgaaaucacccgcgaguucuccgucaacgcaggcgucaccaccccagucuccaccuauaugcuaaccaacagcgaacuccucagccucaucaaugacaugccaaucaccaacgaccaaaagaaacucauguccaacaacguacagauaguccgccagcaguccuacagcaucaugugcaucaucaaagaagaagugcucgccuacgugguacaacucccucucuacggagucauugauacacccugcuggaaacuccacacaagcccccucugcacuacaaacaccaaagaaggcucuaacauaugccucacccgcacagaccgugguugguacugcgacaacgccggcuccguauccuucuuuccacaagcugaaaccugcaaaguucaaucaaaccgagucuucugcgacaccaugaacucccucacauugcccagcgaagucaaccucugcaacgucgacaucuucaaccccaaguacgacugcaaaaucaugaccuccaaaaccgacgucagcuccagcgugaucacaagccuaggcgcgaucgucagcugcuacggcaaaaccaaaugcacagccuccaacaaaugccgcggaaucauaaaaacauucaguaacggcugcgacuacguguccaauaaaggagucgacaccguauccgucggaaacacccucuacuacgucaacaaacaagaaggacaaucccucuaugucaaaggcgaacccauuaucaacuucuacgacccccuaguuuuccccuccgacgaguucgacgcaagcauuucccaagucaacgaaaagaucaaucaaucccucgccuucauacgcaaaagcgacgaacuacuacacaacguaaacgccggcaaaagcaccaccaacaucaugaucacaacaaucaucaucgucaucaucgucauccuacucucacucaucgccguuggccuacuacucuacugcaaagcccgcuccacacccgucacccucucaaaagaccaacucuccggcaucaacaacaucgcauucagcaacugaggacuaguuauaagacugacuagcccgaugggccucccaacgggcccuccuccccuccuugcaccgagauuaauaaaaaaaaaaaaaaaaaaaaaaaaaaaaaaaaaaaaaaaaaaaaaaaaaaaaaaaaaaaaaaaaugcaucccccccccccccccccccccccccccccccaaaggcucuuuucagagccaccagaauu

SEQ ID NO: 7909 - protein, 515 aa, Artificial Sequence
  derived and/or modified protein sequence (artificial) from HRSV(A2)__F-del_DSCav1_mut8
MELLILKANAITTILTAVTFCFASGQNITEEFYQSTCSAVSKGYLGALRTGWYTSVITIELSNIKEIKCNGTDAKVKLIKQELDKYKNAVTDLQLLMQSTPATGSGSAIASGVAVCKVLHLEGEVNKIKSALLSTNKAVVSLSGCGVSVLTFKVLDLKNYIDKQLLPILNKQSCSIPNIETVIEFQQKNNRLLEITREFSVNAGVTTPVSTYMLTNSELLSLINDMPITNDQKKLMSNNVQIVRQQSYSIMCIIKEEVLAYVVQLPLYGVIDTPCWKLHTSPLCTTNTKEGSNICLTRTDRGWYCDNAGSVSFFPQAETCKVQSNRVFCDTMNSLTLPSEVNLCNVDIFNPKYDCKIMTSKTDVSSSVITSLGAIVSCYGKTKCTASNKCRGIIKTFSNGCDYVSNKGVDTVSVGNTLYYVNKQEGQSLYVKGEPIINFYDPLVFPSDEFDASISQVNEKINQSLAFIRKSDELLHNVNAGKSTTNIMITTIIIVIIVILLSLIAVGLLLYCKAR

SEQ ID NO: 7910 - RNA, 1548 nt, Artificial Sequence
  derived and/or modified CDS sequence (opt1) from HRSV(A2)__F-del_DSCav1_mut8
auggagcugcucauccugaaggccaacgccaucaccaccauccugacggcggugaccuucugcuucgccagcggccagaacaucaccgaggaguucuaccaguccacgugcagcgccgucuccaagggguaccucggcgcccugcggaccggcugguacaccuccgugaucaccaucgagcugagcaacaucaaggagaucaagugcaacgggaccgacgccaaggugaagcucaucaagcaggagcuggacaaguacaagaacgcggucacggaccugcagcuccugaugcaguccaccccggcaaccggcuccggcuccgccaucgcgagcggcgucgccgugugcaaggugcugcaccucgagggggaggucaacaagaucaagagcgcccugcuguccaccaacaaggccguggugagccucuccggcugcggcgucagcgugcugaccuucaaggugcuggaccucaagaacuacaucgacaagcagcugcugcccauccugaacaagcagagcugcuccauccccaacaucgagacggugaucgaguuccagcagaagaacaaccggcuccuggagaucacccgcgaguucagcgugaacgccggggucaccacccccguguccacguacaugcugaccaacagcgagcuccugucccugaucaacgacaugccgaucaccaacgaccagaagaagcucaugagcaacaacgugcagaucguccggcagcaguccuacagcaucaugugcaucaucaaggaggaggugcuggcguacgugguccagcugccccucuacggcgugaucgacacccccugcuggaagcugcacacgagcccccugugcaccaccaacaccaaggagggguccaacaucugccucacgcgcaccgaccggggcugguacugcgacaacgccggcagcgucuccuucuucccgcaggccgagaccugcaaggugcagagcaaccgcguguucugcgacaccaugaacucccugacgcugcccagcgagguaaaccucugcaacgucgacaucuucaaccccaaguacgacugcaagaucaugaccuccaagaccgacgugagcuccagcgugaucaccucccugggggccaucgucagcugcuacggcaagacgaagugcaccgccagcaacaagugccgggggaucaucaagaccuucuccaacggcugcgacuacgugagcaacaagggcguggacaccguguccgucgggaacacccuguacuacgugaacaagcaggagggccagagccucuacgugaagggggagcccaucaucaacuucuacgacccgcuggucuuccccuccgacgaguucgacgcgagcaucucccaggugaacgagaagaucaaccagagccuggccuucauccgcaaguccgacgagcugcuccacaacgugaacgccggcaagagcacgaccaacaucaugaucaccaccaucaucaucgucaucaucgugauccugcugucccucaucgccguggggcugcugcucuacugcaaggcccgguga

SEQ ID NO: 7911 - RNA, 1548 nt, Artificial Sequence
  derived and/or modified CDS sequence (opt1) from HRSV(A2)__F-del_DSCav1_mut8
auggagcugcucauccugaaggccaacgccaucaccaccauccugacggcggugaccuucugcuucgccagcggccagaacaucaccgaggaguucuaccaguccacgugcagcgccgucuccaagggguaccucggcgcccugcgcaccgggugguacaccagcgugaucaccaucgagcuguccaacaucaaggagaucaagugcaacggcaccgacgccaaggugaagcucaucaagcaggagcuggacaaguacaagaacgcggucacggaccugcagcuccugaugcagagcacccccgccaccggguccggcagcgccaucgccuccggcguggcggugugcaagguccugcaccucgagggggaggugaacaagaucaagagcgcccugcuguccaccaacaaggccguggucagccucuccggcugcggggugagcgugcugacguucaagguccuggaccucaagaacuacaucgacaagcagcugcugccgauccucaacaagcaguccugcagcauccccaacaucgagaccgugaucgaguuccagcagaagaacaaccggcugcuggagaucacccgcgaguucuccgugaacgccggcgucaccacgcccgugagcaccuacaugcucaccaacuccgagcugcugagccucaucaacgacaugcccaucaccaacgaccagaagaagcugaugagcaacaacgugcagaucguccggcagcaguccuacagcaucaugugcaucaucaaggaggaggugcuggccuacgugguccagcucccgcuguacggggugaucgacacgcccugcuggaagcugcacaccagcccccucugcaccaccaacacgaaggagggcuccaacaucugccugacccgcaccgaccggggcugguacugcgacaacgcgggguccgugagcuucuucccccaggccgagaccugcaagguccaguccaaccgcguguucugcgacacgaugaacagccugacccucccguccgaggucaaccugugcaacguggacaucuucaaccccaaguacgacugcaagaucaugaccagcaagaccgacguguccagcuccgucaucacgagccugggcgccaucguguccugcuacgggaagaccaagugcaccgccagcaacaagugccggggcaucaucaagaccuucuccaacggcugcgacuacgugagcaacaagggggucgacacgguguccgugggcaacacccucuacuacgucaacaagcaggaggggcagagccuguacgugaagggcgagcccaucaucaacuucuacgacccccugguguucccgagcgacgaguucgacgccuccaucagccaggucaacgagaagaucaaccagucccucgcguucauccgcaagagcgacgagcugcugcacaacgugaacgccgggaaguccaccaccaacaucaugaucaccacgaucaucaucgugaucaucgucauccuccugagccugaucgccgugggccuccugcuguacugcaaggcccgguga

SEQ ID NO: 7912 - RNA, 1548 nt, Artificial Sequence
  derived and/or modified CDS sequence (opt2) from HRSV(A2)__F-del_DSCav1_mut8
auggagcuccucauccucaaggccaacgccaucaccaccauccucaccgccgucaccuucugcuucgccuccggccagaacaucaccgaggaguucuaccaguccaccugcuccgccgucuccaagggcuaccucggcgcccuccgcaccggcugguacaccuccgucaucaccaucgagcucuccaacaucaaggagaucaagugcaacggcaccgacgccaaggucaagcucaucaagcaggagcucgacaaguacaagaacgccgucaccgaccuccagcuccucaugcaguccacccccgccaccggcuccggcuccgccaucgccuccggcgucgccgucugcaagguccuccaccucgagggcgaggucaacaagaucaaguccgcccuccucuccaccaacaaggccgucgucucccucuccggcugcggcgucuccguccucaccuucaagguccucgaccucaagaacuacaucgacaagcagcuccuccccauccucaacaagcaguccugcuccauccccaacaucgagaccgucaucgaguuccagcagaagaacaaccgccuccucgagaucacccgcgaguucuccgucaacgccggcgucaccacccccgucuccaccuacaugcucaccaacuccgagcuccucucccucaucaacgacaugcccaucaccaacgaccagaagaagcucauguccaacaacguccagaucguccgccagcaguccuacuccaucaugugcaucaucaaggaggagguccucgccuacgucguccagcucccccucuacggcgucaucgacacccccugcuggaagcuccacaccuccccccucugcaccaccaacaccaaggagggcuccaacaucugccucacccgcaccgaccgcggcugguacugcgacaacgccggcuccgucuccuucuucccccaggccgagaccugcaagguccaguccaaccgcgucuucugcgacaccaugaacucccucacccuccccuccgaggucaaccucugcaacgucgacaucuucaaccccaaguacgacugcaagaucaugaccuccaagaccgacgucuccuccuccgucaucaccucccucggcgccaucgucuccugcuacggcaagaccaagugcaccgccuccaacaagugccgcggcaucaucaagaccuucuccaacggcugcgacuacgucuccaacaagggcgucgacaccgucuccgucggcaacacccucuacuacgucaacaagcaggagggccagucccucuacgucaagggcgagcccaucaucaacuucuacgacccccucgucuuccccuccgacgaguucgacgccuccaucucccaggucaacgagaagaucaaccagucccucgccuucauccgcaaguccgacgagcuccuccacaacgucaacgccggcaaguccaccaccaacaucaugaucaccaccaucaucaucgucaucaucgucauccuccucucccucaucgccgucggccuccuccucuacugcaaggcccgcuga

SEQ ID NO: 7913 - RNA, 1548 nt, Artificial Sequence
  derived and/or modified CDS sequence (opt3) from HRSV(A2)__F-del_DSCav1_mut8
auggagcugcucauccuuaaggccaacgcuauuaccacaauacugacugcagugacguucugcuuugccagcggccagaauaucaccgaagaguucuaccaauccacauguucugcggucucaaaaggguauuugggagcuuuaagaacugguugguacaccaguguuauuacaaucgaacugagcaacauuaaggagaucaaaugcaauggcaccgacgccaaggugaaacuaauaaagcaggaacucgauaaguauaaaaacgcaguaacugaccugcagcuucugaugcaguccacacccgccaccgggucuggaucggcuaucgcaucaggcguggccgucuguaagguguugcaccucgagggugagguuaauaaaauuaagagcgcucugcugaguacgaacaaagccguggucucccucucugggugcggagugagcguauuaacuuuuaagguucuggaucuuaagaauuacaucgacaaacaauugcugccuauucuaaacaagcaguccuguucaaucccaaauauagaaaccgugauugaguuccagcagaaaaacaauaggcuccuggaaaucacacgggaguuuagugucaacgcgggcgugacuaccccggugagcacauauaugcuuaccaauucugagcuguugucccucauuaacgauaugcccaucacgaaugaccaaaagaaacugaugucaaacaacguccagaucguucgccagcagagcuacaguauuaugugcauaaucaaggaagagguguuagcauauguagugcaacugccucucuacggcgucauugauacuccauguuggaaacuucauacaucuccccugugcaccacuaauacaaaggaaggguccaacaucuguuugacccgaacggaccguggaugguacugcgauaaugccgguagcgugucguucuuuccucaggcugagaccuguaagguucagucuaacagaguguucugcgacacaaugaacucccuaacucugccaucagaagucaaucucugcaauguggauauauuuaaccccaaauaugacuguaagauuaugaccaguaaaacagauguaagcuccucuguuaucacuagccugggcgccaucgugucaugcuacgggaagaccaaauguacagcaaguaauaagugcaggggaauuaucaagaccuucuccaacggcugugacuaugucagcaauaaagguguggacacugucucuguggggaacacgcuuuacuauguuaauaagcaagagggacagucacuguacgugaaaggcgagccuauuauaaacuuuuaugauccauugguauucccgagugacgaauuugaugcuagcaucucccaggucaaugagaagauuaaccagucucucgccuucauccggaaaucggacgaacuguuacacaacgugaaugcgggcaagagcacaaccaacaucaugauuacuaccauaaucauuguuaucauugugauccugcuaucccucauagccgucgggcugcuuuuguacugcaaggcacgcuga

SEQ ID NO: 7914 - RNA, 1548 nt, Artificial Sequence
  derived and/or modified CDS sequence (opt4) from HRSV(A2)__F-del_DSCav1_mut8
auggagcugcugauccugaaggccaacgccaucaccaccauccugaccgccgugaccuucugcuucgccagcggccagaacaucaccgaggaguucuaccagagcaccugcagcgccgugagcaagggcuaccugggcgcccugagaaccggcugguacaccagcgugaucaccaucgagcugagcaacaucaaggagaucaagugcaacggcaccgacgccaaggugaagcugaucaagcaggagcuggacaaguacaagaacgccgugaccgaccugcagcugcugaugcagagcacccccgccaccggcagcggcagcgccaucgccagcggcguggccgugugcaaggugcugcaccuggagggcgaggugaacaagaucaagagcgcccugcugagcaccaacaaggccguggugagccugagcggcugcggcgugagcgugcugaccuucaaggugcuggaccugaagaacuacaucgacaagcagcugcugcccauccugaacaagcagagcugcagcauccccaacaucgagaccgugaucgaguuccagcagaagaacaacagacugcuggagaucaccagagaguucagcgugaacgccggcgugaccacccccgugagcaccuacaugcugaccaacagcgagcugcugagccugaucaacgacaugcccaucaccaacgaccagaagaagcugaugagcaacaacgugcagaucgugagacagcagagcuacagcaucaugugcaucaucaaggaggaggugcuggccuacguggugcagcugccccuguacggcgugaucgacacccccugcuggaagcugcacaccagcccccugugcaccaccaacaccaaggagggcagcaacaucugccugaccagaaccgacagaggcugguacugcgacaacgccggcagcgugagcuucuucccccaggccgagaccugcaaggugcagagcaacagaguguucugcgacaccaugaacagccugacccugcccagcgaggugaaccugugcaacguggacaucuucaaccccaaguacgacugcaagaucaugaccagcaagaccgacgugagcagcagcgugaucaccagccugggcgccaucgugagcugcuacggcaagaccaagugcaccgccagcaacaagugcagaggcaucaucaagaccuucagcaacggcugcgacuacgugagcaacaagggcguggacaccgugagcgugggcaacacccuguacuacgugaacaagcaggagggccagagccuguacgugaagggcgagcccaucaucaacuucuacgacccccugguguuccccagcgacgaguucgacgccagcaucagccaggugaacgagaagaucaaccagagccuggccuucaucagaaagagcgacgagcugcugcacaacgugaacgccggcaagagcaccaccaacaucaugaucaccaccaucaucaucgugaucaucgugauccugcugagccugaucgccgugggccugcugcuguacugcaaggccagauga

SEQ ID NO: 7915 - RNA, 1548 nt, Artificial Sequence
  derived and/or modified CDS sequence (opt5) from HRSV(A2)__F-del_DSCav1_mut8
auggagcugcucauccugaaggccaacgcuauuaccacaauccuuacggccgugaccuucugcuuugcgagcggccagaauauuacagaagaguucuaccaauccaccuguucugcugucagcaaaggguaucugggagcccucagaacaggcugguacaccuccguuaucacaauugaacugucuaacaucaaggagaucaaaugcaaugggaccgacgccaaggugaaacuuauuaagcaggaacuggauaaguauaaaaacgcugugacggaccuccagcugcugaugcagagcacccccgccacaggauccggcucugcuaucgccagcggggucgcgguguguaagguucuccaccuggagggagaggugaauaaaauuaaguccgcccuucugagcaccaacaaagcugucgugucucucuccggcugcggcguuagcgugcugacauuuaagguccuugaucugaagaauuacaucgacaaacaacuccugccuauucugaacaagcagucuuguuccaucccgaauauugaaaccgugaucgaguuccagcagaaaaacaaucggcuccuggaaaucacgcgcgaguuuagcgugaacgccggggucacaacccccguuucuacauauaugcuuaccaauuccgagcugcucagccugauuaacgauaugccuaucaccaaugaccaaaagaaacuuauguccaacaacgugcagauugugagacagcagucuuacagcaucaugugcauuaucaaggaagagguccuggcuuaugugguucaacucccccuguacggagugaucgauacaccuuguuggaaacugcauacgagcccccucugcaccacaaauaccaaggaaggcagcaacauuugucugacacggaccgaccgcgggugguacugcgauaaugccggaucugucuccuucuuuccucaggcggagacguguaaggugcagagcaacagaguuuucugcgacacaaugaacucucuuacccugccgagcgaagugaaucucugcaaugucgauaucuuuaaccccaaauaugacuguaagauuaugaccuccaaaacagaugugucuagcuccgucaucaccagccugggcgccauugugucuugcuacgggaagacaaaauguacggcuuccaauaagugccggggaaucaucaagaccuucagcaacggcugugacuauguuucuaauaaaggcguggacacagucuccguggggaacacccuuuacuauguuaauaagcaagagggacagagccuguacgugaaaggcgagccuauuaucaacuuuuaugauccccucgucuucccuuccgacgaauuugaugccucuauuagccaggugaaugagaagaucaaccagucccuggcuuucauucgcaaaucugacgaacugcuccacaacgugaaugccgggaaguccacaaccaacaucaugauuacgaccaucaucauuguuaucauugucauccugcuuucccugauugccgugggacuccugcuguacugcaaggcuagauga

SEQ ID NO: 7916 - RNA, 1548 nt, Artificial Sequence
  derived and/or modified CDS sequence (opt6) from HRSV(A2)__F-del_DSCav1_mut8
auggaacuacucauauugaaagccaacgcaaucacaacaauacuaaccgccguaacauuuugcuucgcgucaggccaaaauauaacagaagaauuuuaccaaucaacaugcuccgccguaucaaaaggauaccuaggugcauuacgaaccgguugguacacaucaguaaucacaauagaacuuuccaacauuaaagaaauaaaaugcaauggcacagacgcaaaagucaaacuaauaaaacaagaacuagacaaauauaaaaacgccgucacagacuuacaacuauuaaugcaaagcacaccagcaacaggauccggaucagcaauagcaucaggaguagccgucuguaaaguacuacaccuagaaggcgaaguuaauaaaauuaaaucagcuuuauuaucaaccaacaaagcaguaguaucacuauccggaugcggagucuccguccuaacauucaaaguacuagaccucaagaauuacauagauaaacaacuacuaccaauacucaacaaacaaucauguucaauaccaaacaucgaaaccgucauagaauuucaacaaaaaaauaauagacucuuagaaauaacacgagaauuuagcguaaacgcaggagucacaaccccugucucaacauacaugcuaaccaauuccgaauuauuaucacucauaaaugacaugccaauaacuaaugaccaaaaaaaacuuaugucaaacaacguacaaauaguaagacaacaaucauauucaauaaugugcauaaucaaagaagaaguuuuagcauauguaguacaacuaccacuauauggcgucauagacacaccaugcuggaaauuacacacaucaccucuaugcacaacaaacacaaaagaaggaagcaacauuugccuaaccagaaccgauagaggaugguacugcgauaacgcaggcucaguaucauucuucccucaagccgaaacuugcaaaguccaaucaaauagagucuucugcgauacaaugaacuccuuaacuuuaccaucagaaguaaaucuaugcaacguagauaucuuuaauccaaaauacgauugcaaaaucaugacaucaaaaacagauguaucaucuaguguaauuaccucccuaggagcaauaguaagcugcuacggaaaaacaaaaugcaccgccucuaacaaaugucguggaauaauaaaaacauucucaaacggaugcgauuauguaucaaauaaaggugucgacaccguaucaguaggcaauacacuauacuauguaaauaaacaagaaggacaaucacucuacgucaaaggugaaccaauaauaaacuucuacgacccacuuguauucccaagcgacgaauuugacgcaucaauaagccaaguaaacgaaaaaauaaaccaaucacuagcauucaucagaaaaucagacgaacuacuccacaauguaaaugcaggaaaaucaacaaccaauaucaugauaacaaccauaauaauagucauaauaguaauacuauuaucccucauagccguuggacuacuccuauauuguaaagcacgauaa

SEQ ID NO: 7917 - RNA, 1548 nt, Artificial Sequence
  derived and/or modified CDS sequence (opt11) from HRSV(A2)__F-del_DSCav1_mut8
auggaacuccucauccucaaagccaacgccaucaccaccauacucaccgcaguaaccuucugcuucgcauccggccaaaacaucacagaagaguucuaccagaguaccugcuccgccgucuccaaaggcuaccuuggcgcccuccguaccgggugguacacauccgucaucacaaucgaacucuccaacaucaaagaaauaaagugcaacggcacagacgccaaaguaaaacugauaaagcaagaacucgacaaauacaaaaacgccguaaccgaccuccagcuacuaaugcaauccacucccgccaccggcagcggauccgccaucgccuccggaguagccgucuguaaagucuuacaccucgaaggcgaagugaacaaaaucaaauccgcccuacucucaaccaacaaagccguaguaucacucuccgggugcggcguuucagugcuaacguucaaaguccuugaccucaaaaacuacaucgacaaacaacuccuccccauccuaaauaaacaauccugcuccauacccaacaucgagacugucaucgaguuccagcagaaaaacaaccgacuccucgaaaucacacgcgaguucucugucaacgccggcgucacaacccccgucuccacauacaugcucaccaacagcgaacuccucucccuaaucaaugacaugcccaucaccaacgaccaaaagaaacucaugucaaacaacguccaaaucguccgccaacaauccuacagcaucaugugcaucaucaaagaagaaguucucgcauacguaguacaacucccccucuacggagugaucgacacccccugcuggaaacuacacaccagcccgcuuugcaccacaaacaccaaggaaggcuccaacaucugccucacucgaaccgaccgcggcugguacugcgacaacgcaggcuccgucaguuucuuuccccaagcagaaacaugcaaaguccaauccaaccgaguauucugcgacaccaugaacucccucacccuaccauccgaaguuaaccuaugcaacguggacaucuucaaccccaaguacgacugcaaaauuaugaccuccaaaaccgacguauccuccagcgucaucaccagccucggagcaauagucuccugcuacggcaagaccaagugcaccgcuuccaacaagugucgcggaaucaucaaaaccuucucaaacggcugcgacuacgucuccaacaaaggcgucgacaccguauccguaggaaacacccuauacuacgucaacaaacaagaaggacaaucccucuaugucaaaggcgaacccaucaucaauuucuacgacccccuagucuucccuuccgacgaguucgacgcguccaucagccaagucaaugaaaagaucaaccagagccuggcauucauccgcaaauccgacgaacuccuccacaacgucaacgcgggaaaauccacgacaaacaucaugaucaccaccaucaucaucgucaucauagucauucuccuuucucucaucgccgugggacuacuucucuacugcaaagcccgauaa

SEQ ID NO: 7918 - RNA, 1824 nt, Artificial Sequence
  mRNA product Design a-1 comprising derived and/or modified sequence from HRSV(A2)__F-del_DSCav1_mut8 (opt1)
gggagagucccgcagucggcguccagcggcucugcuuguucgugugugugucguugcaggccuuauucaagcuuaccauggagcugcucauccugaaggccaacgccaucaccaccauccugacggcggugaccuucugcuucgccagcggccagaacaucaccgaggaguucuaccaguccacgugcagcgccgucuccaagggguaccucggcgcccugcggaccggcugguacaccuccgugaucaccaucgagcugagcaacaucaaggagaucaagugcaacgggaccgacgccaaggugaagcucaucaagcaggagcuggacaaguacaagaacgcggucacggaccugcagcuccugaugcaguccaccccggcaaccggcuccggcuccgccaucgcgagcggcgucgccgugugcaaggugcugcaccucgagggggaggucaacaagaucaagagcgcccugcuguccaccaacaaggccguggugagccucuccggcugcggcgucagcgugcugaccuucaaggugcuggaccucaagaacuacaucgacaagcagcugcugcccauccugaacaagcagagcugcuccauccccaacaucgagacggugaucgaguuccagcagaagaacaaccggcuccuggagaucacccgcgaguucagcgugaacgccggggucaccacccccguguccacguacaugcugaccaacagcgagcuccugucccugaucaacgacaugccgaucaccaacgaccagaagaagcucaugagcaacaacgugcagaucguccggcagcaguccuacagcaucaugugcaucaucaaggaggaggugcuggcguacgugguccagcugccccucuacggcgugaucgacacccccugcuggaagcugcacacgagcccccugugcaccaccaacaccaaggagggguccaacaucugccucacgcgcaccgaccggggcugguacugcgacaacgccggcagcgucuccuucuucccgcaggccgagaccugcaaggugcagagcaaccgcguguucugcgacaccaugaacucccugacgcugcccagcgagguaaaccucugcaacgucgacaucuucaaccccaaguacgacugcaagaucaugaccuccaagaccgacgugagcuccagcgugaucaccucccugggggccaucgucagcugcuacggcaagacgaagugcaccgccagcaacaagugccgggggaucaucaagaccuucuccaacggcugcgacuacgugagcaacaagggcguggacaccguguccgucgggaacacccuguacuacgugaacaagcaggagggccagagccucuacgugaagggggagcccaucaucaacuucuacgacccgcuggucuuccccuccgacgaguucgacgcgagcaucucccaggugaacgagaagaucaaccagagccuggccuucauccgcaaguccgacgagcugcuccacaacgugaacgccggcaagagcacgaccaacaucaugaucaccaccaucaucaucgucaucaucgugauccugcugucccucaucgccguggggcugcugcucuacugcaaggcccggugaggacuagucccuguucccagagcccacuuuuuuuucuuuuuuugaaauaaaauagccugucuuucagaucuaaaaaaaaaaaaaaaaaaaaaaaaaaaaaaaaaaaaaaaaaaaaaaaaaaaaaaaaaaaaaaaaugcaucccccccccccccccccccccccccccccccaaaggcucuuuucagagccaccagaauu

SEQ ID NO: 7919 - RNA, 1824 nt, Artificial Sequence
  mRNA product Design a-1 comprising derived and/or modified sequence from HRSV(A2)__F-del_DSCav1_mut8 (opt1)
gggagagucccgcagucggcguccagcggcucugcuuguucgugugugugucguugcaggccuuauucaagcuuaccauggagcugcucauccugaaggccaacgccaucaccaccauccugacggcggugaccuucugcuucgccagcggccagaacaucaccgaggaguucuaccaguccacgugcagcgccgucuccaagggguaccucggcgcccugcgcaccgggugguacaccagcgugaucaccaucgagcuguccaacaucaaggagaucaagugcaacggcaccgacgccaaggugaagcucaucaagcaggagcuggacaaguacaagaacgcggucacggaccugcagcuccugaugcagagcacccccgccaccggguccggcagcgccaucgccuccggcguggcggugugcaagguccugcaccucgagggggaggugaacaagaucaagagcgcccugcuguccaccaacaaggccguggucagccucuccggcugcggggugagcgugcugacguucaagguccuggaccucaagaacuacaucgacaagcagcugcugccgauccucaacaagcaguccugcagcauccccaacaucgagaccgugaucgaguuccagcagaagaacaaccggcugcuggagaucacccgcgaguucuccgugaacgccggcgucaccacgcccgugagcaccuacaugcucaccaacuccgagcugcugagccucaucaacgacaugcccaucaccaacgaccagaagaagcugaugagcaacaacgugcagaucguccggcagcaguccuacagcaucaugugcaucaucaaggaggaggugcuggccuacgugguccagcucccgcuguacggggugaucgacacgcccugcuggaagcugcacaccagcccccucugcaccaccaacacgaaggagggcuccaacaucugccugacccgcaccgaccggggcugguacugcgacaacgcgggguccgugagcuucuucccccaggccgagaccugcaagguccaguccaaccgcguguucugcgacacgaugaacagccugacccucccguccgaggucaaccugugcaacguggacaucuucaaccccaaguacgacugcaagaucaugaccagcaagaccgacguguccagcuccgucaucacgagccugggcgccaucguguccugcuacgggaagaccaagugcaccgccagcaacaagugccggggcaucaucaagaccuucuccaacggcugcgacuacgugagcaacaagggggucgacacgguguccgugggcaacacccucuacuacgucaacaagcaggaggggcagagccuguacgugaagggcgagcccaucaucaacuucuacgacccccugguguucccgagcgacgaguucgacgccuccaucagccaggucaacgagaagaucaaccagucccucgcguucauccgcaagagcgacgagcugcugcacaacgugaacgccgggaaguccaccaccaacaucaugaucaccacgaucaucaucgugaucaucgucauccuccugagccugaucgccgugggccuccugcuguacugcaaggcccggugaggacuagucccuguucccagagcccacuuuuuuuucuuuuuuugaaauaaaauagccugucuuucagaucuaaaaaaaaaaaaaaaaaaaaaaaaaaaaaaaaaaaaaaaaaaaaaaaaaaaaaaaaaaaaaaaaugcaucccccccccccccccccccccccccccccccaaaggcucuuuucagagccaccagaauu

SEQ ID NO: 7920 - RNA, 1824 nt, Artificial Sequence
  mRNA product Design a-1 comprising derived and/or modified sequence from HRSV(A2)__F-del_DSCav1_mut8 (opt2)
gggagagucccgcagucggcguccagcggcucugcuuguucgugugugugucguugcaggccuuauucaagcuuaccauggagcuccucauccucaaggccaacgccaucaccaccauccucaccgccgucaccuucugcuucgccuccggccagaacaucaccgaggaguucuaccaguccaccugcuccgccgucuccaagggcuaccucggcgcccuccgcaccggcugguacaccuccgucaucaccaucgagcucuccaacaucaaggagaucaagugcaacggcaccgacgccaaggucaagcucaucaagcaggagcucgacaaguacaagaacgccgucaccgaccuccagcuccucaugcaguccacccccgccaccggcuccggcuccgccaucgccuccggcgucgccgucugcaagguccuccaccucgagggcgaggucaacaagaucaaguccgcccuccucuccaccaacaaggccgucgucucccucuccggcugcggcgucuccguccucaccuucaagguccucgaccucaagaacuacaucgacaagcagcuccuccccauccucaacaagcaguccugcuccauccccaacaucgagaccgucaucgaguuccagcagaagaacaaccgccuccucgagaucacccgcgaguucuccgucaacgccggcgucaccacccccgucuccaccuacaugcucaccaacuccgagcuccucucccucaucaacgacaugcccaucaccaacgaccagaagaagcucauguccaacaacguccagaucguccgccagcaguccuacuccaucaugugcaucaucaaggaggagguccucgccuacgucguccagcucccccucuacggcgucaucgacacccccugcuggaagcuccacaccuccccccucugcaccaccaacaccaaggagggcuccaacaucugccucacccgcaccgaccgcggcugguacugcgacaacgccggcuccgucuccuucuucccccaggccgagaccugcaagguccaguccaaccgcgucuucugcgacaccaugaacucccucacccuccccuccgaggucaaccucugcaacgucgacaucuucaaccccaaguacgacugcaagaucaugaccuccaagaccgacgucuccuccuccgucaucaccucccucggcgccaucgucuccugcuacggcaagaccaagugcaccgccuccaacaagugccgcggcaucaucaagaccuucuccaacggcugcgacuacgucuccaacaagggcgucgacaccgucuccgucggcaacacccucuacuacgucaacaagcaggagggccagucccucuacgucaagggcgagcccaucaucaacuucuacgacccccucgucuuccccuccgacgaguucgacgccuccaucucccaggucaacgagaagaucaaccagucccucgccuucauccgcaaguccgacgagcuccuccacaacgucaacgccggcaaguccaccaccaacaucaugaucaccaccaucaucaucgucaucaucgucauccuccucucccucaucgccgucggccuccuccucuacugcaaggcccgcugaggacuagucccuguucccagagcccacuuuuuuuucuuuuuuugaaauaaaauagccugucuuucagaucuaaaaaaaaaaaaaaaaaaaaaaaaaaaaaaaaaaaaaaaaaaaaaaaaaaaaaaaaaaaaaaaaugcaucccccccccccccccccccccccccccccccaaaggcucuuuucagagccaccagaauu

SEQ ID NO: 7921 - RNA, 1824 nt, Artificial Sequence
  mRNA product Design a-1 comprising derived and/or modified sequence from HRSV(A2)__F-del_DSCav1_mut8 (opt3)
gggagagucccgcagucggcguccagcggcucugcuuguucgugugugugucguugcaggccuuauucaagcuuaccauggagcugcucauccuuaaggccaacgcuauuaccacaauacugacugcagugacguucugcuuugccagcggccagaauaucaccgaagaguucuaccaauccacauguucugcggucucaaaaggguauuugggagcuuuaagaacugguugguacaccaguguuauuacaaucgaacugagcaacauuaaggagaucaaaugcaauggcaccgacgccaaggugaaacuaauaaagcaggaacucgauaaguauaaaaacgcaguaacugaccugcagcuucugaugcaguccacacccgccaccgggucuggaucggcuaucgcaucaggcguggccgucuguaagguguugcaccucgagggugagguuaauaaaauuaagagcgcucugcugaguacgaacaaagccguggucucccucucugggugcggagugagcguauuaacuuuuaagguucuggaucuuaagaauuacaucgacaaacaauugcugccuauucuaaacaagcaguccuguucaaucccaaauauagaaaccgugauugaguuccagcagaaaaacaauaggcuccuggaaaucacacgggaguuuagugucaacgcgggcgugacuaccccggugagcacauauaugcuuaccaauucugagcuguugucccucauuaacgauaugcccaucacgaaugaccaaaagaaacugaugucaaacaacguccagaucguucgccagcagagcuacaguauuaugugcauaaucaaggaagagguguuagcauauguagugcaacugccucucuacggcgucauugauacuccauguuggaaacuucauacaucuccccugugcaccacuaauacaaaggaaggguccaacaucuguuugacccgaacggaccguggaugguacugcgauaaugccgguagcgugucguucuuuccucaggcugagaccuguaagguucagucuaacagaguguucugcgacacaaugaacucccuaacucugccaucagaagucaaucucugcaauguggauauauuuaaccccaaauaugacuguaagauuaugaccaguaaaacagauguaagcuccucuguuaucacuagccugggcgccaucgugucaugcuacgggaagaccaaauguacagcaaguaauaagugcaggggaauuaucaagaccuucuccaacggcugugacuaugucagcaauaaagguguggacacugucucuguggggaacacgcuuuacuauguuaauaagcaagagggacagucacuguacgugaaaggcgagccuauuauaaacuuuuaugauccauugguauucccgagugacgaauuugaugcuagcaucucccaggucaaugagaagauuaaccagucucucgccuucauccggaaaucggacgaacuguuacacaacgugaaugcgggcaagagcacaaccaacaucaugauuacuaccauaaucauuguuaucauugugauccugcuaucccucauagccgucgggcugcuuuuguacugcaaggcacgcugaggacuagucccuguucccagagcccacuuuuuuuucuuuuuuugaaauaaaauagccugucuuucagaucuaaaaaaaaaaaaaaaaaaaaaaaaaaaaaaaaaaaaaaaaaaaaaaaaaaaaaaaaaaaaaaaaugcaucccccccccccccccccccccccccccccccaaaggcucuuuucagagccaccagaauu

SEQ ID NO: 7922 - RNA, 1824 nt, Artificial Sequence
  mRNA product Design a-1 comprising derived and/or modified sequence from HRSV(A2)__F-del_DSCav1_mut8 (opt4)
gggagagucccgcagucggcguccagcggcucugcuuguucgugugugugucguugcaggccuuauucaagcuuaccauggagcugcugauccugaaggccaacgccaucaccaccauccugaccgccgugaccuucugcuucgccagcggccagaacaucaccgaggaguucuaccagagcaccugcagcgccgugagcaagggcuaccugggcgcccugagaaccggcugguacaccagcgugaucaccaucgagcugagcaacaucaaggagaucaagugcaacggcaccgacgccaaggugaagcugaucaagcaggagcuggacaaguacaagaacgccgugaccgaccugcagcugcugaugcagagcacccccgccaccggcagcggcagcgccaucgccagcggcguggccgugugcaaggugcugcaccuggagggcgaggugaacaagaucaagagcgcccugcugagcaccaacaaggccguggugagccugagcggcugcggcgugagcgugcugaccuucaaggugcuggaccugaagaacuacaucgacaagcagcugcugcccauccugaacaagcagagcugcagcauccccaacaucgagaccgugaucgaguuccagcagaagaacaacagacugcuggagaucaccagagaguucagcgugaacgccggcgugaccacccccgugagcaccuacaugcugaccaacagcgagcugcugagccugaucaacgacaugcccaucaccaacgaccagaagaagcugaugagcaacaacgugcagaucgugagacagcagagcuacagcaucaugugcaucaucaaggaggaggugcuggccuacguggugcagcugccccuguacggcgugaucgacacccccugcuggaagcugcacaccagcccccugugcaccaccaacaccaaggagggcagcaacaucugccugaccagaaccgacagaggcugguacugcgacaacgccggcagcgugagcuucuucccccaggccgagaccugcaaggugcagagcaacagaguguucugcgacaccaugaacagccugacccugcccagcgaggugaaccugugcaacguggacaucuucaaccccaaguacgacugcaagaucaugaccagcaagaccgacgugagcagcagcgugaucaccagccugggcgccaucgugagcugcuacggcaagaccaagugcaccgccagcaacaagugcagaggcaucaucaagaccuucagcaacggcugcgacuacgugagcaacaagggcguggacaccgugagcgugggcaacacccuguacuacgugaacaagcaggagggccagagccuguacgugaagggcgagcccaucaucaacuucuacgacccccugguguuccccagcgacgaguucgacgccagcaucagccaggugaacgagaagaucaaccagagccuggccuucaucagaaagagcgacgagcugcugcacaacgugaacgccggcaagagcaccaccaacaucaugaucaccaccaucaucaucgugaucaucgugauccugcugagccugaucgccgugggccugcugcuguacugcaaggccagaugaggacuagucccuguucccagagcccacuuuuuuuucuuuuuuugaaauaaaauagccugucuuucagaucuaaaaaaaaaaaaaaaaaaaaaaaaaaaaaaaaaaaaaaaaaaaaaaaaaaaaaaaaaaaaaaaaugcaucccccccccccccccccccccccccccccccaaaggcucuuuucagagccaccagaauu

SEQ ID NO: 7923 - RNA, 1824 nt, Artificial Sequence
  mRNA product Design a-1 comprising derived and/or modified sequence from HRSV(A2)__F-del_DSCav1_mut8 (opt5)
gggagagucccgcagucggcguccagcggcucugcuuguucgugugugugucguugcaggccuuauucaagcuuaccauggagcugcucauccugaaggccaacgcuauuaccacaauccuuacggccgugaccuucugcuuugcgagcggccagaauauuacagaagaguucuaccaauccaccuguucugcugucagcaaaggguaucugggagcccucagaacaggcugguacaccuccguuaucacaauugaacugucuaacaucaaggagaucaaaugcaaugggaccgacgccaaggugaaacuuauuaagcaggaacuggauaaguauaaaaacgcugugacggaccuccagcugcugaugcagagcacccccgccacaggauccggcucugcuaucgccagcggggucgcgguguguaagguucuccaccuggagggagaggugaauaaaauuaaguccgcccuucugagcaccaacaaagcugucgugucucucuccggcugcggcguuagcgugcugacauuuaagguccuugaucugaagaauuacaucgacaaacaacuccugccuauucugaacaagcagucuuguuccaucccgaauauugaaaccgugaucgaguuccagcagaaaaacaaucggcuccuggaaaucacgcgcgaguuuagcgugaacgccggggucacaacccccguuucuacauauaugcuuaccaauuccgagcugcucagccugauuaacgauaugccuaucaccaaugaccaaaagaaacuuauguccaacaacgugcagauugugagacagcagucuuacagcaucaugugcauuaucaaggaagagguccuggcuuaugugguucaacucccccuguacggagugaucgauacaccuuguuggaaacugcauacgagcccccucugcaccacaaauaccaaggaaggcagcaacauuugucugacacggaccgaccgcgggugguacugcgauaaugccggaucugucuccuucuuuccucaggcggagacguguaaggugcagagcaacagaguuuucugcgacacaaugaacucucuuacccugccgagcgaagugaaucucugcaaugucgauaucuuuaaccccaaauaugacuguaagauuaugaccuccaaaacagaugugucuagcuccgucaucaccagccugggcgccauugugucuugcuacgggaagacaaaauguacggcuuccaauaagugccggggaaucaucaagaccuucagcaacggcugugacuauguuucuaauaaaggcguggacacagucuccguggggaacacccuuuacuauguuaauaagcaagagggacagagccuguacgugaaaggcgagccuauuaucaacuuuuaugauccccucgucuucccuuccgacgaauuugaugccucuauuagccaggugaaugagaagaucaaccagucccuggcuuucauucgcaaaucugacgaacugcuccacaacgugaaugccgggaaguccacaaccaacaucaugauuacgaccaucaucauuguuaucauugucauccugcuuucccugauugccgugggacuccugcuguacugcaaggcuagaugaggacuagucccuguucccagagcccacuuuuuuuucuuuuuuugaaauaaaauagccugucuuucagaucuaaaaaaaaaaaaaaaaaaaaaaaaaaaaaaaaaaaaaaaaaaaaaaaaaaaaaaaaaaaaaaaaugcaucccccccccccccccccccccccccccccccaaaggcucuuuucagagccaccagaauu

SEQ ID NO: 7924 - RNA, 1824 nt, Artificial Sequence
  mRNA product Design a-1 comprising derived and/or modified sequence from HRSV(A2)__F-del_DSCav1_mut8 (opt6)
gggagagucccgcagucggcguccagcggcucugcuuguucgugugugugucguugcaggccuuauucaagcuuaccauggaacuacucauauugaaagccaacgcaaucacaacaauacuaaccgccguaacauuuugcuucgcgucaggccaaaauauaacagaagaauuuuaccaaucaacaugcuccgccguaucaaaaggauaccuaggugcauuacgaaccgguugguacacaucaguaaucacaauagaacuuuccaacauuaaagaaauaaaaugcaauggcacagacgcaaaagucaaacuaauaaaacaagaacuagacaaauauaaaaacgccgucacagacuuacaacuauuaaugcaaagcacaccagcaacaggauccggaucagcaauagcaucaggaguagccgucuguaaaguacuacaccuagaaggcgaaguuaauaaaauuaaaucagcuuuauuaucaaccaacaaagcaguaguaucacuauccggaugcggagucuccguccuaacauucaaaguacuagaccucaagaauuacauagauaaacaacuacuaccaauacucaacaaacaaucauguucaauaccaaacaucgaaaccgucauagaauuucaacaaaaaaauaauagacucuuagaaauaacacgagaauuuagcguaaacgcaggagucacaaccccugucucaacauacaugcuaaccaauuccgaauuauuaucacucauaaaugacaugccaauaacuaaugaccaaaaaaaacuuaugucaaacaacguacaaauaguaagacaacaaucauauucaauaaugugcauaaucaaagaagaaguuuuagcauauguaguacaacuaccacuauauggcgucauagacacaccaugcuggaaauuacacacaucaccucuaugcacaacaaacacaaaagaaggaagcaacauuugccuaaccagaaccgauagaggaugguacugcgauaacgcaggcucaguaucauucuucccucaagccgaaacuugcaaaguccaaucaaauagagucuucugcgauacaaugaacuccuuaacuuuaccaucagaaguaaaucuaugcaacguagauaucuuuaauccaaaauacgauugcaaaaucaugacaucaaaaacagauguaucaucuaguguaauuaccucccuaggagcaauaguaagcugcuacggaaaaacaaaaugcaccgccucuaacaaaugucguggaauaauaaaaacauucucaaacggaugcgauuauguaucaaauaaaggugucgacaccguaucaguaggcaauacacuauacuauguaaauaaacaagaaggacaaucacucuacgucaaaggugaaccaauaauaaacuucuacgacccacuuguauucccaagcgacgaauuugacgcaucaauaagccaaguaaacgaaaaaauaaaccaaucacuagcauucaucagaaaaucagacgaacuacuccacaauguaaaugcaggaaaaucaacaaccaauaucaugauaacaaccauaauaauagucauaauaguaauacuauuaucccucauagccguuggacuacuccuauauuguaaagcacgauaaggacuagucccuguucccagagcccacuuuuuuuucuuuuuuugaaauaaaauagccugucuuucagaucuaaaaaaaaaaaaaaaaaaaaaaaaaaaaaaaaaaaaaaaaaaaaaaaaaaaaaaaaaaaaaaaaugcaucccccccccccccccccccccccccccccccaaaggcucuuuucagagccaccagaauu

SEQ ID NO: 7925 - RNA, 1824 nt, Artificial Sequence
  mRNA product Design a-1 comprising derived and/or modified sequence from HRSV(A2)__F-del_DSCav1_mut8 (opt11)
gggagagucccgcagucggcguccagcggcucugcuuguucgugugugugucguugcaggccuuauucaagcuuaccauggaacuccucauccucaaagccaacgccaucaccaccauacucaccgcaguaaccuucugcuucgcauccggccaaaacaucacagaagaguucuaccagaguaccugcuccgccgucuccaaaggcuaccuuggcgcccuccguaccgggugguacacauccgucaucacaaucgaacucuccaacaucaaagaaauaaagugcaacggcacagacgccaaaguaaaacugauaaagcaagaacucgacaaauacaaaaacgccguaaccgaccuccagcuacuaaugcaauccacucccgccaccggcagcggauccgccaucgccuccggaguagccgucuguaaagucuuacaccucgaaggcgaagugaacaaaaucaaauccgcccuacucucaaccaacaaagccguaguaucacucuccgggugcggcguuucagugcuaacguucaaaguccuugaccucaaaaacuacaucgacaaacaacuccuccccauccuaaauaaacaauccugcuccauacccaacaucgagacugucaucgaguuccagcagaaaaacaaccgacuccucgaaaucacacgcgaguucucugucaacgccggcgucacaacccccgucuccacauacaugcucaccaacagcgaacuccucucccuaaucaaugacaugcccaucaccaacgaccaaaagaaacucaugucaaacaacguccaaaucguccgccaacaauccuacagcaucaugugcaucaucaaagaagaaguucucgcauacguaguacaacucccccucuacggagugaucgacacccccugcuggaaacuacacaccagcccgcuuugcaccacaaacaccaaggaaggcuccaacaucugccucacucgaaccgaccgcggcugguacugcgacaacgcaggcuccgucaguuucuuuccccaagcagaaacaugcaaaguccaauccaaccgaguauucugcgacaccaugaacucccucacccuaccauccgaaguuaaccuaugcaacguggacaucuucaaccccaaguacgacugcaaaauuaugaccuccaaaaccgacguauccuccagcgucaucaccagccucggagcaauagucuccugcuacggcaagaccaagugcaccgcuuccaacaagugucgcggaaucaucaaaaccuucucaaacggcugcgacuacgucuccaacaaaggcgucgacaccguauccguaggaaacacccuauacuacgucaacaaacaagaaggacaaucccucuaugucaaaggcgaacccaucaucaauuucuacgacccccuagucuucccuuccgacgaguucgacgcguccaucagccaagucaaugaaaagaucaaccagagccuggcauucauccgcaaauccgacgaacuccuccacaacgucaacgcgggaaaauccacgacaaacaucaugaucaccaccaucaucaucgucaucauagucauucuccuuucucucaucgccgugggacuacuucucuacugcaaagcccgauaaggacuagucccuguucccagagcccacuuuuuuuucuuuuuuugaaauaaaauagccugucuuucagaucuaaaaaaaaaaaaaaaaaaaaaaaaaaaaaaaaaaaaaaaaaaaaaaaaaaaaaaaaaaaaaaaaugcaucccccccccccccccccccccccccccccccaaaggcucuuuucagagccaccagaauu

SEQ ID NO: 7926 - RNA, 1843 nt, Artificial Sequence
  mRNA product Design a-2 comprising derived and/or modified sequence from HRSV(A2)__F-del_DSCav1_mut8 (opt1)
gggagaguccgcucagccagguugcagaagcggcuuagcguguguccuaaucuucucucugcguguagguaggccugugccgcaaacaagcuuaccauggagcugcucauccugaaggccaacgccaucaccaccauccugacggcggugaccuucugcuucgccagcggccagaacaucaccgaggaguucuaccaguccacgugcagcgccgucuccaagggguaccucggcgcccugcggaccggcugguacaccuccgugaucaccaucgagcugagcaacaucaaggagaucaagugcaacgggaccgacgccaaggugaagcucaucaagcaggagcuggacaaguacaagaacgcggucacggaccugcagcuccugaugcaguccaccccggcaaccggcuccggcuccgccaucgcgagcggcgucgccgugugcaaggugcugcaccucgagggggaggucaacaagaucaagagcgcccugcuguccaccaacaaggccguggugagccucuccggcugcggcgucagcgugcugaccuucaaggugcuggaccucaagaacuacaucgacaagcagcugcugcccauccugaacaagcagagcugcuccauccccaacaucgagacggugaucgaguuccagcagaagaacaaccggcuccuggagaucacccgcgaguucagcgugaacgccggggucaccacccccguguccacguacaugcugaccaacagcgagcuccugucccugaucaacgacaugccgaucaccaacgaccagaagaagcucaugagcaacaacgugcagaucguccggcagcaguccuacagcaucaugugcaucaucaaggaggaggugcuggcguacgugguccagcugccccucuacggcgugaucgacacccccugcuggaagcugcacacgagcccccugugcaccaccaacaccaaggagggguccaacaucugccucacgcgcaccgaccggggcugguacugcgacaacgccggcagcgucuccuucuucccgcaggccgagaccugcaaggugcagagcaaccgcguguucugcgacaccaugaacucccugacgcugcccagcgagguaaaccucugcaacgucgacaucuucaaccccaaguacgacugcaagaucaugaccuccaagaccgacgugagcuccagcgugaucaccucccugggggccaucgucagcugcuacggcaagacgaagugcaccgccagcaacaagugccgggggaucaucaagaccuucuccaacggcugcgacuacgugagcaacaagggcguggacaccguguccgucgggaacacccuguacuacgugaacaagcaggagggccagagccucuacgugaagggggagcccaucaucaacuucuacgacccgcuggucuuccccuccgacgaguucgacgcgagcaucucccaggugaacgagaagaucaaccagagccuggccuucauccgcaaguccgacgagcugcuccacaacgugaacgccggcaagagcacgaccaacaucaugaucaccaccaucaucaucgucaucaucgugauccugcugucccucaucgccguggggcugcugcucuacugcaaggcccggugaggacuagucccuguucccagagcccacuuuuuuuucuuuuuuugaaauaaaauagccugucuuucagaucuaaaaaaaaaaaaaaaaaaaaaaaaaaaaaaaaaaaaaaaaaaaaaaaaaaaaaaaaaaaaaaaaugcaucccccccccccccccccccccccccccccccaaaggcucuuuucagagccaccagaauu

SEQ ID NO: 7927 - RNA, 1843 nt, Artificial Sequence
  mRNA product Design a-2 comprising derived and/or modified sequence from HRSV(A2)__F-del_DSCav1_mut8 (opt1)
gggagaguccgcucagccagguugcagaagcggcuuagcguguguccuaaucuucucucugcguguagguaggccugugccgcaaacaagcuuaccauggagcugcucauccugaaggccaacgccaucaccaccauccugacggcggugaccuucugcuucgccagcggccagaacaucaccgaggaguucuaccaguccacgugcagcgccgucuccaagggguaccucggcgcccugcgcaccgggugguacaccagcgugaucaccaucgagcuguccaacaucaaggagaucaagugcaacggcaccgacgccaaggugaagcucaucaagcaggagcuggacaaguacaagaacgcggucacggaccugcagcuccugaugcagagcacccccgccaccggguccggcagcgccaucgccuccggcguggcggugugcaagguccugcaccucgagggggaggugaacaagaucaagagcgcccugcuguccaccaacaaggccguggucagccucuccggcugcggggugagcgugcugacguucaagguccuggaccucaagaacuacaucgacaagcagcugcugccgauccucaacaagcaguccugcagcauccccaacaucgagaccgugaucgaguuccagcagaagaacaaccggcugcuggagaucacccgcgaguucuccgugaacgccggcgucaccacgcccgugagcaccuacaugcucaccaacuccgagcugcugagccucaucaacgacaugcccaucaccaacgaccagaagaagcugaugagcaacaacgugcagaucguccggcagcaguccuacagcaucaugugcaucaucaaggaggaggugcuggccuacgugguccagcucccgcuguacggggugaucgacacgcccugcuggaagcugcacaccagcccccucugcaccaccaacacgaaggagggcuccaacaucugccugacccgcaccgaccggggcugguacugcgacaacgcgggguccgugagcuucuucccccaggccgagaccugcaagguccaguccaaccgcguguucugcgacacgaugaacagccugacccucccguccgaggucaaccugugcaacguggacaucuucaaccccaaguacgacugcaagaucaugaccagcaagaccgacguguccagcuccgucaucacgagccugggcgccaucguguccugcuacgggaagaccaagugcaccgccagcaacaagugccggggcaucaucaagaccuucuccaacggcugcgacuacgugagcaacaagggggucgacacgguguccgugggcaacacccucuacuacgucaacaagcaggaggggcagagccuguacgugaagggcgagcccaucaucaacuucuacgacccccugguguucccgagcgacgaguucgacgccuccaucagccaggucaacgagaagaucaaccagucccucgcguucauccgcaagagcgacgagcugcugcacaacgugaacgccgggaaguccaccaccaacaucaugaucaccacgaucaucaucgugaucaucgucauccuccugagccugaucgccgugggccuccugcuguacugcaaggcccggugaggacuagucccuguucccagagcccacuuuuuuuucuuuuuuugaaauaaaauagccugucuuucagaucuaaaaaaaaaaaaaaaaaaaaaaaaaaaaaaaaaaaaaaaaaaaaaaaaaaaaaaaaaaaaaaaaugcaucccccccccccccccccccccccccccccccaaaggcucuuuucagagccaccagaauu

SEQ ID NO: 7928 - RNA, 1843 nt, Artificial Sequence
  mRNA product Design a-2 comprising derived and/or modified sequence from HRSV(A2)__F-del_DSCav1_mut8 (opt2)
gggagaguccgcucagccagguugcagaagcggcuuagcguguguccuaaucuucucucugcguguagguaggccugugccgcaaacaagcuuaccauggagcuccucauccucaaggccaacgccaucaccaccauccucaccgccgucaccuucugcuucgccuccggccagaacaucaccgaggaguucuaccaguccaccugcuccgccgucuccaagggcuaccucggcgcccuccgcaccggcugguacaccuccgucaucaccaucgagcucuccaacaucaaggagaucaagugcaacggcaccgacgccaaggucaagcucaucaagcaggagcucgacaaguacaagaacgccgucaccgaccuccagcuccucaugcaguccacccccgccaccggcuccggcuccgccaucgccuccggcgucgccgucugcaagguccuccaccucgagggcgaggucaacaagaucaaguccgcccuccucuccaccaacaaggccgucgucucccucuccggcugcggcgucuccguccucaccuucaagguccucgaccucaagaacuacaucgacaagcagcuccuccccauccucaacaagcaguccugcuccauccccaacaucgagaccgucaucgaguuccagcagaagaacaaccgccuccucgagaucacccgcgaguucuccgucaacgccggcgucaccacccccgucuccaccuacaugcucaccaacuccgagcuccucucccucaucaacgacaugcccaucaccaacgaccagaagaagcucauguccaacaacguccagaucguccgccagcaguccuacuccaucaugugcaucaucaaggaggagguccucgccuacgucguccagcucccccucuacggcgucaucgacacccccugcuggaagcuccacaccuccccccucugcaccaccaacaccaaggagggcuccaacaucugccucacccgcaccgaccgcggcugguacugcgacaacgccggcuccgucuccuucuucccccaggccgagaccugcaagguccaguccaaccgcgucuucugcgacaccaugaacucccucacccuccccuccgaggucaaccucugcaacgucgacaucuucaaccccaaguacgacugcaagaucaugaccuccaagaccgacgucuccuccuccgucaucaccucccucggcgccaucgucuccugcuacggcaagaccaagugcaccgccuccaacaagugccgcggcaucaucaagaccuucuccaacggcugcgacuacgucuccaacaagggcgucgacaccgucuccgucggcaacacccucuacuacgucaacaagcaggagggccagucccucuacgucaagggcgagcccaucaucaacuucuacgacccccucgucuuccccuccgacgaguucgacgccuccaucucccaggucaacgagaagaucaaccagucccucgccuucauccgcaaguccgacgagcuccuccacaacgucaacgccggcaaguccaccaccaacaucaugaucaccaccaucaucaucgucaucaucgucauccuccucucccucaucgccgucggccuccuccucuacugcaaggcccgcugaggacuagucccuguucccagagcccacuuuuuuuucuuuuuuugaaauaaaauagccugucuuucagaucuaaaaaaaaaaaaaaaaaaaaaaaaaaaaaaaaaaaaaaaaaaaaaaaaaaaaaaaaaaaaaaaaugcaucccccccccccccccccccccccccccccccaaaggcucuuuucagagccaccagaauu

SEQ ID NO: 7929 - RNA, 1843 nt, Artificial Sequence
  mRNA product Design a-2 comprising derived and/or modified sequence from HRSV(A2)__F-del_DSCav1_mut8 (opt3)
gggagaguccgcucagccagguugcagaagcggcuuagcguguguccuaaucuucucucugcguguagguaggccugugccgcaaacaagcuuaccauggagcugcucauccuuaaggccaacgcuauuaccacaauacugacugcagugacguucugcuuugccagcggccagaauaucaccgaagaguucuaccaauccacauguucugcggucucaaaaggguauuugggagcuuuaagaacugguugguacaccaguguuauuacaaucgaacugagcaacauuaaggagaucaaaugcaauggcaccgacgccaaggugaaacuaauaaagcaggaacucgauaaguauaaaaacgcaguaacugaccugcagcuucugaugcaguccacacccgccaccgggucuggaucggcuaucgcaucaggcguggccgucuguaagguguugcaccucgagggugagguuaauaaaauuaagagcgcucugcugaguacgaacaaagccguggucucccucucugggugcggagugagcguauuaacuuuuaagguucuggaucuuaagaauuacaucgacaaacaauugcugccuauucuaaacaagcaguccuguucaaucccaaauauagaaaccgugauugaguuccagcagaaaaacaauaggcuccuggaaaucacacgggaguuuagugucaacgcgggcgugacuaccccggugagcacauauaugcuuaccaauucugagcuguugucccucauuaacgauaugcccaucacgaaugaccaaaagaaacugaugucaaacaacguccagaucguucgccagcagagcuacaguauuaugugcauaaucaaggaagagguguuagcauauguagugcaacugccucucuacggcgucauugauacuccauguuggaaacuucauacaucuccccugugcaccacuaauacaaaggaaggguccaacaucuguuugacccgaacggaccguggaugguacugcgauaaugccgguagcgugucguucuuuccucaggcugagaccuguaagguucagucuaacagaguguucugcgacacaaugaacucccuaacucugccaucagaagucaaucucugcaauguggauauauuuaaccccaaauaugacuguaagauuaugaccaguaaaacagauguaagcuccucuguuaucacuagccugggcgccaucgugucaugcuacgggaagaccaaauguacagcaaguaauaagugcaggggaauuaucaagaccuucuccaacggcugugacuaugucagcaauaaagguguggacacugucucuguggggaacacgcuuuacuauguuaauaagcaagagggacagucacuguacgugaaaggcgagccuauuauaaacuuuuaugauccauugguauucccgagugacgaauuugaugcuagcaucucccaggucaaugagaagauuaaccagucucucgccuucauccggaaaucggacgaacuguuacacaacgugaaugcgggcaagagcacaaccaacaucaugauuacuaccauaaucauuguuaucauugugauccugcuaucccucauagccgucgggcugcuuuuguacugcaaggcacgcugaggacuagucccuguucccagagcccacuuuuuuuucuuuuuuugaaauaaaauagccugucuuucagaucuaaaaaaaaaaaaaaaaaaaaaaaaaaaaaaaaaaaaaaaaaaaaaaaaaaaaaaaaaaaaaaaaugcaucccccccccccccccccccccccccccccccaaaggcucuuuucagagccaccagaauu

SEQ ID NO: 7930 - RNA, 1843 nt, Artificial Sequence
  mRNA product Design a-2 comprising derived and/or modified sequence from HRSV(A2)__F-del_DSCav1_mut8 (opt4)
gggagaguccgcucagccagguugcagaagcggcuuagcguguguccuaaucuucucucugcguguagguaggccugugccgcaaacaagcuuaccauggagcugcugauccugaaggccaacgccaucaccaccauccugaccgccgugaccuucugcuucgccagcggccagaacaucaccgaggaguucuaccagagcaccugcagcgccgugagcaagggcuaccugggcgcccugagaaccggcugguacaccagcgugaucaccaucgagcugagcaacaucaaggagaucaagugcaacggcaccgacgccaaggugaagcugaucaagcaggagcuggacaaguacaagaacgccgugaccgaccugcagcugcugaugcagagcacccccgccaccggcagcggcagcgccaucgccagcggcguggccgugugcaaggugcugcaccuggagggcgaggugaacaagaucaagagcgcccugcugagcaccaacaaggccguggugagccugagcggcugcggcgugagcgugcugaccuucaaggugcuggaccugaagaacuacaucgacaagcagcugcugcccauccugaacaagcagagcugcagcauccccaacaucgagaccgugaucgaguuccagcagaagaacaacagacugcuggagaucaccagagaguucagcgugaacgccggcgugaccacccccgugagcaccuacaugcugaccaacagcgagcugcugagccugaucaacgacaugcccaucaccaacgaccagaagaagcugaugagcaacaacgugcagaucgugagacagcagagcuacagcaucaugugcaucaucaaggaggaggugcuggccuacguggugcagcugccccuguacggcgugaucgacacccccugcuggaagcugcacaccagcccccugugcaccaccaacaccaaggagggcagcaacaucugccugaccagaaccgacagaggcugguacugcgacaacgccggcagcgugagcuucuucccccaggccgagaccugcaaggugcagagcaacagaguguucugcgacaccaugaacagccugacccugcccagcgaggugaaccugugcaacguggacaucuucaaccccaaguacgacugcaagaucaugaccagcaagaccgacgugagcagcagcgugaucaccagccugggcgccaucgugagcugcuacggcaagaccaagugcaccgccagcaacaagugcagaggcaucaucaagaccuucagcaacggcugcgacuacgugagcaacaagggcguggacaccgugagcgugggcaacacccuguacuacgugaacaagcaggagggccagagccuguacgugaagggcgagcccaucaucaacuucuacgacccccugguguuccccagcgacgaguucgacgccagcaucagccaggugaacgagaagaucaaccagagccuggccuucaucagaaagagcgacgagcugcugcacaacgugaacgccggcaagagcaccaccaacaucaugaucaccaccaucaucaucgugaucaucgugauccugcugagccugaucgccgugggccugcugcuguacugcaaggccagaugaggacuagucccuguucccagagcccacuuuuuuuucuuuuuuugaaauaaaauagccugucuuucagaucuaaaaaaaaaaaaaaaaaaaaaaaaaaaaaaaaaaaaaaaaaaaaaaaaaaaaaaaaaaaaaaaaugcaucccccccccccccccccccccccccccccccaaaggcucuuuucagagccaccagaauu

SEQ ID NO: 7931 - RNA, 1843 nt, Artificial Sequence
  mRNA product Design a-2 comprising derived and/or modified sequence from HRSV(A2)__F-del_DSCav1_mut8 (opt5)
gggagaguccgcucagccagguugcagaagcggcuuagcguguguccuaaucuucucucugcguguagguaggccugugccgcaaacaagcuuaccauggagcugcucauccugaaggccaacgcuauuaccacaauccuuacggccgugaccuucugcuuugcgagcggccagaauauuacagaagaguucuaccaauccaccuguucugcugucagcaaaggguaucugggagcccucagaacaggcugguacaccuccguuaucacaauugaacugucuaacaucaaggagaucaaaugcaaugggaccgacgccaaggugaaacuuauuaagcaggaacuggauaaguauaaaaacgcugugacggaccuccagcugcugaugcagagcacccccgccacaggauccggcucugcuaucgccagcggggucgcgguguguaagguucuccaccuggagggagaggugaauaaaauuaaguccgcccuucugagcaccaacaaagcugucgugucucucuccggcugcggcguuagcgugcugacauuuaagguccuugaucugaagaauuacaucgacaaacaacuccugccuauucugaacaagcagucuuguuccaucccgaauauugaaaccgugaucgaguuccagcagaaaaacaaucggcuccuggaaaucacgcgcgaguuuagcgugaacgccggggucacaacccccguuucuacauauaugcuuaccaauuccgagcugcucagccugauuaacgauaugccuaucaccaaugaccaaaagaaacuuauguccaacaacgugcagauugugagacagcagucuuacagcaucaugugcauuaucaaggaagagguccuggcuuaugugguucaacucccccuguacggagugaucgauacaccuuguuggaaacugcauacgagcccccucugcaccacaaauaccaaggaaggcagcaacauuugucugacacggaccgaccgcgggugguacugcgauaaugccggaucugucuccuucuuuccucaggcggagacguguaaggugcagagcaacagaguuuucugcgacacaaugaacucucuuacccugccgagcgaagugaaucucugcaaugucgauaucuuuaaccccaaauaugacuguaagauuaugaccuccaaaacagaugugucuagcuccgucaucaccagccugggcgccauugugucuugcuacgggaagacaaaauguacggcuuccaauaagugccggggaaucaucaagaccuucagcaacggcugugacuauguuucuaauaaaggcguggacacagucuccguggggaacacccuuuacuauguuaauaagcaagagggacagagccuguacgugaaaggcgagccuauuaucaacuuuuaugauccccucgucuucccuuccgacgaauuugaugccucuauuagccaggugaaugagaagaucaaccagucccuggcuuucauucgcaaaucugacgaacugcuccacaacgugaaugccgggaaguccacaaccaacaucaugauuacgaccaucaucauuguuaucauugucauccugcuuucccugauugccgugggacuccugcuguacugcaaggcuagaugaggacuagucccuguucccagagcccacuuuuuuuucuuuuuuugaaauaaaauagccugucuuucagaucuaaaaaaaaaaaaaaaaaaaaaaaaaaaaaaaaaaaaaaaaaaaaaaaaaaaaaaaaaaaaaaaaugcaucccccccccccccccccccccccccccccccaaaggcucuuuucagagccaccagaauu

SEQ ID NO: 7932 - RNA, 1843 nt, Artificial Sequence
  mRNA product Design a-2 comprising derived and/or modified sequence from HRSV(A2)__F-del_DSCav1_mut8 (opt6)
gggagaguccgcucagccagguugcagaagcggcuuagcguguguccuaaucuucucucugcguguagguaggccugugccgcaaacaagcuuaccauggaacuacucauauugaaagccaacgcaaucacaacaauacuaaccgccguaacauuuugcuucgcgucaggccaaaauauaacagaagaauuuuaccaaucaacaugcuccgccguaucaaaaggauaccuaggugcauuacgaaccgguugguacacaucaguaaucacaauagaacuuuccaacauuaaagaaauaaaaugcaauggcacagacgcaaaagucaaacuaauaaaacaagaacuagacaaauauaaaaacgccgucacagacuuacaacuauuaaugcaaagcacaccagcaacaggauccggaucagcaauagcaucaggaguagccgucuguaaaguacuacaccuagaaggcgaaguuaauaaaauuaaaucagcuuuauuaucaaccaacaaagcaguaguaucacuauccggaugcggagucuccguccuaacauucaaaguacuagaccucaagaauuacauagauaaacaacuacuaccaauacucaacaaacaaucauguucaauaccaaacaucgaaaccgucauagaauuucaacaaaaaaauaauagacucuuagaaauaacacgagaauuuagcguaaacgcaggagucacaaccccugucucaacauacaugcuaaccaauuccgaauuauuaucacucauaaaugacaugccaauaacuaaugaccaaaaaaaacuuaugucaaacaacguacaaauaguaagacaacaaucauauucaauaaugugcauaaucaaagaagaaguuuuagcauauguaguacaacuaccacuauauggcgucauagacacaccaugcuggaaauuacacacaucaccucuaugcacaacaaacacaaaagaaggaagcaacauuugccuaaccagaaccgauagaggaugguacugcgauaacgcaggcucaguaucauucuucccucaagccgaaacuugcaaaguccaaucaaauagagucuucugcgauacaaugaacuccuuaacuuuaccaucagaaguaaaucuaugcaacguagauaucuuuaauccaaaauacgauugcaaaaucaugacaucaaaaacagauguaucaucuaguguaauuaccucccuaggagcaauaguaagcugcuacggaaaaacaaaaugcaccgccucuaacaaaugucguggaauaauaaaaacauucucaaacggaugcgauuauguaucaaauaaaggugucgacaccguaucaguaggcaauacacuauacuauguaaauaaacaagaaggacaaucacucuacgucaaaggugaaccaauaauaaacuucuacgacccacuuguauucccaagcgacgaauuugacgcaucaauaagccaaguaaacgaaaaaauaaaccaaucacuagcauucaucagaaaaucagacgaacuacuccacaauguaaaugcaggaaaaucaacaaccaauaucaugauaacaaccauaauaauagucauaauaguaauacuauuaucccucauagccguuggacuacuccuauauuguaaagcacgauaaggacuagucccuguucccagagcccacuuuuuuuucuuuuuuugaaauaaaauagccugucuuucagaucuaaaaaaaaaaaaaaaaaaaaaaaaaaaaaaaaaaaaaaaaaaaaaaaaaaaaaaaaaaaaaaaaugcaucccccccccccccccccccccccccccccccaaaggcucuuuucagagccaccagaauu

SEQ ID NO: 7933 - RNA, 1843 nt, Artificial Sequence
  mRNA product Design a-2 comprising derived and/or modified sequence from HRSV(A2)__F-del_DSCav1_mut8 (opt11)
gggagaguccgcucagccagguugcagaagcggcuuagcguguguccuaaucuucucucugcguguagguaggccugugccgcaaacaagcuuaccauggaacuccucauccucaaagccaacgccaucaccaccauacucaccgcaguaaccuucugcuucgcauccggccaaaacaucacagaagaguucuaccagaguaccugcuccgccgucuccaaaggcuaccuuggcgcccuccguaccgggugguacacauccgucaucacaaucgaacucuccaacaucaaagaaauaaagugcaacggcacagacgccaaaguaaaacugauaaagcaagaacucgacaaauacaaaaacgccguaaccgaccuccagcuacuaaugcaauccacucccgccaccggcagcggauccgccaucgccuccggaguagccgucuguaaagucuuacaccucgaaggcgaagugaacaaaaucaaauccgcccuacucucaaccaacaaagccguaguaucacucuccgggugcggcguuucagugcuaacguucaaaguccuugaccucaaaaacuacaucgacaaacaacuccuccccauccuaaauaaacaauccugcuccauacccaacaucgagacugucaucgaguuccagcagaaaaacaaccgacuccucgaaaucacacgcgaguucucugucaacgccggcgucacaacccccgucuccacauacaugcucaccaacagcgaacuccucucccuaaucaaugacaugcccaucaccaacgaccaaaagaaacucaugucaaacaacguccaaaucguccgccaacaauccuacagcaucaugugcaucaucaaagaagaaguucucgcauacguaguacaacucccccucuacggagugaucgacacccccugcuggaaacuacacaccagcccgcuuugcaccacaaacaccaaggaaggcuccaacaucugccucacucgaaccgaccgcggcugguacugcgacaacgcaggcuccgucaguuucuuuccccaagcagaaacaugcaaaguccaauccaaccgaguauucugcgacaccaugaacucccucacccuaccauccgaaguuaaccuaugcaacguggacaucuucaaccccaaguacgacugcaaaauuaugaccuccaaaaccgacguauccuccagcgucaucaccagccucggagcaauagucuccugcuacggcaagaccaagugcaccgcuuccaacaagugucgcggaaucaucaaaaccuucucaaacggcugcgacuacgucuccaacaaaggcgucgacaccguauccguaggaaacacccuauacuacgucaacaaacaagaaggacaaucccucuaugucaaaggcgaacccaucaucaauuucuacgacccccuagucuucccuuccgacgaguucgacgcguccaucagccaagucaaugaaaagaucaaccagagccuggcauucauccgcaaauccgacgaacuccuccacaacgucaacgcgggaaaauccacgacaaacaucaugaucaccaccaucaucaucgucaucauagucauucuccuuucucucaucgccgugggacuacuucucuacugcaaagcccgauaaggacuagucccuguucccagagcccacuuuuuuuucuuuuuuugaaauaaaauagccugucuuucagaucuaaaaaaaaaaaaaaaaaaaaaaaaaaaaaaaaaaaaaaaaaaaaaaaaaaaaaaaaaaaaaaaaugcaucccccccccccccccccccccccccccccccaaaggcucuuuucagagccaccagaauu

SEQ ID NO: 7934 - RNA, 1921 nt, Artificial Sequence
  mRNA product Design a-3 comprising derived and/or modified sequence from HRSV(A2)__F-del_DSCav1_mut8 (opt1)
gggagagggcgcuuggcuugcaaggacccugagcugcggcauugaagcacacccaacccaacucgacugaagucagccucacugaaccggaucugagaaucuucucucucugggcuugccagggcucuccgaaccuagcuagcauccucuucaauuccaacuagaaagcuuaccauggagcugcucauccugaaggccaacgccaucaccaccauccugacggcggugaccuucugcuucgccagcggccagaacaucaccgaggaguucuaccaguccacgugcagcgccgucuccaagggguaccucggcgcccugcggaccggcugguacaccuccgugaucaccaucgagcugagcaacaucaaggagaucaagugcaacgggaccgacgccaaggugaagcucaucaagcaggagcuggacaaguacaagaacgcggucacggaccugcagcuccugaugcaguccaccccggcaaccggcuccggcuccgccaucgcgagcggcgucgccgugugcaaggugcugcaccucgagggggaggucaacaagaucaagagcgcccugcuguccaccaacaaggccguggugagccucuccggcugcggcgucagcgugcugaccuucaaggugcuggaccucaagaacuacaucgacaagcagcugcugcccauccugaacaagcagagcugcuccauccccaacaucgagacggugaucgaguuccagcagaagaacaaccggcuccuggagaucacccgcgaguucagcgugaacgccggggucaccacccccguguccacguacaugcugaccaacagcgagcuccugucccugaucaacgacaugccgaucaccaacgaccagaagaagcucaugagcaacaacgugcagaucguccggcagcaguccuacagcaucaugugcaucaucaaggaggaggugcuggcguacgugguccagcugccccucuacggcgugaucgacacccccugcuggaagcugcacacgagcccccugugcaccaccaacaccaaggagggguccaacaucugccucacgcgcaccgaccggggcugguacugcgacaacgccggcagcgucuccuucuucccgcaggccgagaccugcaaggugcagagcaaccgcguguucugcgacaccaugaacucccugacgcugcccagcgagguaaaccucugcaacgucgacaucuucaaccccaaguacgacugcaagaucaugaccuccaagaccgacgugagcuccagcgugaucaccucccugggggccaucgucagcugcuacggcaagacgaagugcaccgccagcaacaagugccgggggaucaucaagaccuucuccaacggcugcgacuacgugagcaacaagggcguggacaccguguccgucgggaacacccuguacuacgugaacaagcaggagggccagagccucuacgugaagggggagcccaucaucaacuucuacgacccgcuggucuuccccuccgacgaguucgacgcgagcaucucccaggugaacgagaagaucaaccagagccuggccuucauccgcaaguccgacgagcugcuccacaacgugaacgccggcaagagcacgaccaacaucaugaucaccaccaucaucaucgucaucaucgugauccugcugucccucaucgccguggggcugcugcucuacugcaaggcccggugaggacuagucccuguucccagagcccacuuuuuuuucuuuuuuugaaauaaaauagccugucuuucagaucuaaaaaaaaaaaaaaaaaaaaaaaaaaaaaaaaaaaaaaaaaaaaaaaaaaaaaaaaaaaaaaaaugcaucccccccccccccccccccccccccccccccaaaggcucuuuucagagccaccagaauu

SEQ ID NO: 7935 - RNA, 1921 nt, Artificial Sequence
  mRNA product Design a-3 comprising derived and/or modified sequence from HRSV(A2)__F-del_DSCav1_mut8 (opt1)
gggagagggcgcuuggcuugcaaggacccugagcugcggcauugaagcacacccaacccaacucgacugaagucagccucacugaaccggaucugagaaucuucucucucugggcuugccagggcucuccgaaccuagcuagcauccucuucaauuccaacuagaaagcuuaccauggagcugcucauccugaaggccaacgccaucaccaccauccugacggcggugaccuucugcuucgccagcggccagaacaucaccgaggaguucuaccaguccacgugcagcgccgucuccaagggguaccucggcgcccugcgcaccgggugguacaccagcgugaucaccaucgagcuguccaacaucaaggagaucaagugcaacggcaccgacgccaaggugaagcucaucaagcaggagcuggacaaguacaagaacgcggucacggaccugcagcuccugaugcagagcacccccgccaccggguccggcagcgccaucgccuccggcguggcggugugcaagguccugcaccucgagggggaggugaacaagaucaagagcgcccugcuguccaccaacaaggccguggucagccucuccggcugcggggugagcgugcugacguucaagguccuggaccucaagaacuacaucgacaagcagcugcugccgauccucaacaagcaguccugcagcauccccaacaucgagaccgugaucgaguuccagcagaagaacaaccggcugcuggagaucacccgcgaguucuccgugaacgccggcgucaccacgcccgugagcaccuacaugcucaccaacuccgagcugcugagccucaucaacgacaugcccaucaccaacgaccagaagaagcugaugagcaacaacgugcagaucguccggcagcaguccuacagcaucaugugcaucaucaaggaggaggugcuggccuacgugguccagcucccgcuguacggggugaucgacacgcccugcuggaagcugcacaccagcccccucugcaccaccaacacgaaggagggcuccaacaucugccugacccgcaccgaccggggcugguacugcgacaacgcgggguccgugagcuucuucccccaggccgagaccugcaagguccaguccaaccgcguguucugcgacacgaugaacagccugacccucccguccgaggucaaccugugcaacguggacaucuucaaccccaaguacgacugcaagaucaugaccagcaagaccgacguguccagcuccgucaucacgagccugggcgccaucguguccugcuacgggaagaccaagugcaccgccagcaacaagugccggggcaucaucaagaccuucuccaacggcugcgacuacgugagcaacaagggggucgacacgguguccgugggcaacacccucuacuacgucaacaagcaggaggggcagagccuguacgugaagggcgagcccaucaucaacuucuacgacccccugguguucccgagcgacgaguucgacgccuccaucagccaggucaacgagaagaucaaccagucccucgcguucauccgcaagagcgacgagcugcugcacaacgugaacgccgggaaguccaccaccaacaucaugaucaccacgaucaucaucgugaucaucgucauccuccugagccugaucgccgugggccuccugcuguacugcaaggcccggugaggacuagucccuguucccagagcccacuuuuuuuucuuuuuuugaaauaaaauagccugucuuucagaucuaaaaaaaaaaaaaaaaaaaaaaaaaaaaaaaaaaaaaaaaaaaaaaaaaaaaaaaaaaaaaaaaugcaucccccccccccccccccccccccccccccccaaaggcucuuuucagagccaccagaauu

SEQ ID NO: 7936 - RNA, 1921 nt, Artificial Sequence
  mRNA product Design a-3 comprising derived and/or modified sequence from HRSV(A2)__F-del_DSCav1_mut8 (opt2)
gggagagggcgcuuggcuugcaaggacccugagcugcggcauugaagcacacccaacccaacucgacugaagucagccucacugaaccggaucugagaaucuucucucucugggcuugccagggcucuccgaaccuagcuagcauccucuucaauuccaacuagaaagcuuaccauggagcuccucauccucaaggccaacgccaucaccaccauccucaccgccgucaccuucugcuucgccuccggccagaacaucaccgaggaguucuaccaguccaccugcuccgccgucuccaagggcuaccucggcgcccuccgcaccggcugguacaccuccgucaucaccaucgagcucuccaacaucaaggagaucaagugcaacggcaccgacgccaaggucaagcucaucaagcaggagcucgacaaguacaagaacgccgucaccgaccuccagcuccucaugcaguccacccccgccaccggcuccggcuccgccaucgccuccggcgucgccgucugcaagguccuccaccucgagggcgaggucaacaagaucaaguccgcccuccucuccaccaacaaggccgucgucucccucuccggcugcggcgucuccguccucaccuucaagguccucgaccucaagaacuacaucgacaagcagcuccuccccauccucaacaagcaguccugcuccauccccaacaucgagaccgucaucgaguuccagcagaagaacaaccgccuccucgagaucacccgcgaguucuccgucaacgccggcgucaccacccccgucuccaccuacaugcucaccaacuccgagcuccucucccucaucaacgacaugcccaucaccaacgaccagaagaagcucauguccaacaacguccagaucguccgccagcaguccuacuccaucaugugcaucaucaaggaggagguccucgccuacgucguccagcucccccucuacggcgucaucgacacccccugcuggaagcuccacaccuccccccucugcaccaccaacaccaaggagggcuccaacaucugccucacccgcaccgaccgcggcugguacugcgacaacgccggcuccgucuccuucuucccccaggccgagaccugcaagguccaguccaaccgcgucuucugcgacaccaugaacucccucacccuccccuccgaggucaaccucugcaacgucgacaucuucaaccccaaguacgacugcaagaucaugaccuccaagaccgacgucuccuccuccgucaucaccucccucggcgccaucgucuccugcuacggcaagaccaagugcaccgccuccaacaagugccgcggcaucaucaagaccuucuccaacggcugcgacuacgucuccaacaagggcgucgacaccgucuccgucggcaacacccucuacuacgucaacaagcaggagggccagucccucuacgucaagggcgagcccaucaucaacuucuacgacccccucgucuuccccuccgacgaguucgacgccuccaucucccaggucaacgagaagaucaaccagucccucgccuucauccgcaaguccgacgagcuccuccacaacgucaacgccggcaaguccaccaccaacaucaugaucaccaccaucaucaucgucaucaucgucauccuccucucccucaucgccgucggccuccuccucuacugcaaggcccgcugaggacuagucccuguucccagagcccacuuuuuuuucuuuuuuugaaauaaaauagccugucuuucagaucuaaaaaaaaaaaaaaaaaaaaaaaaaaaaaaaaaaaaaaaaaaaaaaaaaaaaaaaaaaaaaaaaugcaucccccccccccccccccccccccccccccccaaaggcucuuuucagagccaccagaauu

SEQ ID NO: 7937 - RNA, 1921 nt, Artificial Sequence
  mRNA product Design a-3 comprising derived and/or modified sequence from HRSV(A2)__F-del_DSCav1_mut8 (opt3)
gggagagggcgcuuggcuugcaaggacccugagcugcggcauugaagcacacccaacccaacucgacugaagucagccucacugaaccggaucugagaaucuucucucucugggcuugccagggcucuccgaaccuagcuagcauccucuucaauuccaacuagaaagcuuaccauggagcugcucauccuuaaggccaacgcuauuaccacaauacugacugcagugacguucugcuuugccagcggccagaauaucaccgaagaguucuaccaauccacauguucugcggucucaaaaggguauuugggagcuuuaagaacugguugguacaccaguguuauuacaaucgaacugagcaacauuaaggagaucaaaugcaauggcaccgacgccaaggugaaacuaauaaagcaggaacucgauaaguauaaaaacgcaguaacugaccugcagcuucugaugcaguccacacccgccaccgggucuggaucggcuaucgcaucaggcguggccgucuguaagguguugcaccucgagggugagguuaauaaaauuaagagcgcucugcugaguacgaacaaagccguggucucccucucugggugcggagugagcguauuaacuuuuaagguucuggaucuuaagaauuacaucgacaaacaauugcugccuauucuaaacaagcaguccuguucaaucccaaauauagaaaccgugauugaguuccagcagaaaaacaauaggcuccuggaaaucacacgggaguuuagugucaacgcgggcgugacuaccccggugagcacauauaugcuuaccaauucugagcuguugucccucauuaacgauaugcccaucacgaaugaccaaaagaaacugaugucaaacaacguccagaucguucgccagcagagcuacaguauuaugugcauaaucaaggaagagguguuagcauauguagugcaacugccucucuacggcgucauugauacuccauguuggaaacuucauacaucuccccugugcaccacuaauacaaaggaaggguccaacaucuguuugacccgaacggaccguggaugguacugcgauaaugccgguagcgugucguucuuuccucaggcugagaccuguaagguucagucuaacagaguguucugcgacacaaugaacucccuaacucugccaucagaagucaaucucugcaauguggauauauuuaaccccaaauaugacuguaagauuaugaccaguaaaacagauguaagcuccucuguuaucacuagccugggcgccaucgugucaugcuacgggaagaccaaauguacagcaaguaauaagugcaggggaauuaucaagaccuucuccaacggcugugacuaugucagcaauaaagguguggacacugucucuguggggaacacgcuuuacuauguuaauaagcaagagggacagucacuguacgugaaaggcgagccuauuauaaacuuuuaugauccauugguauucccgagugacgaauuugaugcuagcaucucccaggucaaugagaagauuaaccagucucucgccuucauccggaaaucggacgaacuguuacacaacgugaaugcgggcaagagcacaaccaacaucaugauuacuaccauaaucauuguuaucauugugauccugcuaucccucauagccgucgggcugcuuuuguacugcaaggcacgcugaggacuagucccuguucccagagcccacuuuuuuuucuuuuuuugaaauaaaauagccugucuuucagaucuaaaaaaaaaaaaaaaaaaaaaaaaaaaaaaaaaaaaaaaaaaaaaaaaaaaaaaaaaaaaaaaaugcaucccccccccccccccccccccccccccccccaaaggcucuuuucagagccaccagaauu

SEQ ID NO: 7938 - RNA, 1921 nt, Artificial Sequence
  mRNA product Design a-3 comprising derived and/or modified sequence from HRSV(A2)__F-del_DSCav1_mut8 (opt4)
gggagagggcgcuuggcuugcaaggacccugagcugcggcauugaagcacacccaacccaacucgacugaagucagccucacugaaccggaucugagaaucuucucucucugggcuugccagggcucuccgaaccuagcuagcauccucuucaauuccaacuagaaagcuuaccauggagcugcugauccugaaggccaacgccaucaccaccauccugaccgccgugaccuucugcuucgccagcggccagaacaucaccgaggaguucuaccagagcaccugcagcgccgugagcaagggcuaccugggcgcccugagaaccggcugguacaccagcgugaucaccaucgagcugagcaacaucaaggagaucaagugcaacggcaccgacgccaaggugaagcugaucaagcaggagcuggacaaguacaagaacgccgugaccgaccugcagcugcugaugcagagcacccccgccaccggcagcggcagcgccaucgccagcggcguggccgugugcaaggugcugcaccuggagggcgaggugaacaagaucaagagcgcccugcugagcaccaacaaggccguggugagccugagcggcugcggcgugagcgugcugaccuucaaggugcuggaccugaagaacuacaucgacaagcagcugcugcccauccugaacaagcagagcugcagcauccccaacaucgagaccgugaucgaguuccagcagaagaacaacagacugcuggagaucaccagagaguucagcgugaacgccggcgugaccacccccgugagcaccuacaugcugaccaacagcgagcugcugagccugaucaacgacaugcccaucaccaacgaccagaagaagcugaugagcaacaacgugcagaucgugagacagcagagcuacagcaucaugugcaucaucaaggaggaggugcuggccuacguggugcagcugccccuguacggcgugaucgacacccccugcuggaagcugcacaccagcccccugugcaccaccaacaccaaggagggcagcaacaucugccugaccagaaccgacagaggcugguacugcgacaacgccggcagcgugagcuucuucccccaggccgagaccugcaaggugcagagcaacagaguguucugcgacaccaugaacagccugacccugcccagcgaggugaaccugugcaacguggacaucuucaaccccaaguacgacugcaagaucaugaccagcaagaccgacgugagcagcagcgugaucaccagccugggcgccaucgugagcugcuacggcaagaccaagugcaccgccagcaacaagugcagaggcaucaucaagaccuucagcaacggcugcgacuacgugagcaacaagggcguggacaccgugagcgugggcaacacccuguacuacgugaacaagcaggagggccagagccuguacgugaagggcgagcccaucaucaacuucuacgacccccugguguuccccagcgacgaguucgacgccagcaucagccaggugaacgagaagaucaaccagagccuggccuucaucagaaagagcgacgagcugcugcacaacgugaacgccggcaagagcaccaccaacaucaugaucaccaccaucaucaucgugaucaucgugauccugcugagccugaucgccgugggccugcugcuguacugcaaggccagaugaggacuagucccuguucccagagcccacuuuuuuuucuuuuuuugaaauaaaauagccugucuuucagaucuaaaaaaaaaaaaaaaaaaaaaaaaaaaaaaaaaaaaaaaaaaaaaaaaaaaaaaaaaaaaaaaaugcaucccccccccccccccccccccccccccccccaaaggcucuuuucagagccaccagaauu

SEQ ID NO: 7939 - RNA, 1921 nt, Artificial Sequence
  mRNA product Design a-3 comprising derived and/or modified sequence from HRSV(A2)__F-del_DSCav1_mut8 (opt5)
gggagagggcgcuuggcuugcaaggacccugagcugcggcauugaagcacacccaacccaacucgacugaagucagccucacugaaccggaucugagaaucuucucucucugggcuugccagggcucuccgaaccuagcuagcauccucuucaauuccaacuagaaagcuuaccauggagcugcucauccugaaggccaacgcuauuaccacaauccuuacggccgugaccuucugcuuugcgagcggccagaauauuacagaagaguucuaccaauccaccuguucugcugucagcaaaggguaucugggagcccucagaacaggcugguacaccuccguuaucacaauugaacugucuaacaucaaggagaucaaaugcaaugggaccgacgccaaggugaaacuuauuaagcaggaacuggauaaguauaaaaacgcugugacggaccuccagcugcugaugcagagcacccccgccacaggauccggcucugcuaucgccagcggggucgcgguguguaagguucuccaccuggagggagaggugaauaaaauuaaguccgcccuucugagcaccaacaaagcugucgugucucucuccggcugcggcguuagcgugcugacauuuaagguccuugaucugaagaauuacaucgacaaacaacuccugccuauucugaacaagcagucuuguuccaucccgaauauugaaaccgugaucgaguuccagcagaaaaacaaucggcuccuggaaaucacgcgcgaguuuagcgugaacgccggggucacaacccccguuucuacauauaugcuuaccaauuccgagcugcucagccugauuaacgauaugccuaucaccaaugaccaaaagaaacuuauguccaacaacgugcagauugugagacagcagucuuacagcaucaugugcauuaucaaggaagagguccuggcuuaugugguucaacucccccuguacggagugaucgauacaccuuguuggaaacugcauacgagcccccucugcaccacaaauaccaaggaaggcagcaacauuugucugacacggaccgaccgcgggugguacugcgauaaugccggaucugucuccuucuuuccucaggcggagacguguaaggugcagagcaacagaguuuucugcgacacaaugaacucucuuacccugccgagcgaagugaaucucugcaaugucgauaucuuuaaccccaaauaugacuguaagauuaugaccuccaaaacagaugugucuagcuccgucaucaccagccugggcgccauugugucuugcuacgggaagacaaaauguacggcuuccaauaagugccggggaaucaucaagaccuucagcaacggcugugacuauguuucuaauaaaggcguggacacagucuccguggggaacacccuuuacuauguuaauaagcaagagggacagagccuguacgugaaaggcgagccuauuaucaacuuuuaugauccccucgucuucccuuccgacgaauuugaugccucuauuagccaggugaaugagaagaucaaccagucccuggcuuucauucgcaaaucugacgaacugcuccacaacgugaaugccgggaaguccacaaccaacaucaugauuacgaccaucaucauuguuaucauugucauccugcuuucccugauugccgugggacuccugcuguacugcaaggcuagaugaggacuagucccuguucccagagcccacuuuuuuuucuuuuuuugaaauaaaauagccugucuuucagaucuaaaaaaaaaaaaaaaaaaaaaaaaaaaaaaaaaaaaaaaaaaaaaaaaaaaaaaaaaaaaaaaaugcaucccccccccccccccccccccccccccccccaaaggcucuuuucagagccaccagaauu

SEQ ID NO: 7940 - RNA, 1921 nt, Artificial Sequence
  mRNA product Design a-3 comprising derived and/or modified sequence from HRSV(A2)__F-del_DSCav1_mut8 (opt6)
gggagagggcgcuuggcuugcaaggacccugagcugcggcauugaagcacacccaacccaacucgacugaagucagccucacugaaccggaucugagaaucuucucucucugggcuugccagggcucuccgaaccuagcuagcauccucuucaauuccaacuagaaagcuuaccauggaacuacucauauugaaagccaacgcaaucacaacaauacuaaccgccguaacauuuugcuucgcgucaggccaaaauauaacagaagaauuuuaccaaucaacaugcuccgccguaucaaaaggauaccuaggugcauuacgaaccgguugguacacaucaguaaucacaauagaacuuuccaacauuaaagaaauaaaaugcaauggcacagacgcaaaagucaaacuaauaaaacaagaacuagacaaauauaaaaacgccgucacagacuuacaacuauuaaugcaaagcacaccagcaacaggauccggaucagcaauagcaucaggaguagccgucuguaaaguacuacaccuagaaggcgaaguuaauaaaauuaaaucagcuuuauuaucaaccaacaaagcaguaguaucacuauccggaugcggagucuccguccuaacauucaaaguacuagaccucaagaauuacauagauaaacaacuacuaccaauacucaacaaacaaucauguucaauaccaaacaucgaaaccgucauagaauuucaacaaaaaaauaauagacucuuagaaauaacacgagaauuuagcguaaacgcaggagucacaaccccugucucaacauacaugcuaaccaauuccgaauuauuaucacucauaaaugacaugccaauaacuaaugaccaaaaaaaacuuaugucaaacaacguacaaauaguaagacaacaaucauauucaauaaugugcauaaucaaagaagaaguuuuagcauauguaguacaacuaccacuauauggcgucauagacacaccaugcuggaaauuacacacaucaccucuaugcacaacaaacacaaaagaaggaagcaacauuugccuaaccagaaccgauagaggaugguacugcgauaacgcaggcucaguaucauucuucccucaagccgaaacuugcaaaguccaaucaaauagagucuucugcgauacaaugaacuccuuaacuuuaccaucagaaguaaaucuaugcaacguagauaucuuuaauccaaaauacgauugcaaaaucaugacaucaaaaacagauguaucaucuaguguaauuaccucccuaggagcaauaguaagcugcuacggaaaaacaaaaugcaccgccucuaacaaaugucguggaauaauaaaaacauucucaaacggaugcgauuauguaucaaauaaaggugucgacaccguaucaguaggcaauacacuauacuauguaaauaaacaagaaggacaaucacucuacgucaaaggugaaccaauaauaaacuucuacgacccacuuguauucccaagcgacgaauuugacgcaucaauaagccaaguaaacgaaaaaauaaaccaaucacuagcauucaucagaaaaucagacgaacuacuccacaauguaaaugcaggaaaaucaacaaccaauaucaugauaacaaccauaauaauagucauaauaguaauacuauuaucccucauagccguuggacuacuccuauauuguaaagcacgauaaggacuagucccuguucccagagcccacuuuuuuuucuuuuuuugaaauaaaauagccugucuuucagaucuaaaaaaaaaaaaaaaaaaaaaaaaaaaaaaaaaaaaaaaaaaaaaaaaaaaaaaaaaaaaaaaaugcaucccccccccccccccccccccccccccccccaaaggcucuuuucagagccaccagaauu

SEQ ID NO: 7941 - RNA, 1921 nt, Artificial Sequence
  mRNA product Design a-3 comprising derived and/or modified sequence from HRSV(A2)__F-del_DSCav1_mut8 (opt11)
gggagagggcgcuuggcuugcaaggacccugagcugcggcauugaagcacacccaacccaacucgacugaagucagccucacugaaccggaucugagaaucuucucucucugggcuugccagggcucuccgaaccuagcuagcauccucuucaauuccaacuagaaagcuuaccauggaacuccucauccucaaagccaacgccaucaccaccauacucaccgcaguaaccuucugcuucgcauccggccaaaacaucacagaagaguucuaccagaguaccugcuccgccgucuccaaaggcuaccuuggcgcccuccguaccgggugguacacauccgucaucacaaucgaacucuccaacaucaaagaaauaaagugcaacggcacagacgccaaaguaaaacugauaaagcaagaacucgacaaauacaaaaacgccguaaccgaccuccagcuacuaaugcaauccacucccgccaccggcagcggauccgccaucgccuccggaguagccgucuguaaagucuuacaccucgaaggcgaagugaacaaaaucaaauccgcccuacucucaaccaacaaagccguaguaucacucuccgggugcggcguuucagugcuaacguucaaaguccuugaccucaaaaacuacaucgacaaacaacuccuccccauccuaaauaaacaauccugcuccauacccaacaucgagacugucaucgaguuccagcagaaaaacaaccgacuccucgaaaucacacgcgaguucucugucaacgccggcgucacaacccccgucuccacauacaugcucaccaacagcgaacuccucucccuaaucaaugacaugcccaucaccaacgaccaaaagaaacucaugucaaacaacguccaaaucguccgccaacaauccuacagcaucaugugcaucaucaaagaagaaguucucgcauacguaguacaacucccccucuacggagugaucgacacccccugcuggaaacuacacaccagcccgcuuugcaccacaaacaccaaggaaggcuccaacaucugccucacucgaaccgaccgcggcugguacugcgacaacgcaggcuccgucaguuucuuuccccaagcagaaacaugcaaaguccaauccaaccgaguauucugcgacaccaugaacucccucacccuaccauccgaaguuaaccuaugcaacguggacaucuucaaccccaaguacgacugcaaaauuaugaccuccaaaaccgacguauccuccagcgucaucaccagccucggagcaauagucuccugcuacggcaagaccaagugcaccgcuuccaacaagugucgcggaaucaucaaaaccuucucaaacggcugcgacuacgucuccaacaaaggcgucgacaccguauccguaggaaacacccuauacuacgucaacaaacaagaaggacaaucccucuaugucaaaggcgaacccaucaucaauuucuacgacccccuagucuucccuuccgacgaguucgacgcguccaucagccaagucaaugaaaagaucaaccagagccuggcauucauccgcaaauccgacgaacuccuccacaacgucaacgcgggaaaauccacgacaaacaucaugaucaccaccaucaucaucgucaucauagucauucuccuuucucucaucgccgugggacuacuucucuacugcaaagcccgauaaggacuagucccuguucccagagcccacuuuuuuuucuuuuuuugaaauaaaauagccugucuuucagaucuaaaaaaaaaaaaaaaaaaaaaaaaaaaaaaaaaaaaaaaaaaaaaaaaaaaaaaaaaaaaaaaaugcaucccccccccccccccccccccccccccccccaaaggcucuuuucagagccaccagaauu

SEQ ID NO: 7942 - RNA, 1870 nt, Artificial Sequence
  mRNA product Design a-4 comprising derived and/or modified sequence from HRSV(A2)__F-del_DSCav1_mut8 (opt1)
gggagacuccugucgggcggaaguaggaggaguagaguuuaaaaacaguacucuuuuuccgguucgggacguaguugaagcaacgacaagccggauaaccgcucuugagacaggaagcuuaccauggagcugcucauccugaaggccaacgccaucaccaccauccugacggcggugaccuucugcuucgccagcggccagaacaucaccgaggaguucuaccaguccacgugcagcgccgucuccaagggguaccucggcgcccugcggaccggcugguacaccuccgugaucaccaucgagcugagcaacaucaaggagaucaagugcaacgggaccgacgccaaggugaagcucaucaagcaggagcuggacaaguacaagaacgcggucacggaccugcagcuccugaugcaguccaccccggcaaccggcuccggcuccgccaucgcgagcggcgucgccgugugcaaggugcugcaccucgagggggaggucaacaagaucaagagcgcccugcuguccaccaacaaggccguggugagccucuccggcugcggcgucagcgugcugaccuucaaggugcuggaccucaagaacuacaucgacaagcagcugcugcccauccugaacaagcagagcugcuccauccccaacaucgagacggugaucgaguuccagcagaagaacaaccggcuccuggagaucacccgcgaguucagcgugaacgccggggucaccacccccguguccacguacaugcugaccaacagcgagcuccugucccugaucaacgacaugccgaucaccaacgaccagaagaagcucaugagcaacaacgugcagaucguccggcagcaguccuacagcaucaugugcaucaucaaggaggaggugcuggcguacgugguccagcugccccucuacggcgugaucgacacccccugcuggaagcugcacacgagcccccugugcaccaccaacaccaaggagggguccaacaucugccucacgcgcaccgaccggggcugguacugcgacaacgccggcagcgucuccuucuucccgcaggccgagaccugcaaggugcagagcaaccgcguguucugcgacaccaugaacucccugacgcugcccagcgagguaaaccucugcaacgucgacaucuucaaccccaaguacgacugcaagaucaugaccuccaagaccgacgugagcuccagcgugaucaccucccugggggccaucgucagcugcuacggcaagacgaagugcaccgccagcaacaagugccgggggaucaucaagaccuucuccaacggcugcgacuacgugagcaacaagggcguggacaccguguccgucgggaacacccuguacuacgugaacaagcaggagggccagagccucuacgugaagggggagcccaucaucaacuucuacgacccgcuggucuuccccuccgacgaguucgacgcgagcaucucccaggugaacgagaagaucaaccagagccuggccuucauccgcaaguccgacgagcugcuccacaacgugaacgccggcaagagcacgaccaacaucaugaucaccaccaucaucaucgucaucaucgugauccugcugucccucaucgccguggggcugcugcucuacugcaaggcccggugaggacuagucccuguucccagagcccacuuuuuuuucuuuuuuugaaauaaaauagccugucuuucagaucuaaaaaaaaaaaaaaaaaaaaaaaaaaaaaaaaaaaaaaaaaaaaaaaaaaaaaaaaaaaaaaaaugcaucccccccccccccccccccccccccccccccaaaggcucuuuucagagccaccagaauu

SEQ ID NO: 7943 - RNA, 1870 nt, Artificial Sequence
  mRNA product Design a-4 comprising derived and/or modified sequence from HRSV(A2)__F-del_DSCav1_mut8 (opt1)
gggagacuccugucgggcggaaguaggaggaguagaguuuaaaaacaguacucuuuuuccgguucgggacguaguugaagcaacgacaagccggauaaccgcucuugagacaggaagcuuaccauggagcugcucauccugaaggccaacgccaucaccaccauccugacggcggugaccuucugcuucgccagcggccagaacaucaccgaggaguucuaccaguccacgugcagcgccgucuccaagggguaccucggcgcccugcgcaccgggugguacaccagcgugaucaccaucgagcuguccaacaucaaggagaucaagugcaacggcaccgacgccaaggugaagcucaucaagcaggagcuggacaaguacaagaacgcggucacggaccugcagcuccugaugcagagcacccccgccaccggguccggcagcgccaucgccuccggcguggcggugugcaagguccugcaccucgagggggaggugaacaagaucaagagcgcccugcuguccaccaacaaggccguggucagccucuccggcugcggggugagcgugcugacguucaagguccuggaccucaagaacuacaucgacaagcagcugcugccgauccucaacaagcaguccugcagcauccccaacaucgagaccgugaucgaguuccagcagaagaacaaccggcugcuggagaucacccgcgaguucuccgugaacgccggcgucaccacgcccgugagcaccuacaugcucaccaacuccgagcugcugagccucaucaacgacaugcccaucaccaacgaccagaagaagcugaugagcaacaacgugcagaucguccggcagcaguccuacagcaucaugugcaucaucaaggaggaggugcuggccuacgugguccagcucccgcuguacggggugaucgacacgcccugcuggaagcugcacaccagcccccucugcaccaccaacacgaaggagggcuccaacaucugccugacccgcaccgaccggggcugguacugcgacaacgcgggguccgugagcuucuucccccaggccgagaccugcaagguccaguccaaccgcguguucugcgacacgaugaacagccugacccucccguccgaggucaaccugugcaacguggacaucuucaaccccaaguacgacugcaagaucaugaccagcaagaccgacguguccagcuccgucaucacgagccugggcgccaucguguccugcuacgggaagaccaagugcaccgccagcaacaagugccggggcaucaucaagaccuucuccaacggcugcgacuacgugagcaacaagggggucgacacgguguccgugggcaacacccucuacuacgucaacaagcaggaggggcagagccuguacgugaagggcgagcccaucaucaacuucuacgacccccugguguucccgagcgacgaguucgacgccuccaucagccaggucaacgagaagaucaaccagucccucgcguucauccgcaagagcgacgagcugcugcacaacgugaacgccgggaaguccaccaccaacaucaugaucaccacgaucaucaucgugaucaucgucauccuccugagccugaucgccgugggccuccugcuguacugcaaggcccggugaggacuagucccuguucccagagcccacuuuuuuuucuuuuuuugaaauaaaauagccugucuuucagaucuaaaaaaaaaaaaaaaaaaaaaaaaaaaaaaaaaaaaaaaaaaaaaaaaaaaaaaaaaaaaaaaaugcaucccccccccccccccccccccccccccccccaaaggcucuuuucagagccaccagaauu

SEQ ID NO: 7944 - RNA, 1870 nt, Artificial Sequence
  mRNA product Design a-4 comprising derived and/or modified sequence from HRSV(A2)__F-del_DSCav1_mut8 (opt2)
gggagacuccugucgggcggaaguaggaggaguagaguuuaaaaacaguacucuuuuuccgguucgggacguaguugaagcaacgacaagccggauaaccgcucuugagacaggaagcuuaccauggagcuccucauccucaaggccaacgccaucaccaccauccucaccgccgucaccuucugcuucgccuccggccagaacaucaccgaggaguucuaccaguccaccugcuccgccgucuccaagggcuaccucggcgcccuccgcaccggcugguacaccuccgucaucaccaucgagcucuccaacaucaaggagaucaagugcaacggcaccgacgccaaggucaagcucaucaagcaggagcucgacaaguacaagaacgccgucaccgaccuccagcuccucaugcaguccacccccgccaccggcuccggcuccgccaucgccuccggcgucgccgucugcaagguccuccaccucgagggcgaggucaacaagaucaaguccgcccuccucuccaccaacaaggccgucgucucccucuccggcugcggcgucuccguccucaccuucaagguccucgaccucaagaacuacaucgacaagcagcuccuccccauccucaacaagcaguccugcuccauccccaacaucgagaccgucaucgaguuccagcagaagaacaaccgccuccucgagaucacccgcgaguucuccgucaacgccggcgucaccacccccgucuccaccuacaugcucaccaacuccgagcuccucucccucaucaacgacaugcccaucaccaacgaccagaagaagcucauguccaacaacguccagaucguccgccagcaguccuacuccaucaugugcaucaucaaggaggagguccucgccuacgucguccagcucccccucuacggcgucaucgacacccccugcuggaagcuccacaccuccccccucugcaccaccaacaccaaggagggcuccaacaucugccucacccgcaccgaccgcggcugguacugcgacaacgccggcuccgucuccuucuucccccaggccgagaccugcaagguccaguccaaccgcgucuucugcgacaccaugaacucccucacccuccccuccgaggucaaccucugcaacgucgacaucuucaaccccaaguacgacugcaagaucaugaccuccaagaccgacgucuccuccuccgucaucaccucccucggcgccaucgucuccugcuacggcaagaccaagugcaccgccuccaacaagugccgcggcaucaucaagaccuucuccaacggcugcgacuacgucuccaacaagggcgucgacaccgucuccgucggcaacacccucuacuacgucaacaagcaggagggccagucccucuacgucaagggcgagcccaucaucaacuucuacgacccccucgucuuccccuccgacgaguucgacgccuccaucucccaggucaacgagaagaucaaccagucccucgccuucauccgcaaguccgacgagcuccuccacaacgucaacgccggcaaguccaccaccaacaucaugaucaccaccaucaucaucgucaucaucgucauccuccucucccucaucgccgucggccuccuccucuacugcaaggcccgcugaggacuagucccuguucccagagcccacuuuuuuuucuuuuuuugaaauaaaauagccugucuuucagaucuaaaaaaaaaaaaaaaaaaaaaaaaaaaaaaaaaaaaaaaaaaaaaaaaaaaaaaaaaaaaaaaaugcaucccccccccccccccccccccccccccccccaaaggcucuuuucagagccaccagaauu

SEQ ID NO: 7945 - RNA, 1870 nt, Artificial Sequence
  mRNA product Design a-4 comprising derived and/or modified sequence from HRSV(A2)__F-del_DSCav1_mut8 (opt3)
gggagacuccugucgggcggaaguaggaggaguagaguuuaaaaacaguacucuuuuuccgguucgggacguaguugaagcaacgacaagccggauaaccgcucuugagacaggaagcuuaccauggagcugcucauccuuaaggccaacgcuauuaccacaauacugacugcagugacguucugcuuugccagcggccagaauaucaccgaagaguucuaccaauccacauguucugcggucucaaaaggguauuugggagcuuuaagaacugguugguacaccaguguuauuacaaucgaacugagcaacauuaaggagaucaaaugcaauggcaccgacgccaaggugaaacuaauaaagcaggaacucgauaaguauaaaaacgcaguaacugaccugcagcuucugaugcaguccacacccgccaccgggucuggaucggcuaucgcaucaggcguggccgucuguaagguguugcaccucgagggugagguuaauaaaauuaagagcgcucugcugaguacgaacaaagccguggucucccucucugggugcggagugagcguauuaacuuuuaagguucuggaucuuaagaauuacaucgacaaacaauugcugccuauucuaaacaagcaguccuguucaaucccaaauauagaaaccgugauugaguuccagcagaaaaacaauaggcuccuggaaaucacacgggaguuuagugucaacgcgggcgugacuaccccggugagcacauauaugcuuaccaauucugagcuguugucccucauuaacgauaugcccaucacgaaugaccaaaagaaacugaugucaaacaacguccagaucguucgccagcagagcuacaguauuaugugcauaaucaaggaagagguguuagcauauguagugcaacugccucucuacggcgucauugauacuccauguuggaaacuucauacaucuccccugugcaccacuaauacaaaggaaggguccaacaucuguuugacccgaacggaccguggaugguacugcgauaaugccgguagcgugucguucuuuccucaggcugagaccuguaagguucagucuaacagaguguucugcgacacaaugaacucccuaacucugccaucagaagucaaucucugcaauguggauauauuuaaccccaaauaugacuguaagauuaugaccaguaaaacagauguaagcuccucuguuaucacuagccugggcgccaucgugucaugcuacgggaagaccaaauguacagcaaguaauaagugcaggggaauuaucaagaccuucuccaacggcugugacuaugucagcaauaaagguguggacacugucucuguggggaacacgcuuuacuauguuaauaagcaagagggacagucacuguacgugaaaggcgagccuauuauaaacuuuuaugauccauugguauucccgagugacgaauuugaugcuagcaucucccaggucaaugagaagauuaaccagucucucgccuucauccggaaaucggacgaacuguuacacaacgugaaugcgggcaagagcacaaccaacaucaugauuacuaccauaaucauuguuaucauugugauccugcuaucccucauagccgucgggcugcuuuuguacugcaaggcacgcugaggacuagucccuguucccagagcccacuuuuuuuucuuuuuuugaaauaaaauagccugucuuucagaucuaaaaaaaaaaaaaaaaaaaaaaaaaaaaaaaaaaaaaaaaaaaaaaaaaaaaaaaaaaaaaaaaugcaucccccccccccccccccccccccccccccccaaaggcucuuuucagagccaccagaauu

SEQ ID NO: 7946 - RNA, 1870 nt, Artificial Sequence
  mRNA product Design a-4 comprising derived and/or modified sequence from HRSV(A2)__F-del_DSCav1_mut8 (opt4)
gggagacuccugucgggcggaaguaggaggaguagaguuuaaaaacaguacucuuuuuccgguucgggacguaguugaagcaacgacaagccggauaaccgcucuugagacaggaagcuuaccauggagcugcugauccugaaggccaacgccaucaccaccauccugaccgccgugaccuucugcuucgccagcggccagaacaucaccgaggaguucuaccagagcaccugcagcgccgugagcaagggcuaccugggcgcccugagaaccggcugguacaccagcgugaucaccaucgagcugagcaacaucaaggagaucaagugcaacggcaccgacgccaaggugaagcugaucaagcaggagcuggacaaguacaagaacgccgugaccgaccugcagcugcugaugcagagcacccccgccaccggcagcggcagcgccaucgccagcggcguggccgugugcaaggugcugcaccuggagggcgaggugaacaagaucaagagcgcccugcugagcaccaacaaggccguggugagccugagcggcugcggcgugagcgugcugaccuucaaggugcuggaccugaagaacuacaucgacaagcagcugcugcccauccugaacaagcagagcugcagcauccccaacaucgagaccgugaucgaguuccagcagaagaacaacagacugcuggagaucaccagagaguucagcgugaacgccggcgugaccacccccgugagcaccuacaugcugaccaacagcgagcugcugagccugaucaacgacaugcccaucaccaacgaccagaagaagcugaugagcaacaacgugcagaucgugagacagcagagcuacagcaucaugugcaucaucaaggaggaggugcuggccuacguggugcagcugccccuguacggcgugaucgacacccccugcuggaagcugcacaccagcccccugugcaccaccaacaccaaggagggcagcaacaucugccugaccagaaccgacagaggcugguacugcgacaacgccggcagcgugagcuucuucccccaggccgagaccugcaaggugcagagcaacagaguguucugcgacaccaugaacagccugacccugcccagcgaggugaaccugugcaacguggacaucuucaaccccaaguacgacugcaagaucaugaccagcaagaccgacgugagcagcagcgugaucaccagccugggcgccaucgugagcugcuacggcaagaccaagugcaccgccagcaacaagugcagaggcaucaucaagaccuucagcaacggcugcgacuacgugagcaacaagggcguggacaccgugagcgugggcaacacccuguacuacgugaacaagcaggagggccagagccuguacgugaagggcgagcccaucaucaacuucuacgacccccugguguuccccagcgacgaguucgacgccagcaucagccaggugaacgagaagaucaaccagagccuggccuucaucagaaagagcgacgagcugcugcacaacgugaacgccggcaagagcaccaccaacaucaugaucaccaccaucaucaucgugaucaucgugauccugcugagccugaucgccgugggccugcugcuguacugcaaggccagaugaggacuagucccuguucccagagcccacuuuuuuuucuuuuuuugaaauaaaauagccugucuuucagaucuaaaaaaaaaaaaaaaaaaaaaaaaaaaaaaaaaaaaaaaaaaaaaaaaaaaaaaaaaaaaaaaaugcaucccccccccccccccccccccccccccccccaaaggcucuuuucagagccaccagaauu

SEQ ID NO: 7947 - RNA, 1870 nt, Artificial Sequence
  mRNA product Design a-4 comprising derived and/or modified sequence from HRSV(A2)__F-del_DSCav1_mut8 (opt5)
gggagacuccugucgggcggaaguaggaggaguagaguuuaaaaacaguacucuuuuuccgguucgggacguaguugaagcaacgacaagccggauaaccgcucuugagacaggaagcuuaccauggagcugcucauccugaaggccaacgcuauuaccacaauccuuacggccgugaccuucugcuuugcgagcggccagaauauuacagaagaguucuaccaauccaccuguucugcugucagcaaaggguaucugggagcccucagaacaggcugguacaccuccguuaucacaauugaacugucuaacaucaaggagaucaaaugcaaugggaccgacgccaaggugaaacuuauuaagcaggaacuggauaaguauaaaaacgcugugacggaccuccagcugcugaugcagagcacccccgccacaggauccggcucugcuaucgccagcggggucgcgguguguaagguucuccaccuggagggagaggugaauaaaauuaaguccgcccuucugagcaccaacaaagcugucgugucucucuccggcugcggcguuagcgugcugacauuuaagguccuugaucugaagaauuacaucgacaaacaacuccugccuauucugaacaagcagucuuguuccaucccgaauauugaaaccgugaucgaguuccagcagaaaaacaaucggcuccuggaaaucacgcgcgaguuuagcgugaacgccggggucacaacccccguuucuacauauaugcuuaccaauuccgagcugcucagccugauuaacgauaugccuaucaccaaugaccaaaagaaacuuauguccaacaacgugcagauugugagacagcagucuuacagcaucaugugcauuaucaaggaagagguccuggcuuaugugguucaacucccccuguacggagugaucgauacaccuuguuggaaacugcauacgagcccccucugcaccacaaauaccaaggaaggcagcaacauuugucugacacggaccgaccgcgggugguacugcgauaaugccggaucugucuccuucuuuccucaggcggagacguguaaggugcagagcaacagaguuuucugcgacacaaugaacucucuuacccugccgagcgaagugaaucucugcaaugucgauaucuuuaaccccaaauaugacuguaagauuaugaccuccaaaacagaugugucuagcuccgucaucaccagccugggcgccauugugucuugcuacgggaagacaaaauguacggcuuccaauaagugccggggaaucaucaagaccuucagcaacggcugugacuauguuucuaauaaaggcguggacacagucuccguggggaacacccuuuacuauguuaauaagcaagagggacagagccuguacgugaaaggcgagccuauuaucaacuuuuaugauccccucgucuucccuuccgacgaauuugaugccucuauuagccaggugaaugagaagaucaaccagucccuggcuuucauucgcaaaucugacgaacugcuccacaacgugaaugccgggaaguccacaaccaacaucaugauuacgaccaucaucauuguuaucauugucauccugcuuucccugauugccgugggacuccugcuguacugcaaggcuagaugaggacuagucccuguucccagagcccacuuuuuuuucuuuuuuugaaauaaaauagccugucuuucagaucuaaaaaaaaaaaaaaaaaaaaaaaaaaaaaaaaaaaaaaaaaaaaaaaaaaaaaaaaaaaaaaaaugcaucccccccccccccccccccccccccccccccaaaggcucuuuucagagccaccagaauu

SEQ ID NO: 7948 - RNA, 1870 nt, Artificial Sequence
  mRNA product Design a-4 comprising derived and/or modified sequence from HRSV(A2)__F-del_DSCav1_mut8 (opt6)
gggagacuccugucgggcggaaguaggaggaguagaguuuaaaaacaguacucuuuuuccgguucgggacguaguugaagcaacgacaagccggauaaccgcucuugagacaggaagcuuaccauggaacuacucauauugaaagccaacgcaaucacaacaauacuaaccgccguaacauuuugcuucgcgucaggccaaaauauaacagaagaauuuuaccaaucaacaugcuccgccguaucaaaaggauaccuaggugcauuacgaaccgguugguacacaucaguaaucacaauagaacuuuccaacauuaaagaaauaaaaugcaauggcacagacgcaaaagucaaacuaauaaaacaagaacuagacaaauauaaaaacgccgucacagacuuacaacuauuaaugcaaagcacaccagcaacaggauccggaucagcaauagcaucaggaguagccgucuguaaaguacuacaccuagaaggcgaaguuaauaaaauuaaaucagcuuuauuaucaaccaacaaagcaguaguaucacuauccggaugcggagucuccguccuaacauucaaaguacuagaccucaagaauuacauagauaaacaacuacuaccaauacucaacaaacaaucauguucaauaccaaacaucgaaaccgucauagaauuucaacaaaaaaauaauagacucuuagaaauaacacgagaauuuagcguaaacgcaggagucacaaccccugucucaacauacaugcuaaccaauuccgaauuauuaucacucauaaaugacaugccaauaacuaaugaccaaaaaaaacuuaugucaaacaacguacaaauaguaagacaacaaucauauucaauaaugugcauaaucaaagaagaaguuuuagcauauguaguacaacuaccacuauauggcgucauagacacaccaugcuggaaauuacacacaucaccucuaugcacaacaaacacaaaagaaggaagcaacauuugccuaaccagaaccgauagaggaugguacugcgauaacgcaggcucaguaucauucuucccucaagccgaaacuugcaaaguccaaucaaauagagucuucugcgauacaaugaacuccuuaacuuuaccaucagaaguaaaucuaugcaacguagauaucuuuaauccaaaauacgauugcaaaaucaugacaucaaaaacagauguaucaucuaguguaauuaccucccuaggagcaauaguaagcugcuacggaaaaacaaaaugcaccgccucuaacaaaugucguggaauaauaaaaacauucucaaacggaugcgauuauguaucaaauaaaggugucgacaccguaucaguaggcaauacacuauacuauguaaauaaacaagaaggacaaucacucuacgucaaaggugaaccaauaauaaacuucuacgacccacuuguauucccaagcgacgaauuugacgcaucaauaagccaaguaaacgaaaaaauaaaccaaucacuagcauucaucagaaaaucagacgaacuacuccacaauguaaaugcaggaaaaucaacaaccaauaucaugauaacaaccauaauaauagucauaauaguaauacuauuaucccucauagccguuggacuacuccuauauuguaaagcacgauaaggacuagucccuguucccagagcccacuuuuuuuucuuuuuuugaaauaaaauagccugucuuucagaucuaaaaaaaaaaaaaaaaaaaaaaaaaaaaaaaaaaaaaaaaaaaaaaaaaaaaaaaaaaaaaaaaugcaucccccccccccccccccccccccccccccccaaaggcucuuuucagagccaccagaauu

SEQ ID NO: 7949 - RNA, 1870 nt, Artificial Sequence
  mRNA product Design a-4 comprising derived and/or modified sequence from HRSV(A2)__F-del_DSCav1_mut8 (opt11)
gggagacuccugucgggcggaaguaggaggaguagaguuuaaaaacaguacucuuuuuccgguucgggacguaguugaagcaacgacaagccggauaaccgcucuugagacaggaagcuuaccauggaacuccucauccucaaagccaacgccaucaccaccauacucaccgcaguaaccuucugcuucgcauccggccaaaacaucacagaagaguucuaccagaguaccugcuccgccgucuccaaaggcuaccuuggcgcccuccguaccgggugguacacauccgucaucacaaucgaacucuccaacaucaaagaaauaaagugcaacggcacagacgccaaaguaaaacugauaaagcaagaacucgacaaauacaaaaacgccguaaccgaccuccagcuacuaaugcaauccacucccgccaccggcagcggauccgccaucgccuccggaguagccgucuguaaagucuuacaccucgaaggcgaagugaacaaaaucaaauccgcccuacucucaaccaacaaagccguaguaucacucuccgggugcggcguuucagugcuaacguucaaaguccuugaccucaaaaacuacaucgacaaacaacuccuccccauccuaaauaaacaauccugcuccauacccaacaucgagacugucaucgaguuccagcagaaaaacaaccgacuccucgaaaucacacgcgaguucucugucaacgccggcgucacaacccccgucuccacauacaugcucaccaacagcgaacuccucucccuaaucaaugacaugcccaucaccaacgaccaaaagaaacucaugucaaacaacguccaaaucguccgccaacaauccuacagcaucaugugcaucaucaaagaagaaguucucgcauacguaguacaacucccccucuacggagugaucgacacccccugcuggaaacuacacaccagcccgcuuugcaccacaaacaccaaggaaggcuccaacaucugccucacucgaaccgaccgcggcugguacugcgacaacgcaggcuccgucaguuucuuuccccaagcagaaacaugcaaaguccaauccaaccgaguauucugcgacaccaugaacucccucacccuaccauccgaaguuaaccuaugcaacguggacaucuucaaccccaaguacgacugcaaaauuaugaccuccaaaaccgacguauccuccagcgucaucaccagccucggagcaauagucuccugcuacggcaagaccaagugcaccgcuuccaacaagugucgcggaaucaucaaaaccuucucaaacggcugcgacuacgucuccaacaaaggcgucgacaccguauccguaggaaacacccuauacuacgucaacaaacaagaaggacaaucccucuaugucaaaggcgaacccaucaucaauuucuacgacccccuagucuucccuuccgacgaguucgacgcguccaucagccaagucaaugaaaagaucaaccagagccuggcauucauccgcaaauccgacgaacuccuccacaacgucaacgcgggaaaauccacgacaaacaucaugaucaccaccaucaucaucgucaucauagucauucuccuuucucucaucgccgugggacuacuucucuacugcaaagcccgauaaggacuagucccuguucccagagcccacuuuuuuuucuuuuuuugaaauaaaauagccugucuuucagaucuaaaaaaaaaaaaaaaaaaaaaaaaaaaaaaaaaaaaaaaaaaaaaaaaaaaaaaaaaaaaaaaaugcaucccccccccccccccccccccccccccccccaaaggcucuuuucagagccaccagaauu

SEQ ID NO: 7950 - RNA, 1816 nt, Artificial Sequence
  mRNA product Design a-5 comprising derived and/or modified sequence from HRSV(A2)__F-del_DSCav1_mut8 (opt1)
gggagacuuucccauucuguagcagaauuugguguugccuguggucuuggucccgcggagaagcuuaccauggagcugcucauccugaaggccaacgccaucaccaccauccugacggcggugaccuucugcuucgccagcggccagaacaucaccgaggaguucuaccaguccacgugcagcgccgucuccaagggguaccucggcgcccugcggaccggcugguacaccuccgugaucaccaucgagcugagcaacaucaaggagaucaagugcaacgggaccgacgccaaggugaagcucaucaagcaggagcuggacaaguacaagaacgcggucacggaccugcagcuccugaugcaguccaccccggcaaccggcuccggcuccgccaucgcgagcggcgucgccgugugcaaggugcugcaccucgagggggaggucaacaagaucaagagcgcccugcuguccaccaacaaggccguggugagccucuccggcugcggcgucagcgugcugaccuucaaggugcuggaccucaagaacuacaucgacaagcagcugcugcccauccugaacaagcagagcugcuccauccccaacaucgagacggugaucgaguuccagcagaagaacaaccggcuccuggagaucacccgcgaguucagcgugaacgccggggucaccacccccguguccacguacaugcugaccaacagcgagcuccugucccugaucaacgacaugccgaucaccaacgaccagaagaagcucaugagcaacaacgugcagaucguccggcagcaguccuacagcaucaugugcaucaucaaggaggaggugcuggcguacgugguccagcugccccucuacggcgugaucgacacccccugcuggaagcugcacacgagcccccugugcaccaccaacaccaaggagggguccaacaucugccucacgcgcaccgaccggggcugguacugcgacaacgccggcagcgucuccuucuucccgcaggccgagaccugcaaggugcagagcaaccgcguguucugcgacaccaugaacucccugacgcugcccagcgagguaaaccucugcaacgucgacaucuucaaccccaaguacgacugcaagaucaugaccuccaagaccgacgugagcuccagcgugaucaccucccugggggccaucgucagcugcuacggcaagacgaagugcaccgccagcaacaagugccgggggaucaucaagaccuucuccaacggcugcgacuacgugagcaacaagggcguggacaccguguccgucgggaacacccuguacuacgugaacaagcaggagggccagagccucuacgugaagggggagcccaucaucaacuucuacgacccgcuggucuuccccuccgacgaguucgacgcgagcaucucccaggugaacgagaagaucaaccagagccuggccuucauccgcaaguccgacgagcugcuccacaacgugaacgccggcaagagcacgaccaacaucaugaucaccaccaucaucaucgucaucaucgugauccugcugucccucaucgccguggggcugcugcucuacugcaaggcccggugaggacuagucccuguucccagagcccacuuuuuuuucuuuuuuugaaauaaaauagccugucuuucagaucuaaaaaaaaaaaaaaaaaaaaaaaaaaaaaaaaaaaaaaaaaaaaaaaaaaaaaaaaaaaaaaaaugcaucccccccccccccccccccccccccccccccaaaggcucuuuucagagccaccagaauu

SEQ ID NO: 7951 - RNA, 1816 nt, Artificial Sequence
  mRNA product Design a-5 comprising derived and/or modified sequence from HRSV(A2)__F-del_DSCav1_mut8 (opt1)
gggagacuuucccauucuguagcagaauuugguguugccuguggucuuggucccgcggagaagcuuaccauggagcugcucauccugaaggccaacgccaucaccaccauccugacggcggugaccuucugcuucgccagcggccagaacaucaccgaggaguucuaccaguccacgugcagcgccgucuccaagggguaccucggcgcccugcgcaccgggugguacaccagcgugaucaccaucgagcuguccaacaucaaggagaucaagugcaacggcaccgacgccaaggugaagcucaucaagcaggagcuggacaaguacaagaacgcggucacggaccugcagcuccugaugcagagcacccccgccaccggguccggcagcgccaucgccuccggcguggcggugugcaagguccugcaccucgagggggaggugaacaagaucaagagcgcccugcuguccaccaacaaggccguggucagccucuccggcugcggggugagcgugcugacguucaagguccuggaccucaagaacuacaucgacaagcagcugcugccgauccucaacaagcaguccugcagcauccccaacaucgagaccgugaucgaguuccagcagaagaacaaccggcugcuggagaucacccgcgaguucuccgugaacgccggcgucaccacgcccgugagcaccuacaugcucaccaacuccgagcugcugagccucaucaacgacaugcccaucaccaacgaccagaagaagcugaugagcaacaacgugcagaucguccggcagcaguccuacagcaucaugugcaucaucaaggaggaggugcuggccuacgugguccagcucccgcuguacggggugaucgacacgcccugcuggaagcugcacaccagcccccucugcaccaccaacacgaaggagggcuccaacaucugccugacccgcaccgaccggggcugguacugcgacaacgcgggguccgugagcuucuucccccaggccgagaccugcaagguccaguccaaccgcguguucugcgacacgaugaacagccugacccucccguccgaggucaaccugugcaacguggacaucuucaaccccaaguacgacugcaagaucaugaccagcaagaccgacguguccagcuccgucaucacgagccugggcgccaucguguccugcuacgggaagaccaagugcaccgccagcaacaagugccggggcaucaucaagaccuucuccaacggcugcgacuacgugagcaacaagggggucgacacgguguccgugggcaacacccucuacuacgucaacaagcaggaggggcagagccuguacgugaagggcgagcccaucaucaacuucuacgacccccugguguucccgagcgacgaguucgacgccuccaucagccaggucaacgagaagaucaaccagucccucgcguucauccgcaagagcgacgagcugcugcacaacgugaacgccgggaaguccaccaccaacaucaugaucaccacgaucaucaucgugaucaucgucauccuccugagccugaucgccgugggccuccugcuguacugcaaggcccggugaggacuagucccuguucccagagcccacuuuuuuuucuuuuuuugaaauaaaauagccugucuuucagaucuaaaaaaaaaaaaaaaaaaaaaaaaaaaaaaaaaaaaaaaaaaaaaaaaaaaaaaaaaaaaaaaaugcaucccccccccccccccccccccccccccccccaaaggcucuuuucagagccaccagaauu

SEQ ID NO: 7952 - RNA, 1816 nt, Artificial Sequence
  mRNA product Design a-5 comprising derived and/or modified sequence from HRSV(A2)__F-del_DSCav1_mut8 (opt2)
gggagacuuucccauucuguagcagaauuugguguugccuguggucuuggucccgcggagaagcuuaccauggagcuccucauccucaaggccaacgccaucaccaccauccucaccgccgucaccuucugcuucgccuccggccagaacaucaccgaggaguucuaccaguccaccugcuccgccgucuccaagggcuaccucggcgcccuccgcaccggcugguacaccuccgucaucaccaucgagcucuccaacaucaaggagaucaagugcaacggcaccgacgccaaggucaagcucaucaagcaggagcucgacaaguacaagaacgccgucaccgaccuccagcuccucaugcaguccacccccgccaccggcuccggcuccgccaucgccuccggcgucgccgucugcaagguccuccaccucgagggcgaggucaacaagaucaaguccgcccuccucuccaccaacaaggccgucgucucccucuccggcugcggcgucuccguccucaccuucaagguccucgaccucaagaacuacaucgacaagcagcuccuccccauccucaacaagcaguccugcuccauccccaacaucgagaccgucaucgaguuccagcagaagaacaaccgccuccucgagaucacccgcgaguucuccgucaacgccggcgucaccacccccgucuccaccuacaugcucaccaacuccgagcuccucucccucaucaacgacaugcccaucaccaacgaccagaagaagcucauguccaacaacguccagaucguccgccagcaguccuacuccaucaugugcaucaucaaggaggagguccucgccuacgucguccagcucccccucuacggcgucaucgacacccccugcuggaagcuccacaccuccccccucugcaccaccaacaccaaggagggcuccaacaucugccucacccgcaccgaccgcggcugguacugcgacaacgccggcuccgucuccuucuucccccaggccgagaccugcaagguccaguccaaccgcgucuucugcgacaccaugaacucccucacccuccccuccgaggucaaccucugcaacgucgacaucuucaaccccaaguacgacugcaagaucaugaccuccaagaccgacgucuccuccuccgucaucaccucccucggcgccaucgucuccugcuacggcaagaccaagugcaccgccuccaacaagugccgcggcaucaucaagaccuucuccaacggcugcgacuacgucuccaacaagggcgucgacaccgucuccgucggcaacacccucuacuacgucaacaagcaggagggccagucccucuacgucaagggcgagcccaucaucaacuucuacgacccccucgucuuccccuccgacgaguucgacgccuccaucucccaggucaacgagaagaucaaccagucccucgccuucauccgcaaguccgacgagcuccuccacaacgucaacgccggcaaguccaccaccaacaucaugaucaccaccaucaucaucgucaucaucgucauccuccucucccucaucgccgucggccuccuccucuacugcaaggcccgcugaggacuagucccuguucccagagcccacuuuuuuuucuuuuuuugaaauaaaauagccugucuuucagaucuaaaaaaaaaaaaaaaaaaaaaaaaaaaaaaaaaaaaaaaaaaaaaaaaaaaaaaaaaaaaaaaaugcaucccccccccccccccccccccccccccccccaaaggcucuuuucagagccaccagaauu

SEQ ID NO: 7953 - RNA, 1816 nt, Artificial Sequence
  mRNA product Design a-5 comprising derived and/or modified sequence from HRSV(A2)__F-del_DSCav1_mut8 (opt3)
gggagacuuucccauucuguagcagaauuugguguugccuguggucuuggucccgcggagaagcuuaccauggagcugcucauccuuaaggccaacgcuauuaccacaauacugacugcagugacguucugcuuugccagcggccagaauaucaccgaagaguucuaccaauccacauguucugcggucucaaaaggguauuugggagcuuuaagaacugguugguacaccaguguuauuacaaucgaacugagcaacauuaaggagaucaaaugcaauggcaccgacgccaaggugaaacuaauaaagcaggaacucgauaaguauaaaaacgcaguaacugaccugcagcuucugaugcaguccacacccgccaccgggucuggaucggcuaucgcaucaggcguggccgucuguaagguguugcaccucgagggugagguuaauaaaauuaagagcgcucugcugaguacgaacaaagccguggucucccucucugggugcggagugagcguauuaacuuuuaagguucuggaucuuaagaauuacaucgacaaacaauugcugccuauucuaaacaagcaguccuguucaaucccaaauauagaaaccgugauugaguuccagcagaaaaacaauaggcuccuggaaaucacacgggaguuuagugucaacgcgggcgugacuaccccggugagcacauauaugcuuaccaauucugagcuguugucccucauuaacgauaugcccaucacgaaugaccaaaagaaacugaugucaaacaacguccagaucguucgccagcagagcuacaguauuaugugcauaaucaaggaagagguguuagcauauguagugcaacugccucucuacggcgucauugauacuccauguuggaaacuucauacaucuccccugugcaccacuaauacaaaggaaggguccaacaucuguuugacccgaacggaccguggaugguacugcgauaaugccgguagcgugucguucuuuccucaggcugagaccuguaagguucagucuaacagaguguucugcgacacaaugaacucccuaacucugccaucagaagucaaucucugcaauguggauauauuuaaccccaaauaugacuguaagauuaugaccaguaaaacagauguaagcuccucuguuaucacuagccugggcgccaucgugucaugcuacgggaagaccaaauguacagcaaguaauaagugcaggggaauuaucaagaccuucuccaacggcugugacuaugucagcaauaaagguguggacacugucucuguggggaacacgcuuuacuauguuaauaagcaagagggacagucacuguacgugaaaggcgagccuauuauaaacuuuuaugauccauugguauucccgagugacgaauuugaugcuagcaucucccaggucaaugagaagauuaaccagucucucgccuucauccggaaaucggacgaacuguuacacaacgugaaugcgggcaagagcacaaccaacaucaugauuacuaccauaaucauuguuaucauugugauccugcuaucccucauagccgucgggcugcuuuuguacugcaaggcacgcugaggacuagucccuguucccagagcccacuuuuuuuucuuuuuuugaaauaaaauagccugucuuucagaucuaaaaaaaaaaaaaaaaaaaaaaaaaaaaaaaaaaaaaaaaaaaaaaaaaaaaaaaaaaaaaaaaugcaucccccccccccccccccccccccccccccccaaaggcucuuuucagagccaccagaauu

SEQ ID NO: 7954 - RNA, 1816 nt, Artificial Sequence
  mRNA product Design a-5 comprising derived and/or modified sequence from HRSV(A2)__F-del_DSCav1_mut8 (opt4)
gggagacuuucccauucuguagcagaauuugguguugccuguggucuuggucccgcggagaagcuuaccauggagcugcugauccugaaggccaacgccaucaccaccauccugaccgccgugaccuucugcuucgccagcggccagaacaucaccgaggaguucuaccagagcaccugcagcgccgugagcaagggcuaccugggcgcccugagaaccggcugguacaccagcgugaucaccaucgagcugagcaacaucaaggagaucaagugcaacggcaccgacgccaaggugaagcugaucaagcaggagcuggacaaguacaagaacgccgugaccgaccugcagcugcugaugcagagcacccccgccaccggcagcggcagcgccaucgccagcggcguggccgugugcaaggugcugcaccuggagggcgaggugaacaagaucaagagcgcccugcugagcaccaacaaggccguggugagccugagcggcugcggcgugagcgugcugaccuucaaggugcuggaccugaagaacuacaucgacaagcagcugcugcccauccugaacaagcagagcugcagcauccccaacaucgagaccgugaucgaguuccagcagaagaacaacagacugcuggagaucaccagagaguucagcgugaacgccggcgugaccacccccgugagcaccuacaugcugaccaacagcgagcugcugagccugaucaacgacaugcccaucaccaacgaccagaagaagcugaugagcaacaacgugcagaucgugagacagcagagcuacagcaucaugugcaucaucaaggaggaggugcuggccuacguggugcagcugccccuguacggcgugaucgacacccccugcuggaagcugcacaccagcccccugugcaccaccaacaccaaggagggcagcaacaucugccugaccagaaccgacagaggcugguacugcgacaacgccggcagcgugagcuucuucccccaggccgagaccugcaaggugcagagcaacagaguguucugcgacaccaugaacagccugacccugcccagcgaggugaaccugugcaacguggacaucuucaaccccaaguacgacugcaagaucaugaccagcaagaccgacgugagcagcagcgugaucaccagccugggcgccaucgugagcugcuacggcaagaccaagugcaccgccagcaacaagugcagaggcaucaucaagaccuucagcaacggcugcgacuacgugagcaacaagggcguggacaccgugagcgugggcaacacccuguacuacgugaacaagcaggagggccagagccuguacgugaagggcgagcccaucaucaacuucuacgacccccugguguuccccagcgacgaguucgacgccagcaucagccaggugaacgagaagaucaaccagagccuggccuucaucagaaagagcgacgagcugcugcacaacgugaacgccggcaagagcaccaccaacaucaugaucaccaccaucaucaucgugaucaucgugauccugcugagccugaucgccgugggccugcugcuguacugcaaggccagaugaggacuagucccuguucccagagcccacuuuuuuuucuuuuuuugaaauaaaauagccugucuuucagaucuaaaaaaaaaaaaaaaaaaaaaaaaaaaaaaaaaaaaaaaaaaaaaaaaaaaaaaaaaaaaaaaaugcaucccccccccccccccccccccccccccccccaaaggcucuuuucagagccaccagaauu

SEQ ID NO: 7955 - RNA, 1816 nt, Artificial Sequence
  mRNA product Design a-5 comprising derived and/or modified sequence from HRSV(A2)__F-del_DSCav1_mut8 (opt5)
gggagacuuucccauucuguagcagaauuugguguugccuguggucuuggucccgcggagaagcuuaccauggagcugcucauccugaaggccaacgcuauuaccacaauccuuacggccgugaccuucugcuuugcgagcggccagaauauuacagaagaguucuaccaauccaccuguucugcugucagcaaaggguaucugggagcccucagaacaggcugguacaccuccguuaucacaauugaacugucuaacaucaaggagaucaaaugcaaugggaccgacgccaaggugaaacuuauuaagcaggaacuggauaaguauaaaaacgcugugacggaccuccagcugcugaugcagagcacccccgccacaggauccggcucugcuaucgccagcggggucgcgguguguaagguucuccaccuggagggagaggugaauaaaauuaaguccgcccuucugagcaccaacaaagcugucgugucucucuccggcugcggcguuagcgugcugacauuuaagguccuugaucugaagaauuacaucgacaaacaacuccugccuauucugaacaagcagucuuguuccaucccgaauauugaaaccgugaucgaguuccagcagaaaaacaaucggcuccuggaaaucacgcgcgaguuuagcgugaacgccggggucacaacccccguuucuacauauaugcuuaccaauuccgagcugcucagccugauuaacgauaugccuaucaccaaugaccaaaagaaacuuauguccaacaacgugcagauugugagacagcagucuuacagcaucaugugcauuaucaaggaagagguccuggcuuaugugguucaacucccccuguacggagugaucgauacaccuuguuggaaacugcauacgagcccccucugcaccacaaauaccaaggaaggcagcaacauuugucugacacggaccgaccgcgggugguacugcgauaaugccggaucugucuccuucuuuccucaggcggagacguguaaggugcagagcaacagaguuuucugcgacacaaugaacucucuuacccugccgagcgaagugaaucucugcaaugucgauaucuuuaaccccaaauaugacuguaagauuaugaccuccaaaacagaugugucuagcuccgucaucaccagccugggcgccauugugucuugcuacgggaagacaaaauguacggcuuccaauaagugccggggaaucaucaagaccuucagcaacggcugugacuauguuucuaauaaaggcguggacacagucuccguggggaacacccuuuacuauguuaauaagcaagagggacagagccuguacgugaaaggcgagccuauuaucaacuuuuaugauccccucgucuucccuuccgacgaauuugaugccucuauuagccaggugaaugagaagaucaaccagucccuggcuuucauucgcaaaucugacgaacugcuccacaacgugaaugccgggaaguccacaaccaacaucaugauuacgaccaucaucauuguuaucauugucauccugcuuucccugauugccgugggacuccugcuguacugcaaggcuagaugaggacuagucccuguucccagagcccacuuuuuuuucuuuuuuugaaauaaaauagccugucuuucagaucuaaaaaaaaaaaaaaaaaaaaaaaaaaaaaaaaaaaaaaaaaaaaaaaaaaaaaaaaaaaaaaaaugcaucccccccccccccccccccccccccccccccaaaggcucuuuucagagccaccagaauu

SEQ ID NO: 7956 - RNA, 1816 nt, Artificial Sequence
  mRNA product Design a-5 comprising derived and/or modified sequence from HRSV(A2)__F-del_DSCav1_mut8 (opt6)
gggagacuuucccauucuguagcagaauuugguguugccuguggucuuggucccgcggagaagcuuaccauggaacuacucauauugaaagccaacgcaaucacaacaauacuaaccgccguaacauuuugcuucgcgucaggccaaaauauaacagaagaauuuuaccaaucaacaugcuccgccguaucaaaaggauaccuaggugcauuacgaaccgguugguacacaucaguaaucacaauagaacuuuccaacauuaaagaaauaaaaugcaauggcacagacgcaaaagucaaacuaauaaaacaagaacuagacaaauauaaaaacgccgucacagacuuacaacuauuaaugcaaagcacaccagcaacaggauccggaucagcaauagcaucaggaguagccgucuguaaaguacuacaccuagaaggcgaaguuaauaaaauuaaaucagcuuuauuaucaaccaacaaagcaguaguaucacuauccggaugcggagucuccguccuaacauucaaaguacuagaccucaagaauuacauagauaaacaacuacuaccaauacucaacaaacaaucauguucaauaccaaacaucgaaaccgucauagaauuucaacaaaaaaauaauagacucuuagaaauaacacgagaauuuagcguaaacgcaggagucacaaccccugucucaacauacaugcuaaccaauuccgaauuauuaucacucauaaaugacaugccaauaacuaaugaccaaaaaaaacuuaugucaaacaacguacaaauaguaagacaacaaucauauucaauaaugugcauaaucaaagaagaaguuuuagcauauguaguacaacuaccacuauauggcgucauagacacaccaugcuggaaauuacacacaucaccucuaugcacaacaaacacaaaagaaggaagcaacauuugccuaaccagaaccgauagaggaugguacugcgauaacgcaggcucaguaucauucuucccucaagccgaaacuugcaaaguccaaucaaauagagucuucugcgauacaaugaacuccuuaacuuuaccaucagaaguaaaucuaugcaacguagauaucuuuaauccaaaauacgauugcaaaaucaugacaucaaaaacagauguaucaucuaguguaauuaccucccuaggagcaauaguaagcugcuacggaaaaacaaaaugcaccgccucuaacaaaugucguggaauaauaaaaacauucucaaacggaugcgauuauguaucaaauaaaggugucgacaccguaucaguaggcaauacacuauacuauguaaauaaacaagaaggacaaucacucuacgucaaaggugaaccaauaauaaacuucuacgacccacuuguauucccaagcgacgaauuugacgcaucaauaagccaaguaaacgaaaaaauaaaccaaucacuagcauucaucagaaaaucagacgaacuacuccacaauguaaaugcaggaaaaucaacaaccaauaucaugauaacaaccauaauaauagucauaauaguaauacuauuaucccucauagccguuggacuacuccuauauuguaaagcacgauaaggacuagucccuguucccagagcccacuuuuuuuucuuuuuuugaaauaaaauagccugucuuucagaucuaaaaaaaaaaaaaaaaaaaaaaaaaaaaaaaaaaaaaaaaaaaaaaaaaaaaaaaaaaaaaaaaugcaucccccccccccccccccccccccccccccccaaaggcucuuuucagagccaccagaauu

SEQ ID NO: 7957 - RNA, 1816 nt, Artificial Sequence
  mRNA product Design a-5 comprising derived and/or modified sequence from HRSV(A2)__F-del_DSCav1_mut8 (opt11)
gggagacuuucccauucuguagcagaauuugguguugccuguggucuuggucccgcggagaagcuuaccauggaacuccucauccucaaagccaacgccaucaccaccauacucaccgcaguaaccuucugcuucgcauccggccaaaacaucacagaagaguucuaccagaguaccugcuccgccgucuccaaaggcuaccuuggcgcccuccguaccgggugguacacauccgucaucacaaucgaacucuccaacaucaaagaaauaaagugcaacggcacagacgccaaaguaaaacugauaaagcaagaacucgacaaauacaaaaacgccguaaccgaccuccagcuacuaaugcaauccacucccgccaccggcagcggauccgccaucgccuccggaguagccgucuguaaagucuuacaccucgaaggcgaagugaacaaaaucaaauccgcccuacucucaaccaacaaagccguaguaucacucuccgggugcggcguuucagugcuaacguucaaaguccuugaccucaaaaacuacaucgacaaacaacuccuccccauccuaaauaaacaauccugcuccauacccaacaucgagacugucaucgaguuccagcagaaaaacaaccgacuccucgaaaucacacgcgaguucucugucaacgccggcgucacaacccccgucuccacauacaugcucaccaacagcgaacuccucucccuaaucaaugacaugcccaucaccaacgaccaaaagaaacucaugucaaacaacguccaaaucguccgccaacaauccuacagcaucaugugcaucaucaaagaagaaguucucgcauacguaguacaacucccccucuacggagugaucgacacccccugcuggaaacuacacaccagcccgcuuugcaccacaaacaccaaggaaggcuccaacaucugccucacucgaaccgaccgcggcugguacugcgacaacgcaggcuccgucaguuucuuuccccaagcagaaacaugcaaaguccaauccaaccgaguauucugcgacaccaugaacucccucacccuaccauccgaaguuaaccuaugcaacguggacaucuucaaccccaaguacgacugcaaaauuaugaccuccaaaaccgacguauccuccagcgucaucaccagccucggagcaauagucuccugcuacggcaagaccaagugcaccgcuuccaacaagugucgcggaaucaucaaaaccuucucaaacggcugcgacuacgucuccaacaaaggcgucgacaccguauccguaggaaacacccuauacuacgucaacaaacaagaaggacaaucccucuaugucaaaggcgaacccaucaucaauuucuacgacccccuagucuucccuuccgacgaguucgacgcguccaucagccaagucaaugaaaagaucaaccagagccuggcauucauccgcaaauccgacgaacuccuccacaacgucaacgcgggaaaauccacgacaaacaucaugaucaccaccaucaucaucgucaucauagucauucuccuuucucucaucgccgugggacuacuucucuacugcaaagcccgauaaggacuagucccuguucccagagcccacuuuuuuuucuuuuuuugaaauaaaauagccugucuuucagaucuaaaaaaaaaaaaaaaaaaaaaaaaaaaaaaaaaaaaaaaaaaaaaaaaaaaaaaaaaaaaaaaaugcaucccccccccccccccccccccccccccccccaaaggcucuuuucagagccaccagaauu

SEQ ID NO: 7958 - RNA, 1997 nt, Artificial Sequence
  mRNA product Design b-1 comprising derived and/or modified sequence from HRSV(A2)__F-del_DSCav1_mut8 (opt1)
gggagacggagacggccugcaggaccugcucucucagcccucagccgaggccuacgccgagccgagugcgcagccgacgaccgggaggagccgcagccuucaacucugagguacugugauccgcgcugcccgccgggccgccccaguccgcugcugcggcaccuccuucccucgcgcccucuucgcucgccagcgccuucccugugagccugcgucaccgcggccgccaagcuuaccauggagcugcucauccugaaggccaacgccaucaccaccauccugacggcggugaccuucugcuucgccagcggccagaacaucaccgaggaguucuaccaguccacgugcagcgccgucuccaagggguaccucggcgcccugcggaccggcugguacaccuccgugaucaccaucgagcugagcaacaucaaggagaucaagugcaacgggaccgacgccaaggugaagcucaucaagcaggagcuggacaaguacaagaacgcggucacggaccugcagcuccugaugcaguccaccccggcaaccggcuccggcuccgccaucgcgagcggcgucgccgugugcaaggugcugcaccucgagggggaggucaacaagaucaagagcgcccugcuguccaccaacaaggccguggugagccucuccggcugcggcgucagcgugcugaccuucaaggugcuggaccucaagaacuacaucgacaagcagcugcugcccauccugaacaagcagagcugcuccauccccaacaucgagacggugaucgaguuccagcagaagaacaaccggcuccuggagaucacccgcgaguucagcgugaacgccggggucaccacccccguguccacguacaugcugaccaacagcgagcuccugucccugaucaacgacaugccgaucaccaacgaccagaagaagcucaugagcaacaacgugcagaucguccggcagcaguccuacagcaucaugugcaucaucaaggaggaggugcuggcguacgugguccagcugccccucuacggcgugaucgacacccccugcuggaagcugcacacgagcccccugugcaccaccaacaccaaggagggguccaacaucugccucacgcgcaccgaccggggcugguacugcgacaacgccggcagcgucuccuucuucccgcaggccgagaccugcaaggugcagagcaaccgcguguucugcgacaccaugaacucccugacgcugcccagcgagguaaaccucugcaacgucgacaucuucaaccccaaguacgacugcaagaucaugaccuccaagaccgacgugagcuccagcgugaucaccucccugggggccaucgucagcugcuacggcaagacgaagugcaccgccagcaacaagugccgggggaucaucaagaccuucuccaacggcugcgacuacgugagcaacaagggcguggacaccguguccgucgggaacacccuguacuacgugaacaagcaggagggccagagccucuacgugaagggggagcccaucaucaacuucuacgacccgcuggucuuccccuccgacgaguucgacgcgagcaucucccaggugaacgagaagaucaaccagagccuggccuucauccgcaaguccgacgagcugcuccacaacgugaacgccggcaagagcacgaccaacaucaugaucaccaccaucaucaucgucaucaucgugauccugcugucccucaucgccguggggcugcugcucuacugcaaggcccggugaggacuaguguccaccugucccuccugggcugcuggauugucucguuuuccugccaaauaaacaggaucagcgcuuuacagaucuaaaaaaaaaaaaaaaaaaaaaaaaaaaaaaaaaaaaaaaaaaaaaaaaaaaaaaaaaaaaaaaaugcaucccccccccccccccccccccccccccccccaaaggcucuuuucagagccaccagaauu

SEQ ID NO: 7959 - RNA, 1997 nt, Artificial Sequence
  mRNA product Design b-1 comprising derived and/or modified sequence from HRSV(A2)__F-del_DSCav1_mut8 (opt1)
gggagacggagacggccugcaggaccugcucucucagcccucagccgaggccuacgccgagccgagugcgcagccgacgaccgggaggagccgcagccuucaacucugagguacugugauccgcgcugcccgccgggccgccccaguccgcugcugcggcaccuccuucccucgcgcccucuucgcucgccagcgccuucccugugagccugcgucaccgcggccgccaagcuuaccauggagcugcucauccugaaggccaacgccaucaccaccauccugacggcggugaccuucugcuucgccagcggccagaacaucaccgaggaguucuaccaguccacgugcagcgccgucuccaagggguaccucggcgcccugcgcaccgggugguacaccagcgugaucaccaucgagcuguccaacaucaaggagaucaagugcaacggcaccgacgccaaggugaagcucaucaagcaggagcuggacaaguacaagaacgcggucacggaccugcagcuccugaugcagagcacccccgccaccggguccggcagcgccaucgccuccggcguggcggugugcaagguccugcaccucgagggggaggugaacaagaucaagagcgcccugcuguccaccaacaaggccguggucagccucuccggcugcggggugagcgugcugacguucaagguccuggaccucaagaacuacaucgacaagcagcugcugccgauccucaacaagcaguccugcagcauccccaacaucgagaccgugaucgaguuccagcagaagaacaaccggcugcuggagaucacccgcgaguucuccgugaacgccggcgucaccacgcccgugagcaccuacaugcucaccaacuccgagcugcugagccucaucaacgacaugcccaucaccaacgaccagaagaagcugaugagcaacaacgugcagaucguccggcagcaguccuacagcaucaugugcaucaucaaggaggaggugcuggccuacgugguccagcucccgcuguacggggugaucgacacgcccugcuggaagcugcacaccagcccccucugcaccaccaacacgaaggagggcuccaacaucugccugacccgcaccgaccggggcugguacugcgacaacgcgggguccgugagcuucuucccccaggccgagaccugcaagguccaguccaaccgcguguucugcgacacgaugaacagccugacccucccguccgaggucaaccugugcaacguggacaucuucaaccccaaguacgacugcaagaucaugaccagcaagaccgacguguccagcuccgucaucacgagccugggcgccaucguguccugcuacgggaagaccaagugcaccgccagcaacaagugccggggcaucaucaagaccuucuccaacggcugcgacuacgugagcaacaagggggucgacacgguguccgugggcaacacccucuacuacgucaacaagcaggaggggcagagccuguacgugaagggcgagcccaucaucaacuucuacgacccccugguguucccgagcgacgaguucgacgccuccaucagccaggucaacgagaagaucaaccagucccucgcguucauccgcaagagcgacgagcugcugcacaacgugaacgccgggaaguccaccaccaacaucaugaucaccacgaucaucaucgugaucaucgucauccuccugagccugaucgccgugggccuccugcuguacugcaaggcccggugaggacuaguguccaccugucccuccugggcugcuggauugucucguuuuccugccaaauaaacaggaucagcgcuuuacagaucuaaaaaaaaaaaaaaaaaaaaaaaaaaaaaaaaaaaaaaaaaaaaaaaaaaaaaaaaaaaaaaaaugcaucccccccccccccccccccccccccccccccaaaggcucuuuucagagccaccagaauu

SEQ ID NO: 7960 - RNA, 1997 nt, Artificial Sequence
  mRNA product Design b-1 comprising derived and/or modified sequence from HRSV(A2)__F-del_DSCav1_mut8 (opt2)
gggagacggagacggccugcaggaccugcucucucagcccucagccgaggccuacgccgagccgagugcgcagccgacgaccgggaggagccgcagccuucaacucugagguacugugauccgcgcugcccgccgggccgccccaguccgcugcugcggcaccuccuucccucgcgcccucuucgcucgccagcgccuucccugugagccugcgucaccgcggccgccaagcuuaccauggagcuccucauccucaaggccaacgccaucaccaccauccucaccgccgucaccuucugcuucgccuccggccagaacaucaccgaggaguucuaccaguccaccugcuccgccgucuccaagggcuaccucggcgcccuccgcaccggcugguacaccuccgucaucaccaucgagcucuccaacaucaaggagaucaagugcaacggcaccgacgccaaggucaagcucaucaagcaggagcucgacaaguacaagaacgccgucaccgaccuccagcuccucaugcaguccacccccgccaccggcuccggcuccgccaucgccuccggcgucgccgucugcaagguccuccaccucgagggcgaggucaacaagaucaaguccgcccuccucuccaccaacaaggccgucgucucccucuccggcugcggcgucuccguccucaccuucaagguccucgaccucaagaacuacaucgacaagcagcuccuccccauccucaacaagcaguccugcuccauccccaacaucgagaccgucaucgaguuccagcagaagaacaaccgccuccucgagaucacccgcgaguucuccgucaacgccggcgucaccacccccgucuccaccuacaugcucaccaacuccgagcuccucucccucaucaacgacaugcccaucaccaacgaccagaagaagcucauguccaacaacguccagaucguccgccagcaguccuacuccaucaugugcaucaucaaggaggagguccucgccuacgucguccagcucccccucuacggcgucaucgacacccccugcuggaagcuccacaccuccccccucugcaccaccaacaccaaggagggcuccaacaucugccucacccgcaccgaccgcggcugguacugcgacaacgccggcuccgucuccuucuucccccaggccgagaccugcaagguccaguccaaccgcgucuucugcgacaccaugaacucccucacccuccccuccgaggucaaccucugcaacgucgacaucuucaaccccaaguacgacugcaagaucaugaccuccaagaccgacgucuccuccuccgucaucaccucccucggcgccaucgucuccugcuacggcaagaccaagugcaccgccuccaacaagugccgcggcaucaucaagaccuucuccaacggcugcgacuacgucuccaacaagggcgucgacaccgucuccgucggcaacacccucuacuacgucaacaagcaggagggccagucccucuacgucaagggcgagcccaucaucaacuucuacgacccccucgucuuccccuccgacgaguucgacgccuccaucucccaggucaacgagaagaucaaccagucccucgccuucauccgcaaguccgacgagcuccuccacaacgucaacgccggcaaguccaccaccaacaucaugaucaccaccaucaucaucgucaucaucgucauccuccucucccucaucgccgucggccuccuccucuacugcaaggcccgcugaggacuaguguccaccugucccuccugggcugcuggauugucucguuuuccugccaaauaaacaggaucagcgcuuuacagaucuaaaaaaaaaaaaaaaaaaaaaaaaaaaaaaaaaaaaaaaaaaaaaaaaaaaaaaaaaaaaaaaaugcaucccccccccccccccccccccccccccccccaaaggcucuuuucagagccaccagaauu

SEQ ID NO: 7961 - RNA, 1997 nt, Artificial Sequence
  mRNA product Design b-1 comprising derived and/or modified sequence from HRSV(A2)__F-del_DSCav1_mut8 (opt3)
gggagacggagacggccugcaggaccugcucucucagcccucagccgaggccuacgccgagccgagugcgcagccgacgaccgggaggagccgcagccuucaacucugagguacugugauccgcgcugcccgccgggccgccccaguccgcugcugcggcaccuccuucccucgcgcccucuucgcucgccagcgccuucccugugagccugcgucaccgcggccgccaagcuuaccauggagcugcucauccuuaaggccaacgcuauuaccacaauacugacugcagugacguucugcuuugccagcggccagaauaucaccgaagaguucuaccaauccacauguucugcggucucaaaaggguauuugggagcuuuaagaacugguugguacaccaguguuauuacaaucgaacugagcaacauuaaggagaucaaaugcaauggcaccgacgccaaggugaaacuaauaaagcaggaacucgauaaguauaaaaacgcaguaacugaccugcagcuucugaugcaguccacacccgccaccgggucuggaucggcuaucgcaucaggcguggccgucuguaagguguugcaccucgagggugagguuaauaaaauuaagagcgcucugcugaguacgaacaaagccguggucucccucucugggugcggagugagcguauuaacuuuuaagguucuggaucuuaagaauuacaucgacaaacaauugcugccuauucuaaacaagcaguccuguucaaucccaaauauagaaaccgugauugaguuccagcagaaaaacaauaggcuccuggaaaucacacgggaguuuagugucaacgcgggcgugacuaccccggugagcacauauaugcuuaccaauucugagcuguugucccucauuaacgauaugcccaucacgaaugaccaaaagaaacugaugucaaacaacguccagaucguucgccagcagagcuacaguauuaugugcauaaucaaggaagagguguuagcauauguagugcaacugccucucuacggcgucauugauacuccauguuggaaacuucauacaucuccccugugcaccacuaauacaaaggaaggguccaacaucuguuugacccgaacggaccguggaugguacugcgauaaugccgguagcgugucguucuuuccucaggcugagaccuguaagguucagucuaacagaguguucugcgacacaaugaacucccuaacucugccaucagaagucaaucucugcaauguggauauauuuaaccccaaauaugacuguaagauuaugaccaguaaaacagauguaagcuccucuguuaucacuagccugggcgccaucgugucaugcuacgggaagaccaaauguacagcaaguaauaagugcaggggaauuaucaagaccuucuccaacggcugugacuaugucagcaauaaagguguggacacugucucuguggggaacacgcuuuacuauguuaauaagcaagagggacagucacuguacgugaaaggcgagccuauuauaaacuuuuaugauccauugguauucccgagugacgaauuugaugcuagcaucucccaggucaaugagaagauuaaccagucucucgccuucauccggaaaucggacgaacuguuacacaacgugaaugcgggcaagagcacaaccaacaucaugauuacuaccauaaucauuguuaucauugugauccugcuaucccucauagccgucgggcugcuuuuguacugcaaggcacgcugaggacuaguguccaccugucccuccugggcugcuggauugucucguuuuccugccaaauaaacaggaucagcgcuuuacagaucuaaaaaaaaaaaaaaaaaaaaaaaaaaaaaaaaaaaaaaaaaaaaaaaaaaaaaaaaaaaaaaaaugcaucccccccccccccccccccccccccccccccaaaggcucuuuucagagccaccagaauu

SEQ ID NO: 7962 - RNA, 1997 nt, Artificial Sequence
  mRNA product Design b-1 comprising derived and/or modified sequence from HRSV(A2)__F-del_DSCav1_mut8 (opt4)
gggagacggagacggccugcaggaccugcucucucagcccucagccgaggccuacgccgagccgagugcgcagccgacgaccgggaggagccgcagccuucaacucugagguacugugauccgcgcugcccgccgggccgccccaguccgcugcugcggcaccuccuucccucgcgcccucuucgcucgccagcgccuucccugugagccugcgucaccgcggccgccaagcuuaccauggagcugcugauccugaaggccaacgccaucaccaccauccugaccgccgugaccuucugcuucgccagcggccagaacaucaccgaggaguucuaccagagcaccugcagcgccgugagcaagggcuaccugggcgcccugagaaccggcugguacaccagcgugaucaccaucgagcugagcaacaucaaggagaucaagugcaacggcaccgacgccaaggugaagcugaucaagcaggagcuggacaaguacaagaacgccgugaccgaccugcagcugcugaugcagagcacccccgccaccggcagcggcagcgccaucgccagcggcguggccgugugcaaggugcugcaccuggagggcgaggugaacaagaucaagagcgcccugcugagcaccaacaaggccguggugagccugagcggcugcggcgugagcgugcugaccuucaaggugcuggaccugaagaacuacaucgacaagcagcugcugcccauccugaacaagcagagcugcagcauccccaacaucgagaccgugaucgaguuccagcagaagaacaacagacugcuggagaucaccagagaguucagcgugaacgccggcgugaccacccccgugagcaccuacaugcugaccaacagcgagcugcugagccugaucaacgacaugcccaucaccaacgaccagaagaagcugaugagcaacaacgugcagaucgugagacagcagagcuacagcaucaugugcaucaucaaggaggaggugcuggccuacguggugcagcugccccuguacggcgugaucgacacccccugcuggaagcugcacaccagcccccugugcaccaccaacaccaaggagggcagcaacaucugccugaccagaaccgacagaggcugguacugcgacaacgccggcagcgugagcuucuucccccaggccgagaccugcaaggugcagagcaacagaguguucugcgacaccaugaacagccugacccugcccagcgaggugaaccugugcaacguggacaucuucaaccccaaguacgacugcaagaucaugaccagcaagaccgacgugagcagcagcgugaucaccagccugggcgccaucgugagcugcuacggcaagaccaagugcaccgccagcaacaagugcagaggcaucaucaagaccuucagcaacggcugcgacuacgugagcaacaagggcguggacaccgugagcgugggcaacacccuguacuacgugaacaagcaggagggccagagccuguacgugaagggcgagcccaucaucaacuucuacgacccccugguguuccccagcgacgaguucgacgccagcaucagccaggugaacgagaagaucaaccagagccuggccuucaucagaaagagcgacgagcugcugcacaacgugaacgccggcaagagcaccaccaacaucaugaucaccaccaucaucaucgugaucaucgugauccugcugagccugaucgccgugggccugcugcuguacugcaaggccagaugaggacuaguguccaccugucccuccugggcugcuggauugucucguuuuccugccaaauaaacaggaucagcgcuuuacagaucuaaaaaaaaaaaaaaaaaaaaaaaaaaaaaaaaaaaaaaaaaaaaaaaaaaaaaaaaaaaaaaaaugcaucccccccccccccccccccccccccccccccaaaggcucuuuucagagccaccagaauu

SEQ ID NO: 7963 - RNA, 1997 nt, Artificial Sequence
  mRNA product Design b-1 comprising derived and/or modified sequence from HRSV(A2)__F-del_DSCav1_mut8 (opt5)
gggagacggagacggccugcaggaccugcucucucagcccucagccgaggccuacgccgagccgagugcgcagccgacgaccgggaggagccgcagccuucaacucugagguacugugauccgcgcugcccgccgggccgccccaguccgcugcugcggcaccuccuucccucgcgcccucuucgcucgccagcgccuucccugugagccugcgucaccgcggccgccaagcuuaccauggagcugcucauccugaaggccaacgcuauuaccacaauccuuacggccgugaccuucugcuuugcgagcggccagaauauuacagaagaguucuaccaauccaccuguucugcugucagcaaaggguaucugggagcccucagaacaggcugguacaccuccguuaucacaauugaacugucuaacaucaaggagaucaaaugcaaugggaccgacgccaaggugaaacuuauuaagcaggaacuggauaaguauaaaaacgcugugacggaccuccagcugcugaugcagagcacccccgccacaggauccggcucugcuaucgccagcggggucgcgguguguaagguucuccaccuggagggagaggugaauaaaauuaaguccgcccuucugagcaccaacaaagcugucgugucucucuccggcugcggcguuagcgugcugacauuuaagguccuugaucugaagaauuacaucgacaaacaacuccugccuauucugaacaagcagucuuguuccaucccgaauauugaaaccgugaucgaguuccagcagaaaaacaaucggcuccuggaaaucacgcgcgaguuuagcgugaacgccggggucacaacccccguuucuacauauaugcuuaccaauuccgagcugcucagccugauuaacgauaugccuaucaccaaugaccaaaagaaacuuauguccaacaacgugcagauugugagacagcagucuuacagcaucaugugcauuaucaaggaagagguccuggcuuaugugguucaacucccccuguacggagugaucgauacaccuuguuggaaacugcauacgagcccccucugcaccacaaauaccaaggaaggcagcaacauuugucugacacggaccgaccgcgggugguacugcgauaaugccggaucugucuccuucuuuccucaggcggagacguguaaggugcagagcaacagaguuuucugcgacacaaugaacucucuuacccugccgagcgaagugaaucucugcaaugucgauaucuuuaaccccaaauaugacuguaagauuaugaccuccaaaacagaugugucuagcuccgucaucaccagccugggcgccauugugucuugcuacgggaagacaaaauguacggcuuccaauaagugccggggaaucaucaagaccuucagcaacggcugugacuauguuucuaauaaaggcguggacacagucuccguggggaacacccuuuacuauguuaauaagcaagagggacagagccuguacgugaaaggcgagccuauuaucaacuuuuaugauccccucgucuucccuuccgacgaauuugaugccucuauuagccaggugaaugagaagaucaaccagucccuggcuuucauucgcaaaucugacgaacugcuccacaacgugaaugccgggaaguccacaaccaacaucaugauuacgaccaucaucauuguuaucauugucauccugcuuucccugauugccgugggacuccugcuguacugcaaggcuagaugaggacuaguguccaccugucccuccugggcugcuggauugucucguuuuccugccaaauaaacaggaucagcgcuuuacagaucuaaaaaaaaaaaaaaaaaaaaaaaaaaaaaaaaaaaaaaaaaaaaaaaaaaaaaaaaaaaaaaaaugcaucccccccccccccccccccccccccccccccaaaggcucuuuucagagccaccagaauu

SEQ ID NO: 7964 - RNA, 1997 nt, Artificial Sequence
  mRNA product Design b-1 comprising derived and/or modified sequence from HRSV(A2)__F-del_DSCav1_mut8 (opt6)
gggagacggagacggccugcaggaccugcucucucagcccucagccgaggccuacgccgagccgagugcgcagccgacgaccgggaggagccgcagccuucaacucugagguacugugauccgcgcugcccgccgggccgccccaguccgcugcugcggcaccuccuucccucgcgcccucuucgcucgccagcgccuucccugugagccugcgucaccgcggccgccaagcuuaccauggaacuacucauauugaaagccaacgcaaucacaacaauacuaaccgccguaacauuuugcuucgcgucaggccaaaauauaacagaagaauuuuaccaaucaacaugcuccgccguaucaaaaggauaccuaggugcauuacgaaccgguugguacacaucaguaaucacaauagaacuuuccaacauuaaagaaauaaaaugcaauggcacagacgcaaaagucaaacuaauaaaacaagaacuagacaaauauaaaaacgccgucacagacuuacaacuauuaaugcaaagcacaccagcaacaggauccggaucagcaauagcaucaggaguagccgucuguaaaguacuacaccuagaaggcgaaguuaauaaaauuaaaucagcuuuauuaucaaccaacaaagcaguaguaucacuauccggaugcggagucuccguccuaacauucaaaguacuagaccucaagaauuacauagauaaacaacuacuaccaauacucaacaaacaaucauguucaauaccaaacaucgaaaccgucauagaauuucaacaaaaaaauaauagacucuuagaaauaacacgagaauuuagcguaaacgcaggagucacaaccccugucucaacauacaugcuaaccaauuccgaauuauuaucacucauaaaugacaugccaauaacuaaugaccaaaaaaaacuuaugucaaacaacguacaaauaguaagacaacaaucauauucaauaaugugcauaaucaaagaagaaguuuuagcauauguaguacaacuaccacuauauggcgucauagacacaccaugcuggaaauuacacacaucaccucuaugcacaacaaacacaaaagaaggaagcaacauuugccuaaccagaaccgauagaggaugguacugcgauaacgcaggcucaguaucauucuucccucaagccgaaacuugcaaaguccaaucaaauagagucuucugcgauacaaugaacuccuuaacuuuaccaucagaaguaaaucuaugcaacguagauaucuuuaauccaaaauacgauugcaaaaucaugacaucaaaaacagauguaucaucuaguguaauuaccucccuaggagcaauaguaagcugcuacggaaaaacaaaaugcaccgccucuaacaaaugucguggaauaauaaaaacauucucaaacggaugcgauuauguaucaaauaaaggugucgacaccguaucaguaggcaauacacuauacuauguaaauaaacaagaaggacaaucacucuacgucaaaggugaaccaauaauaaacuucuacgacccacuuguauucccaagcgacgaauuugacgcaucaauaagccaaguaaacgaaaaaauaaaccaaucacuagcauucaucagaaaaucagacgaacuacuccacaauguaaaugcaggaaaaucaacaaccaauaucaugauaacaaccauaauaauagucauaauaguaauacuauuaucccucauagccguuggacuacuccuauauuguaaagcacgauaaggacuaguguccaccugucccuccugggcugcuggauugucucguuuuccugccaaauaaacaggaucagcgcuuuacagaucuaaaaaaaaaaaaaaaaaaaaaaaaaaaaaaaaaaaaaaaaaaaaaaaaaaaaaaaaaaaaaaaaugcaucccccccccccccccccccccccccccccccaaaggcucuuuucagagccaccagaauu

SEQ ID NO: 7965 - RNA, 1997 nt, Artificial Sequence
  mRNA product Design b-1 comprising derived and/or modified sequence from HRSV(A2)__F-del_DSCav1_mut8 (opt11)
gggagacggagacggccugcaggaccugcucucucagcccucagccgaggccuacgccgagccgagugcgcagccgacgaccgggaggagccgcagccuucaacucugagguacugugauccgcgcugcccgccgggccgccccaguccgcugcugcggcaccuccuucccucgcgcccucuucgcucgccagcgccuucccugugagccugcgucaccgcggccgccaagcuuaccauggaacuccucauccucaaagccaacgccaucaccaccauacucaccgcaguaaccuucugcuucgcauccggccaaaacaucacagaagaguucuaccagaguaccugcuccgccgucuccaaaggcuaccuuggcgcccuccguaccgggugguacacauccgucaucacaaucgaacucuccaacaucaaagaaauaaagugcaacggcacagacgccaaaguaaaacugauaaagcaagaacucgacaaauacaaaaacgccguaaccgaccuccagcuacuaaugcaauccacucccgccaccggcagcggauccgccaucgccuccggaguagccgucuguaaagucuuacaccucgaaggcgaagugaacaaaaucaaauccgcccuacucucaaccaacaaagccguaguaucacucuccgggugcggcguuucagugcuaacguucaaaguccuugaccucaaaaacuacaucgacaaacaacuccuccccauccuaaauaaacaauccugcuccauacccaacaucgagacugucaucgaguuccagcagaaaaacaaccgacuccucgaaaucacacgcgaguucucugucaacgccggcgucacaacccccgucuccacauacaugcucaccaacagcgaacuccucucccuaaucaaugacaugcccaucaccaacgaccaaaagaaacucaugucaaacaacguccaaaucguccgccaacaauccuacagcaucaugugcaucaucaaagaagaaguucucgcauacguaguacaacucccccucuacggagugaucgacacccccugcuggaaacuacacaccagcccgcuuugcaccacaaacaccaaggaaggcuccaacaucugccucacucgaaccgaccgcggcugguacugcgacaacgcaggcuccgucaguuucuuuccccaagcagaaacaugcaaaguccaauccaaccgaguauucugcgacaccaugaacucccucacccuaccauccgaaguuaaccuaugcaacguggacaucuucaaccccaaguacgacugcaaaauuaugaccuccaaaaccgacguauccuccagcgucaucaccagccucggagcaauagucuccugcuacggcaagaccaagugcaccgcuuccaacaagugucgcggaaucaucaaaaccuucucaaacggcugcgacuacgucuccaacaaaggcgucgacaccguauccguaggaaacacccuauacuacgucaacaaacaagaaggacaaucccucuaugucaaaggcgaacccaucaucaauuucuacgacccccuagucuucccuuccgacgaguucgacgcguccaucagccaagucaaugaaaagaucaaccagagccuggcauucauccgcaaauccgacgaacuccuccacaacgucaacgcgggaaaauccacgacaaacaucaugaucaccaccaucaucaucgucaucauagucauucuccuuucucucaucgccgugggacuacuucucuacugcaaagcccgauaaggacuaguguccaccugucccuccugggcugcuggauugucucguuuuccugccaaauaaacaggaucagcgcuuuacagaucuaaaaaaaaaaaaaaaaaaaaaaaaaaaaaaaaaaaaaaaaaaaaaaaaaaaaaaaaaaaaaaaaugcaucccccccccccccccccccccccccccccccaaaggcucuuuucagagccaccagaauu

SEQ ID NO: 7966 - RNA, 1817 nt, Artificial Sequence
  mRNA product Design b-2 comprising derived and/or modified sequence from HRSV(A2)__F-del_DSCav1_mut8 (opt1)
gggagagccucugcuggaguccggggaguggcguuggcugcuagagcgaagcuuaccauggagcugcucauccugaaggccaacgccaucaccaccauccugacggcggugaccuucugcuucgccagcggccagaacaucaccgaggaguucuaccaguccacgugcagcgccgucuccaagggguaccucggcgcccugcggaccggcugguacaccuccgugaucaccaucgagcugagcaacaucaaggagaucaagugcaacgggaccgacgccaaggugaagcucaucaagcaggagcuggacaaguacaagaacgcggucacggaccugcagcuccugaugcaguccaccccggcaaccggcuccggcuccgccaucgcgagcggcgucgccgugugcaaggugcugcaccucgagggggaggucaacaagaucaagagcgcccugcuguccaccaacaaggccguggugagccucuccggcugcggcgucagcgugcugaccuucaaggugcuggaccucaagaacuacaucgacaagcagcugcugcccauccugaacaagcagagcugcuccauccccaacaucgagacggugaucgaguuccagcagaagaacaaccggcuccuggagaucacccgcgaguucagcgugaacgccggggucaccacccccguguccacguacaugcugaccaacagcgagcuccugucccugaucaacgacaugccgaucaccaacgaccagaagaagcucaugagcaacaacgugcagaucguccggcagcaguccuacagcaucaugugcaucaucaaggaggaggugcuggcguacgugguccagcugccccucuacggcgugaucgacacccccugcuggaagcugcacacgagcccccugugcaccaccaacaccaaggagggguccaacaucugccucacgcgcaccgaccggggcugguacugcgacaacgccggcagcgucuccuucuucccgcaggccgagaccugcaaggugcagagcaaccgcguguucugcgacaccaugaacucccugacgcugcccagcgagguaaaccucugcaacgucgacaucuucaaccccaaguacgacugcaagaucaugaccuccaagaccgacgugagcuccagcgugaucaccucccugggggccaucgucagcugcuacggcaagacgaagugcaccgccagcaacaagugccgggggaucaucaagaccuucuccaacggcugcgacuacgugagcaacaagggcguggacaccguguccgucgggaacacccuguacuacgugaacaagcaggagggccagagccucuacgugaagggggagcccaucaucaacuucuacgacccgcuggucuuccccuccgacgaguucgacgcgagcaucucccaggugaacgagaagaucaaccagagccuggccuucauccgcaaguccgacgagcugcuccacaacgugaacgccggcaagagcacgaccaacaucaugaucaccaccaucaucaucgucaucaucgugauccugcugucccucaucgccguggggcugcugcucuacugcaaggcccggugaggacuaguguccaccugucccuccugggcugcuggauugucucguuuuccugccaaauaaacaggaucagcgcuuuacagaucuaaaaaaaaaaaaaaaaaaaaaaaaaaaaaaaaaaaaaaaaaaaaaaaaaaaaaaaaaaaaaaaaugcaucccccccccccccccccccccccccccccccaaaggcucuuuucagagccaccagaauu

SEQ ID NO: 7967 - RNA, 1817 nt, Artificial Sequence
  mRNA product Design b-2 comprising derived and/or modified sequence from HRSV(A2)__F-del_DSCav1_mut8 (opt1)
gggagagccucugcuggaguccggggaguggcguuggcugcuagagcgaagcuuaccauggagcugcucauccugaaggccaacgccaucaccaccauccugacggcggugaccuucugcuucgccagcggccagaacaucaccgaggaguucuaccaguccacgugcagcgccgucuccaagggguaccucggcgcccugcgcaccgggugguacaccagcgugaucaccaucgagcuguccaacaucaaggagaucaagugcaacggcaccgacgccaaggugaagcucaucaagcaggagcuggacaaguacaagaacgcggucacggaccugcagcuccugaugcagagcacccccgccaccggguccggcagcgccaucgccuccggcguggcggugugcaagguccugcaccucgagggggaggugaacaagaucaagagcgcccugcuguccaccaacaaggccguggucagccucuccggcugcggggugagcgugcugacguucaagguccuggaccucaagaacuacaucgacaagcagcugcugccgauccucaacaagcaguccugcagcauccccaacaucgagaccgugaucgaguuccagcagaagaacaaccggcugcuggagaucacccgcgaguucuccgugaacgccggcgucaccacgcccgugagcaccuacaugcucaccaacuccgagcugcugagccucaucaacgacaugcccaucaccaacgaccagaagaagcugaugagcaacaacgugcagaucguccggcagcaguccuacagcaucaugugcaucaucaaggaggaggugcuggccuacgugguccagcucccgcuguacggggugaucgacacgcccugcuggaagcugcacaccagcccccucugcaccaccaacacgaaggagggcuccaacaucugccugacccgcaccgaccggggcugguacugcgacaacgcgggguccgugagcuucuucccccaggccgagaccugcaagguccaguccaaccgcguguucugcgacacgaugaacagccugacccucccguccgaggucaaccugugcaacguggacaucuucaaccccaaguacgacugcaagaucaugaccagcaagaccgacguguccagcuccgucaucacgagccugggcgccaucguguccugcuacgggaagaccaagugcaccgccagcaacaagugccggggcaucaucaagaccuucuccaacggcugcgacuacgugagcaacaagggggucgacacgguguccgugggcaacacccucuacuacgucaacaagcaggaggggcagagccuguacgugaagggcgagcccaucaucaacuucuacgacccccugguguucccgagcgacgaguucgacgccuccaucagccaggucaacgagaagaucaaccagucccucgcguucauccgcaagagcgacgagcugcugcacaacgugaacgccgggaaguccaccaccaacaucaugaucaccacgaucaucaucgugaucaucgucauccuccugagccugaucgccgugggccuccugcuguacugcaaggcccggugaggacuaguguccaccugucccuccugggcugcuggauugucucguuuuccugccaaauaaacaggaucagcgcuuuacagaucuaaaaaaaaaaaaaaaaaaaaaaaaaaaaaaaaaaaaaaaaaaaaaaaaaaaaaaaaaaaaaaaaugcaucccccccccccccccccccccccccccccccaaaggcucuuuucagagccaccagaauu

SEQ ID NO: 7968 - RNA, 1817 nt, Artificial Sequence
  mRNA product Design b-2 comprising derived and/or modified sequence from HRSV(A2)__F-del_DSCav1_mut8 (opt2)
gggagagccucugcuggaguccggggaguggcguuggcugcuagagcgaagcuuaccauggagcuccucauccucaaggccaacgccaucaccaccauccucaccgccgucaccuucugcuucgccuccggccagaacaucaccgaggaguucuaccaguccaccugcuccgccgucuccaagggcuaccucggcgcccuccgcaccggcugguacaccuccgucaucaccaucgagcucuccaacaucaaggagaucaagugcaacggcaccgacgccaaggucaagcucaucaagcaggagcucgacaaguacaagaacgccgucaccgaccuccagcuccucaugcaguccacccccgccaccggcuccggcuccgccaucgccuccggcgucgccgucugcaagguccuccaccucgagggcgaggucaacaagaucaaguccgcccuccucuccaccaacaaggccgucgucucccucuccggcugcggcgucuccguccucaccuucaagguccucgaccucaagaacuacaucgacaagcagcuccuccccauccucaacaagcaguccugcuccauccccaacaucgagaccgucaucgaguuccagcagaagaacaaccgccuccucgagaucacccgcgaguucuccgucaacgccggcgucaccacccccgucuccaccuacaugcucaccaacuccgagcuccucucccucaucaacgacaugcccaucaccaacgaccagaagaagcucauguccaacaacguccagaucguccgccagcaguccuacuccaucaugugcaucaucaaggaggagguccucgccuacgucguccagcucccccucuacggcgucaucgacacccccugcuggaagcuccacaccuccccccucugcaccaccaacaccaaggagggcuccaacaucugccucacccgcaccgaccgcggcugguacugcgacaacgccggcuccgucuccuucuucccccaggccgagaccugcaagguccaguccaaccgcgucuucugcgacaccaugaacucccucacccuccccuccgaggucaaccucugcaacgucgacaucuucaaccccaaguacgacugcaagaucaugaccuccaagaccgacgucuccuccuccgucaucaccucccucggcgccaucgucuccugcuacggcaagaccaagugcaccgccuccaacaagugccgcggcaucaucaagaccuucuccaacggcugcgacuacgucuccaacaagggcgucgacaccgucuccgucggcaacacccucuacuacgucaacaagcaggagggccagucccucuacgucaagggcgagcccaucaucaacuucuacgacccccucgucuuccccuccgacgaguucgacgccuccaucucccaggucaacgagaagaucaaccagucccucgccuucauccgcaaguccgacgagcuccuccacaacgucaacgccggcaaguccaccaccaacaucaugaucaccaccaucaucaucgucaucaucgucauccuccucucccucaucgccgucggccuccuccucuacugcaaggcccgcugaggacuaguguccaccugucccuccugggcugcuggauugucucguuuuccugccaaauaaacaggaucagcgcuuuacagaucuaaaaaaaaaaaaaaaaaaaaaaaaaaaaaaaaaaaaaaaaaaaaaaaaaaaaaaaaaaaaaaaaugcaucccccccccccccccccccccccccccccccaaaggcucuuuucagagccaccagaauu

SEQ ID NO: 7969 - RNA, 1817 nt, Artificial Sequence
  mRNA product Design b-2 comprising derived and/or modified sequence from HRSV(A2)__F-del_DSCav1_mut8 (opt3)
gggagagccucugcuggaguccggggaguggcguuggcugcuagagcgaagcuuaccauggagcugcucauccuuaaggccaacgcuauuaccacaauacugacugcagugacguucugcuuugccagcggccagaauaucaccgaagaguucuaccaauccacauguucugcggucucaaaaggguauuugggagcuuuaagaacugguugguacaccaguguuauuacaaucgaacugagcaacauuaaggagaucaaaugcaauggcaccgacgccaaggugaaacuaauaaagcaggaacucgauaaguauaaaaacgcaguaacugaccugcagcuucugaugcaguccacacccgccaccgggucuggaucggcuaucgcaucaggcguggccgucuguaagguguugcaccucgagggugagguuaauaaaauuaagagcgcucugcugaguacgaacaaagccguggucucccucucugggugcggagugagcguauuaacuuuuaagguucuggaucuuaagaauuacaucgacaaacaauugcugccuauucuaaacaagcaguccuguucaaucccaaauauagaaaccgugauugaguuccagcagaaaaacaauaggcuccuggaaaucacacgggaguuuagugucaacgcgggcgugacuaccccggugagcacauauaugcuuaccaauucugagcuguugucccucauuaacgauaugcccaucacgaaugaccaaaagaaacugaugucaaacaacguccagaucguucgccagcagagcuacaguauuaugugcauaaucaaggaagagguguuagcauauguagugcaacugccucucuacggcgucauugauacuccauguuggaaacuucauacaucuccccugugcaccacuaauacaaaggaaggguccaacaucuguuugacccgaacggaccguggaugguacugcgauaaugccgguagcgugucguucuuuccucaggcugagaccuguaagguucagucuaacagaguguucugcgacacaaugaacucccuaacucugccaucagaagucaaucucugcaauguggauauauuuaaccccaaauaugacuguaagauuaugaccaguaaaacagauguaagcuccucuguuaucacuagccugggcgccaucgugucaugcuacgggaagaccaaauguacagcaaguaauaagugcaggggaauuaucaagaccuucuccaacggcugugacuaugucagcaauaaagguguggacacugucucuguggggaacacgcuuuacuauguuaauaagcaagagggacagucacuguacgugaaaggcgagccuauuauaaacuuuuaugauccauugguauucccgagugacgaauuugaugcuagcaucucccaggucaaugagaagauuaaccagucucucgccuucauccggaaaucggacgaacuguuacacaacgugaaugcgggcaagagcacaaccaacaucaugauuacuaccauaaucauuguuaucauugugauccugcuaucccucauagccgucgggcugcuuuuguacugcaaggcacgcugaggacuaguguccaccugucccuccugggcugcuggauugucucguuuuccugccaaauaaacaggaucagcgcuuuacagaucuaaaaaaaaaaaaaaaaaaaaaaaaaaaaaaaaaaaaaaaaaaaaaaaaaaaaaaaaaaaaaaaaugcaucccccccccccccccccccccccccccccccaaaggcucuuuucagagccaccagaauu

SEQ ID NO: 7970 - RNA, 1817 nt, Artificial Sequence
  mRNA product Design b-2 comprising derived and/or modified sequence from HRSV(A2)__F-del_DSCav1_mut8 (opt4)
gggagagccucugcuggaguccggggaguggcguuggcugcuagagcgaagcuuaccauggagcugcugauccugaaggccaacgccaucaccaccauccugaccgccgugaccuucugcuucgccagcggccagaacaucaccgaggaguucuaccagagcaccugcagcgccgugagcaagggcuaccugggcgcccugagaaccggcugguacaccagcgugaucaccaucgagcugagcaacaucaaggagaucaagugcaacggcaccgacgccaaggugaagcugaucaagcaggagcuggacaaguacaagaacgccgugaccgaccugcagcugcugaugcagagcacccccgccaccggcagcggcagcgccaucgccagcggcguggccgugugcaaggugcugcaccuggagggcgaggugaacaagaucaagagcgcccugcugagcaccaacaaggccguggugagccugagcggcugcggcgugagcgugcugaccuucaaggugcuggaccugaagaacuacaucgacaagcagcugcugcccauccugaacaagcagagcugcagcauccccaacaucgagaccgugaucgaguuccagcagaagaacaacagacugcuggagaucaccagagaguucagcgugaacgccggcgugaccacccccgugagcaccuacaugcugaccaacagcgagcugcugagccugaucaacgacaugcccaucaccaacgaccagaagaagcugaugagcaacaacgugcagaucgugagacagcagagcuacagcaucaugugcaucaucaaggaggaggugcuggccuacguggugcagcugccccuguacggcgugaucgacacccccugcuggaagcugcacaccagcccccugugcaccaccaacaccaaggagggcagcaacaucugccugaccagaaccgacagaggcugguacugcgacaacgccggcagcgugagcuucuucccccaggccgagaccugcaaggugcagagcaacagaguguucugcgacaccaugaacagccugacccugcccagcgaggugaaccugugcaacguggacaucuucaaccccaaguacgacugcaagaucaugaccagcaagaccgacgugagcagcagcgugaucaccagccugggcgccaucgugagcugcuacggcaagaccaagugcaccgccagcaacaagugcagaggcaucaucaagaccuucagcaacggcugcgacuacgugagcaacaagggcguggacaccgugagcgugggcaacacccuguacuacgugaacaagcaggagggccagagccuguacgugaagggcgagcccaucaucaacuucuacgacccccugguguuccccagcgacgaguucgacgccagcaucagccaggugaacgagaagaucaaccagagccuggccuucaucagaaagagcgacgagcugcugcacaacgugaacgccggcaagagcaccaccaacaucaugaucaccaccaucaucaucgugaucaucgugauccugcugagccugaucgccgugggccugcugcuguacugcaaggccagaugaggacuaguguccaccugucccuccugggcugcuggauugucucguuuuccugccaaauaaacaggaucagcgcuuuacagaucuaaaaaaaaaaaaaaaaaaaaaaaaaaaaaaaaaaaaaaaaaaaaaaaaaaaaaaaaaaaaaaaaugcaucccccccccccccccccccccccccccccccaaaggcucuuuucagagccaccagaauu

SEQ ID NO: 7971 - RNA, 1817 nt, Artificial Sequence
  mRNA product Design b-2 comprising derived and/or modified sequence from HRSV(A2)__F-del_DSCav1_mut8 (opt5)
gggagagccucugcuggaguccggggaguggcguuggcugcuagagcgaagcuuaccauggagcugcucauccugaaggccaacgcuauuaccacaauccuuacggccgugaccuucugcuuugcgagcggccagaauauuacagaagaguucuaccaauccaccuguucugcugucagcaaaggguaucugggagcccucagaacaggcugguacaccuccguuaucacaauugaacugucuaacaucaaggagaucaaaugcaaugggaccgacgccaaggugaaacuuauuaagcaggaacuggauaaguauaaaaacgcugugacggaccuccagcugcugaugcagagcacccccgccacaggauccggcucugcuaucgccagcggggucgcgguguguaagguucuccaccuggagggagaggugaauaaaauuaaguccgcccuucugagcaccaacaaagcugucgugucucucuccggcugcggcguuagcgugcugacauuuaagguccuugaucugaagaauuacaucgacaaacaacuccugccuauucugaacaagcagucuuguuccaucccgaauauugaaaccgugaucgaguuccagcagaaaaacaaucggcuccuggaaaucacgcgcgaguuuagcgugaacgccggggucacaacccccguuucuacauauaugcuuaccaauuccgagcugcucagccugauuaacgauaugccuaucaccaaugaccaaaagaaacuuauguccaacaacgugcagauugugagacagcagucuuacagcaucaugugcauuaucaaggaagagguccuggcuuaugugguucaacucccccuguacggagugaucgauacaccuuguuggaaacugcauacgagcccccucugcaccacaaauaccaaggaaggcagcaacauuugucugacacggaccgaccgcgggugguacugcgauaaugccggaucugucuccuucuuuccucaggcggagacguguaaggugcagagcaacagaguuuucugcgacacaaugaacucucuuacccugccgagcgaagugaaucucugcaaugucgauaucuuuaaccccaaauaugacuguaagauuaugaccuccaaaacagaugugucuagcuccgucaucaccagccugggcgccauugugucuugcuacgggaagacaaaauguacggcuuccaauaagugccggggaaucaucaagaccuucagcaacggcugugacuauguuucuaauaaaggcguggacacagucuccguggggaacacccuuuacuauguuaauaagcaagagggacagagccuguacgugaaaggcgagccuauuaucaacuuuuaugauccccucgucuucccuuccgacgaauuugaugccucuauuagccaggugaaugagaagaucaaccagucccuggcuuucauucgcaaaucugacgaacugcuccacaacgugaaugccgggaaguccacaaccaacaucaugauuacgaccaucaucauuguuaucauugucauccugcuuucccugauugccgugggacuccugcuguacugcaaggcuagaugaggacuaguguccaccugucccuccugggcugcuggauugucucguuuuccugccaaauaaacaggaucagcgcuuuacagaucuaaaaaaaaaaaaaaaaaaaaaaaaaaaaaaaaaaaaaaaaaaaaaaaaaaaaaaaaaaaaaaaaugcaucccccccccccccccccccccccccccccccaaaggcucuuuucagagccaccagaauu

SEQ ID NO: 7972 - RNA, 1817 nt, Artificial Sequence
  mRNA product Design b-2 comprising derived and/or modified sequence from HRSV(A2)__F-del_DSCav1_mut8 (opt6)
gggagagccucugcuggaguccggggaguggcguuggcugcuagagcgaagcuuaccauggaacuacucauauugaaagccaacgcaaucacaacaauacuaaccgccguaacauuuugcuucgcgucaggccaaaauauaacagaagaauuuuaccaaucaacaugcuccgccguaucaaaaggauaccuaggugcauuacgaaccgguugguacacaucaguaaucacaauagaacuuuccaacauuaaagaaauaaaaugcaauggcacagacgcaaaagucaaacuaauaaaacaagaacuagacaaauauaaaaacgccgucacagacuuacaacuauuaaugcaaagcacaccagcaacaggauccggaucagcaauagcaucaggaguagccgucuguaaaguacuacaccuagaaggcgaaguuaauaaaauuaaaucagcuuuauuaucaaccaacaaagcaguaguaucacuauccggaugcggagucuccguccuaacauucaaaguacuagaccucaagaauuacauagauaaacaacuacuaccaauacucaacaaacaaucauguucaauaccaaacaucgaaaccgucauagaauuucaacaaaaaaauaauagacucuuagaaauaacacgagaauuuagcguaaacgcaggagucacaaccccugucucaacauacaugcuaaccaauuccgaauuauuaucacucauaaaugacaugccaauaacuaaugaccaaaaaaaacuuaugucaaacaacguacaaauaguaagacaacaaucauauucaauaaugugcauaaucaaagaagaaguuuuagcauauguaguacaacuaccacuauauggcgucauagacacaccaugcuggaaauuacacacaucaccucuaugcacaacaaacacaaaagaaggaagcaacauuugccuaaccagaaccgauagaggaugguacugcgauaacgcaggcucaguaucauucuucccucaagccgaaacuugcaaaguccaaucaaauagagucuucugcgauacaaugaacuccuuaacuuuaccaucagaaguaaaucuaugcaacguagauaucuuuaauccaaaauacgauugcaaaaucaugacaucaaaaacagauguaucaucuaguguaauuaccucccuaggagcaauaguaagcugcuacggaaaaacaaaaugcaccgccucuaacaaaugucguggaauaauaaaaacauucucaaacggaugcgauuauguaucaaauaaaggugucgacaccguaucaguaggcaauacacuauacuauguaaauaaacaagaaggacaaucacucuacgucaaaggugaaccaauaauaaacuucuacgacccacuuguauucccaagcgacgaauuugacgcaucaauaagccaaguaaacgaaaaaauaaaccaaucacuagcauucaucagaaaaucagacgaacuacuccacaauguaaaugcaggaaaaucaacaaccaauaucaugauaacaaccauaauaauagucauaauaguaauacuauuaucccucauagccguuggacuacuccuauauuguaaagcacgauaaggacuaguguccaccugucccuccugggcugcuggauugucucguuuuccugccaaauaaacaggaucagcgcuuuacagaucuaaaaaaaaaaaaaaaaaaaaaaaaaaaaaaaaaaaaaaaaaaaaaaaaaaaaaaaaaaaaaaaaugcaucccccccccccccccccccccccccccccccaaaggcucuuuucagagccaccagaauu

SEQ ID NO: 7973 - RNA, 1817 nt, Artificial Sequence
  mRNA product Design b-2 comprising derived and/or modified sequence from HRSV(A2)__F-del_DSCav1_mut8 (opt11)
gggagagccucugcuggaguccggggaguggcguuggcugcuagagcgaagcuuaccauggaacuccucauccucaaagccaacgccaucaccaccauacucaccgcaguaaccuucugcuucgcauccggccaaaacaucacagaagaguucuaccagaguaccugcuccgccgucuccaaaggcuaccuuggcgcccuccguaccgggugguacacauccgucaucacaaucgaacucuccaacaucaaagaaauaaagugcaacggcacagacgccaaaguaaaacugauaaagcaagaacucgacaaauacaaaaacgccguaaccgaccuccagcuacuaaugcaauccacucccgccaccggcagcggauccgccaucgccuccggaguagccgucuguaaagucuuacaccucgaaggcgaagugaacaaaaucaaauccgcccuacucucaaccaacaaagccguaguaucacucuccgggugcggcguuucagugcuaacguucaaaguccuugaccucaaaaacuacaucgacaaacaacuccuccccauccuaaauaaacaauccugcuccauacccaacaucgagacugucaucgaguuccagcagaaaaacaaccgacuccucgaaaucacacgcgaguucucugucaacgccggcgucacaacccccgucuccacauacaugcucaccaacagcgaacuccucucccuaaucaaugacaugcccaucaccaacgaccaaaagaaacucaugucaaacaacguccaaaucguccgccaacaauccuacagcaucaugugcaucaucaaagaagaaguucucgcauacguaguacaacucccccucuacggagugaucgacacccccugcuggaaacuacacaccagcccgcuuugcaccacaaacaccaaggaaggcuccaacaucugccucacucgaaccgaccgcggcugguacugcgacaacgcaggcuccgucaguuucuuuccccaagcagaaacaugcaaaguccaauccaaccgaguauucugcgacaccaugaacucccucacccuaccauccgaaguuaaccuaugcaacguggacaucuucaaccccaaguacgacugcaaaauuaugaccuccaaaaccgacguauccuccagcgucaucaccagccucggagcaauagucuccugcuacggcaagaccaagugcaccgcuuccaacaagugucgcggaaucaucaaaaccuucucaaacggcugcgacuacgucuccaacaaaggcgucgacaccguauccguaggaaacacccuauacuacgucaacaaacaagaaggacaaucccucuaugucaaaggcgaacccaucaucaauuucuacgacccccuagucuucccuuccgacgaguucgacgcguccaucagccaagucaaugaaaagaucaaccagagccuggcauucauccgcaaauccgacgaacuccuccacaacgucaacgcgggaaaauccacgacaaacaucaugaucaccaccaucaucaucgucaucauagucauucuccuuucucucaucgccgugggacuacuucucuacugcaaagcccgauaaggacuaguguccaccugucccuccugggcugcuggauugucucguuuuccugccaaauaaacaggaucagcgcuuuacagaucuaaaaaaaaaaaaaaaaaaaaaaaaaaaaaaaaaaaaaaaaaaaaaaaaaaaaaaaaaaaaaaaaugcaucccccccccccccccccccccccccccccccaaaggcucuuuucagagccaccagaauu

SEQ ID NO: 7974 - RNA, 1837 nt, Artificial Sequence
  mRNA product Design b-3 comprising derived and/or modified sequence from HRSV(A2)__F-del_DSCav1_mut8 (opt1)
gggagagucccgcagucggcguccagcggcucugcuuguucgugugugugucguugcaggccuuauucaagcuuaccauggagcugcucauccugaaggccaacgccaucaccaccauccugacggcggugaccuucugcuucgccagcggccagaacaucaccgaggaguucuaccaguccacgugcagcgccgucuccaagggguaccucggcgcccugcggaccggcugguacaccuccgugaucaccaucgagcugagcaacaucaaggagaucaagugcaacgggaccgacgccaaggugaagcucaucaagcaggagcuggacaaguacaagaacgcggucacggaccugcagcuccugaugcaguccaccccggcaaccggcuccggcuccgccaucgcgagcggcgucgccgugugcaaggugcugcaccucgagggggaggucaacaagaucaagagcgcccugcuguccaccaacaaggccguggugagccucuccggcugcggcgucagcgugcugaccuucaaggugcuggaccucaagaacuacaucgacaagcagcugcugcccauccugaacaagcagagcugcuccauccccaacaucgagacggugaucgaguuccagcagaagaacaaccggcuccuggagaucacccgcgaguucagcgugaacgccggggucaccacccccguguccacguacaugcugaccaacagcgagcuccugucccugaucaacgacaugccgaucaccaacgaccagaagaagcucaugagcaacaacgugcagaucguccggcagcaguccuacagcaucaugugcaucaucaaggaggaggugcuggcguacgugguccagcugccccucuacggcgugaucgacacccccugcuggaagcugcacacgagcccccugugcaccaccaacaccaaggagggguccaacaucugccucacgcgcaccgaccggggcugguacugcgacaacgccggcagcgucuccuucuucccgcaggccgagaccugcaaggugcagagcaaccgcguguucugcgacaccaugaacucccugacgcugcccagcgagguaaaccucugcaacgucgacaucuucaaccccaaguacgacugcaagaucaugaccuccaagaccgacgugagcuccagcgugaucaccucccugggggccaucgucagcugcuacggcaagacgaagugcaccgccagcaacaagugccgggggaucaucaagaccuucuccaacggcugcgacuacgugagcaacaagggcguggacaccguguccgucgggaacacccuguacuacgugaacaagcaggagggccagagccucuacgugaagggggagcccaucaucaacuucuacgacccgcuggucuuccccuccgacgaguucgacgcgagcaucucccaggugaacgagaagaucaaccagagccuggccuucauccgcaaguccgacgagcugcuccacaacgugaacgccggcaagagcacgaccaacaucaugaucaccaccaucaucaucgucaucaucgugauccugcugucccucaucgccguggggcugcugcucuacugcaaggcccggugaggacuaguguccaccugucccuccugggcugcuggauugucucguuuuccugccaaauaaacaggaucagcgcuuuacagaucuaaaaaaaaaaaaaaaaaaaaaaaaaaaaaaaaaaaaaaaaaaaaaaaaaaaaaaaaaaaaaaaaugcaucccccccccccccccccccccccccccccccaaaggcucuuuucagagccaccagaauu

SEQ ID NO: 7975 - RNA, 1837 nt, Artificial Sequence
  mRNA product Design b-3 comprising derived and/or modified sequence from HRSV(A2)__F-del_DSCav1_mut8 (opt1)
gggagagucccgcagucggcguccagcggcucugcuuguucgugugugugucguugcaggccuuauucaagcuuaccauggagcugcucauccugaaggccaacgccaucaccaccauccugacggcggugaccuucugcuucgccagcggccagaacaucaccgaggaguucuaccaguccacgugcagcgccgucuccaagggguaccucggcgcccugcgcaccgggugguacaccagcgugaucaccaucgagcuguccaacaucaaggagaucaagugcaacggcaccgacgccaaggugaagcucaucaagcaggagcuggacaaguacaagaacgcggucacggaccugcagcuccugaugcagagcacccccgccaccggguccggcagcgccaucgccuccggcguggcggugugcaagguccugcaccucgagggggaggugaacaagaucaagagcgcccugcuguccaccaacaaggccguggucagccucuccggcugcggggugagcgugcugacguucaagguccuggaccucaagaacuacaucgacaagcagcugcugccgauccucaacaagcaguccugcagcauccccaacaucgagaccgugaucgaguuccagcagaagaacaaccggcugcuggagaucacccgcgaguucuccgugaacgccggcgucaccacgcccgugagcaccuacaugcucaccaacuccgagcugcugagccucaucaacgacaugcccaucaccaacgaccagaagaagcugaugagcaacaacgugcagaucguccggcagcaguccuacagcaucaugugcaucaucaaggaggaggugcuggccuacgugguccagcucccgcuguacggggugaucgacacgcccugcuggaagcugcacaccagcccccucugcaccaccaacacgaaggagggcuccaacaucugccugacccgcaccgaccggggcugguacugcgacaacgcgggguccgugagcuucuucccccaggccgagaccugcaagguccaguccaaccgcguguucugcgacacgaugaacagccugacccucccguccgaggucaaccugugcaacguggacaucuucaaccccaaguacgacugcaagaucaugaccagcaagaccgacguguccagcuccgucaucacgagccugggcgccaucguguccugcuacgggaagaccaagugcaccgccagcaacaagugccggggcaucaucaagaccuucuccaacggcugcgacuacgugagcaacaagggggucgacacgguguccgugggcaacacccucuacuacgucaacaagcaggaggggcagagccuguacgugaagggcgagcccaucaucaacuucuacgacccccugguguucccgagcgacgaguucgacgccuccaucagccaggucaacgagaagaucaaccagucccucgcguucauccgcaagagcgacgagcugcugcacaacgugaacgccgggaaguccaccaccaacaucaugaucaccacgaucaucaucgugaucaucgucauccuccugagccugaucgccgugggccuccugcuguacugcaaggcccggugaggacuaguguccaccugucccuccugggcugcuggauugucucguuuuccugccaaauaaacaggaucagcgcuuuacagaucuaaaaaaaaaaaaaaaaaaaaaaaaaaaaaaaaaaaaaaaaaaaaaaaaaaaaaaaaaaaaaaaaugcaucccccccccccccccccccccccccccccccaaaggcucuuuucagagccaccagaauu

SEQ ID NO: 7976 - RNA, 1837 nt, Artificial Sequence
  mRNA product Design b-3 comprising derived and/or modified sequence from HRSV(A2)__F-del_DSCav1_mut8 (opt2)
gggagagucccgcagucggcguccagcggcucugcuuguucgugugugugucguugcaggccuuauucaagcuuaccauggagcuccucauccucaaggccaacgccaucaccaccauccucaccgccgucaccuucugcuucgccuccggccagaacaucaccgaggaguucuaccaguccaccugcuccgccgucuccaagggcuaccucggcgcccuccgcaccggcugguacaccuccgucaucaccaucgagcucuccaacaucaaggagaucaagugcaacggcaccgacgccaaggucaagcucaucaagcaggagcucgacaaguacaagaacgccgucaccgaccuccagcuccucaugcaguccacccccgccaccggcuccggcuccgccaucgccuccggcgucgccgucugcaagguccuccaccucgagggcgaggucaacaagaucaaguccgcccuccucuccaccaacaaggccgucgucucccucuccggcugcggcgucuccguccucaccuucaagguccucgaccucaagaacuacaucgacaagcagcuccuccccauccucaacaagcaguccugcuccauccccaacaucgagaccgucaucgaguuccagcagaagaacaaccgccuccucgagaucacccgcgaguucuccgucaacgccggcgucaccacccccgucuccaccuacaugcucaccaacuccgagcuccucucccucaucaacgacaugcccaucaccaacgaccagaagaagcucauguccaacaacguccagaucguccgccagcaguccuacuccaucaugugcaucaucaaggaggagguccucgccuacgucguccagcucccccucuacggcgucaucgacacccccugcuggaagcuccacaccuccccccucugcaccaccaacaccaaggagggcuccaacaucugccucacccgcaccgaccgcggcugguacugcgacaacgccggcuccgucuccuucuucccccaggccgagaccugcaagguccaguccaaccgcgucuucugcgacaccaugaacucccucacccuccccuccgaggucaaccucugcaacgucgacaucuucaaccccaaguacgacugcaagaucaugaccuccaagaccgacgucuccuccuccgucaucaccucccucggcgccaucgucuccugcuacggcaagaccaagugcaccgccuccaacaagugccgcggcaucaucaagaccuucuccaacggcugcgacuacgucuccaacaagggcgucgacaccgucuccgucggcaacacccucuacuacgucaacaagcaggagggccagucccucuacgucaagggcgagcccaucaucaacuucuacgacccccucgucuuccccuccgacgaguucgacgccuccaucucccaggucaacgagaagaucaaccagucccucgccuucauccgcaaguccgacgagcuccuccacaacgucaacgccggcaaguccaccaccaacaucaugaucaccaccaucaucaucgucaucaucgucauccuccucucccucaucgccgucggccuccuccucuacugcaaggcccgcugaggacuaguguccaccugucccuccugggcugcuggauugucucguuuuccugccaaauaaacaggaucagcgcuuuacagaucuaaaaaaaaaaaaaaaaaaaaaaaaaaaaaaaaaaaaaaaaaaaaaaaaaaaaaaaaaaaaaaaaugcaucccccccccccccccccccccccccccccccaaaggcucuuuucagagccaccagaauu

SEQ ID NO: 7977 - RNA, 1837 nt, Artificial Sequence
  mRNA product Design b-3 comprising derived and/or modified sequence from HRSV(A2)__F-del_DSCav1_mut8 (opt3)
gggagagucccgcagucggcguccagcggcucugcuuguucgugugugugucguugcaggccuuauucaagcuuaccauggagcugcucauccuuaaggccaacgcuauuaccacaauacugacugcagugacguucugcuuugccagcggccagaauaucaccgaagaguucuaccaauccacauguucugcggucucaaaaggguauuugggagcuuuaagaacugguugguacaccaguguuauuacaaucgaacugagcaacauuaaggagaucaaaugcaauggcaccgacgccaaggugaaacuaauaaagcaggaacucgauaaguauaaaaacgcaguaacugaccugcagcuucugaugcaguccacacccgccaccgggucuggaucggcuaucgcaucaggcguggccgucuguaagguguugcaccucgagggugagguuaauaaaauuaagagcgcucugcugaguacgaacaaagccguggucucccucucugggugcggagugagcguauuaacuuuuaagguucuggaucuuaagaauuacaucgacaaacaauugcugccuauucuaaacaagcaguccuguucaaucccaaauauagaaaccgugauugaguuccagcagaaaaacaauaggcuccuggaaaucacacgggaguuuagugucaacgcgggcgugacuaccccggugagcacauauaugcuuaccaauucugagcuguugucccucauuaacgauaugcccaucacgaaugaccaaaagaaacugaugucaaacaacguccagaucguucgccagcagagcuacaguauuaugugcauaaucaaggaagagguguuagcauauguagugcaacugccucucuacggcgucauugauacuccauguuggaaacuucauacaucuccccugugcaccacuaauacaaaggaaggguccaacaucuguuugacccgaacggaccguggaugguacugcgauaaugccgguagcgugucguucuuuccucaggcugagaccuguaagguucagucuaacagaguguucugcgacacaaugaacucccuaacucugccaucagaagucaaucucugcaauguggauauauuuaaccccaaauaugacuguaagauuaugaccaguaaaacagauguaagcuccucuguuaucacuagccugggcgccaucgugucaugcuacgggaagaccaaauguacagcaaguaauaagugcaggggaauuaucaagaccuucuccaacggcugugacuaugucagcaauaaagguguggacacugucucuguggggaacacgcuuuacuauguuaauaagcaagagggacagucacuguacgugaaaggcgagccuauuauaaacuuuuaugauccauugguauucccgagugacgaauuugaugcuagcaucucccaggucaaugagaagauuaaccagucucucgccuucauccggaaaucggacgaacuguuacacaacgugaaugcgggcaagagcacaaccaacaucaugauuacuaccauaaucauuguuaucauugugauccugcuaucccucauagccgucgggcugcuuuuguacugcaaggcacgcugaggacuaguguccaccugucccuccugggcugcuggauugucucguuuuccugccaaauaaacaggaucagcgcuuuacagaucuaaaaaaaaaaaaaaaaaaaaaaaaaaaaaaaaaaaaaaaaaaaaaaaaaaaaaaaaaaaaaaaaugcaucccccccccccccccccccccccccccccccaaaggcucuuuucagagccaccagaauu

SEQ ID NO: 7978 - RNA, 1837 nt, Artificial Sequence
  mRNA product Design b-3 comprising derived and/or modified sequence from HRSV(A2)__F-del_DSCav1_mut8 (opt4)
gggagagucccgcagucggcguccagcggcucugcuuguucgugugugugucguugcaggccuuauucaagcuuaccauggagcugcugauccugaaggccaacgccaucaccaccauccugaccgccgugaccuucugcuucgccagcggccagaacaucaccgaggaguucuaccagagcaccugcagcgccgugagcaagggcuaccugggcgcccugagaaccggcugguacaccagcgugaucaccaucgagcugagcaacaucaaggagaucaagugcaacggcaccgacgccaaggugaagcugaucaagcaggagcuggacaaguacaagaacgccgugaccgaccugcagcugcugaugcagagcacccccgccaccggcagcggcagcgccaucgccagcggcguggccgugugcaaggugcugcaccuggagggcgaggugaacaagaucaagagcgcccugcugagcaccaacaaggccguggugagccugagcggcugcggcgugagcgugcugaccuucaaggugcuggaccugaagaacuacaucgacaagcagcugcugcccauccugaacaagcagagcugcagcauccccaacaucgagaccgugaucgaguuccagcagaagaacaacagacugcuggagaucaccagagaguucagcgugaacgccggcgugaccacccccgugagcaccuacaugcugaccaacagcgagcugcugagccugaucaacgacaugcccaucaccaacgaccagaagaagcugaugagcaacaacgugcagaucgugagacagcagagcuacagcaucaugugcaucaucaaggaggaggugcuggccuacguggugcagcugccccuguacggcgugaucgacacccccugcuggaagcugcacaccagcccccugugcaccaccaacaccaaggagggcagcaacaucugccugaccagaaccgacagaggcugguacugcgacaacgccggcagcgugagcuucuucccccaggccgagaccugcaaggugcagagcaacagaguguucugcgacaccaugaacagccugacccugcccagcgaggugaaccugugcaacguggacaucuucaaccccaaguacgacugcaagaucaugaccagcaagaccgacgugagcagcagcgugaucaccagccugggcgccaucgugagcugcuacggcaagaccaagugcaccgccagcaacaagugcagaggcaucaucaagaccuucagcaacggcugcgacuacgugagcaacaagggcguggacaccgugagcgugggcaacacccuguacuacgugaacaagcaggagggccagagccuguacgugaagggcgagcccaucaucaacuucuacgacccccugguguuccccagcgacgaguucgacgccagcaucagccaggugaacgagaagaucaaccagagccuggccuucaucagaaagagcgacgagcugcugcacaacgugaacgccggcaagagcaccaccaacaucaugaucaccaccaucaucaucgugaucaucgugauccugcugagccugaucgccgugggccugcugcuguacugcaaggccagaugaggacuaguguccaccugucccuccugggcugcuggauugucucguuuuccugccaaauaaacaggaucagcgcuuuacagaucuaaaaaaaaaaaaaaaaaaaaaaaaaaaaaaaaaaaaaaaaaaaaaaaaaaaaaaaaaaaaaaaaugcaucccccccccccccccccccccccccccccccaaaggcucuuuucagagccaccagaauu

SEQ ID NO: 7979 - RNA, 1837 nt, Artificial Sequence
  mRNA product Design b-3 comprising derived and/or modified sequence from HRSV(A2)__F-del_DSCav1_mut8 (opt5)
gggagagucccgcagucggcguccagcggcucugcuuguucgugugugugucguugcaggccuuauucaagcuuaccauggagcugcucauccugaaggccaacgcuauuaccacaauccuuacggccgugaccuucugcuuugcgagcggccagaauauuacagaagaguucuaccaauccaccuguucugcugucagcaaaggguaucugggagcccucagaacaggcugguacaccuccguuaucacaauugaacugucuaacaucaaggagaucaaaugcaaugggaccgacgccaaggugaaacuuauuaagcaggaacuggauaaguauaaaaacgcugugacggaccuccagcugcugaugcagagcacccccgccacaggauccggcucugcuaucgccagcggggucgcgguguguaagguucuccaccuggagggagaggugaauaaaauuaaguccgcccuucugagcaccaacaaagcugucgugucucucuccggcugcggcguuagcgugcugacauuuaagguccuugaucugaagaauuacaucgacaaacaacuccugccuauucugaacaagcagucuuguuccaucccgaauauugaaaccgugaucgaguuccagcagaaaaacaaucggcuccuggaaaucacgcgcgaguuuagcgugaacgccggggucacaacccccguuucuacauauaugcuuaccaauuccgagcugcucagccugauuaacgauaugccuaucaccaaugaccaaaagaaacuuauguccaacaacgugcagauugugagacagcagucuuacagcaucaugugcauuaucaaggaagagguccuggcuuaugugguucaacucccccuguacggagugaucgauacaccuuguuggaaacugcauacgagcccccucugcaccacaaauaccaaggaaggcagcaacauuugucugacacggaccgaccgcgggugguacugcgauaaugccggaucugucuccuucuuuccucaggcggagacguguaaggugcagagcaacagaguuuucugcgacacaaugaacucucuuacccugccgagcgaagugaaucucugcaaugucgauaucuuuaaccccaaauaugacuguaagauuaugaccuccaaaacagaugugucuagcuccgucaucaccagccugggcgccauugugucuugcuacgggaagacaaaauguacggcuuccaauaagugccggggaaucaucaagaccuucagcaacggcugugacuauguuucuaauaaaggcguggacacagucuccguggggaacacccuuuacuauguuaauaagcaagagggacagagccuguacgugaaaggcgagccuauuaucaacuuuuaugauccccucgucuucccuuccgacgaauuugaugccucuauuagccaggugaaugagaagaucaaccagucccuggcuuucauucgcaaaucugacgaacugcuccacaacgugaaugccgggaaguccacaaccaacaucaugauuacgaccaucaucauuguuaucauugucauccugcuuucccugauugccgugggacuccugcuguacugcaaggcuagaugaggacuaguguccaccugucccuccugggcugcuggauugucucguuuuccugccaaauaaacaggaucagcgcuuuacagaucuaaaaaaaaaaaaaaaaaaaaaaaaaaaaaaaaaaaaaaaaaaaaaaaaaaaaaaaaaaaaaaaaugcaucccccccccccccccccccccccccccccccaaaggcucuuuucagagccaccagaauu

SEQ ID NO: 7980 - RNA, 1837 nt, Artificial Sequence
  mRNA product Design b-3 comprising derived and/or modified sequence from HRSV(A2)__F-del_DSCav1_mut8 (opt6)
gggagagucccgcagucggcguccagcggcucugcuuguucgugugugugucguugcaggccuuauucaagcuuaccauggaacuacucauauugaaagccaacgcaaucacaacaauacuaaccgccguaacauuuugcuucgcgucaggccaaaauauaacagaagaauuuuaccaaucaacaugcuccgccguaucaaaaggauaccuaggugcauuacgaaccgguugguacacaucaguaaucacaauagaacuuuccaacauuaaagaaauaaaaugcaauggcacagacgcaaaagucaaacuaauaaaacaagaacuagacaaauauaaaaacgccgucacagacuuacaacuauuaaugcaaagcacaccagcaacaggauccggaucagcaauagcaucaggaguagccgucuguaaaguacuacaccuagaaggcgaaguuaauaaaauuaaaucagcuuuauuaucaaccaacaaagcaguaguaucacuauccggaugcggagucuccguccuaacauucaaaguacuagaccucaagaauuacauagauaaacaacuacuaccaauacucaacaaacaaucauguucaauaccaaacaucgaaaccgucauagaauuucaacaaaaaaauaauagacucuuagaaauaacacgagaauuuagcguaaacgcaggagucacaaccccugucucaacauacaugcuaaccaauuccgaauuauuaucacucauaaaugacaugccaauaacuaaugaccaaaaaaaacuuaugucaaacaacguacaaauaguaagacaacaaucauauucaauaaugugcauaaucaaagaagaaguuuuagcauauguaguacaacuaccacuauauggcgucauagacacaccaugcuggaaauuacacacaucaccucuaugcacaacaaacacaaaagaaggaagcaacauuugccuaaccagaaccgauagaggaugguacugcgauaacgcaggcucaguaucauucuucccucaagccgaaacuugcaaaguccaaucaaauagagucuucugcgauacaaugaacuccuuaacuuuaccaucagaaguaaaucuaugcaacguagauaucuuuaauccaaaauacgauugcaaaaucaugacaucaaaaacagauguaucaucuaguguaauuaccucccuaggagcaauaguaagcugcuacggaaaaacaaaaugcaccgccucuaacaaaugucguggaauaauaaaaacauucucaaacggaugcgauuauguaucaaauaaaggugucgacaccguaucaguaggcaauacacuauacuauguaaauaaacaagaaggacaaucacucuacgucaaaggugaaccaauaauaaacuucuacgacccacuuguauucccaagcgacgaauuugacgcaucaauaagccaaguaaacgaaaaaauaaaccaaucacuagcauucaucagaaaaucagacgaacuacuccacaauguaaaugcaggaaaaucaacaaccaauaucaugauaacaaccauaauaauagucauaauaguaauacuauuaucccucauagccguuggacuacuccuauauuguaaagcacgauaaggacuaguguccaccugucccuccugggcugcuggauugucucguuuuccugccaaauaaacaggaucagcgcuuuacagaucuaaaaaaaaaaaaaaaaaaaaaaaaaaaaaaaaaaaaaaaaaaaaaaaaaaaaaaaaaaaaaaaaugcaucccccccccccccccccccccccccccccccaaaggcucuuuucagagccaccagaauu

SEQ ID NO: 7981 - RNA, 1837 nt, Artificial Sequence
  mRNA product Design b-3 comprising derived and/or modified sequence from HRSV(A2)__F-del_DSCav1_mut8 (opt11)
gggagagucccgcagucggcguccagcggcucugcuuguucgugugugugucguugcaggccuuauucaagcuuaccauggaacuccucauccucaaagccaacgccaucaccaccauacucaccgcaguaaccuucugcuucgcauccggccaaaacaucacagaagaguucuaccagaguaccugcuccgccgucuccaaaggcuaccuuggcgcccuccguaccgggugguacacauccgucaucacaaucgaacucuccaacaucaaagaaauaaagugcaacggcacagacgccaaaguaaaacugauaaagcaagaacucgacaaauacaaaaacgccguaaccgaccuccagcuacuaaugcaauccacucccgccaccggcagcggauccgccaucgccuccggaguagccgucuguaaagucuuacaccucgaaggcgaagugaacaaaaucaaauccgcccuacucucaaccaacaaagccguaguaucacucuccgggugcggcguuucagugcuaacguucaaaguccuugaccucaaaaacuacaucgacaaacaacuccuccccauccuaaauaaacaauccugcuccauacccaacaucgagacugucaucgaguuccagcagaaaaacaaccgacuccucgaaaucacacgcgaguucucugucaacgccggcgucacaacccccgucuccacauacaugcucaccaacagcgaacuccucucccuaaucaaugacaugcccaucaccaacgaccaaaagaaacucaugucaaacaacguccaaaucguccgccaacaauccuacagcaucaugugcaucaucaaagaagaaguucucgcauacguaguacaacucccccucuacggagugaucgacacccccugcuggaaacuacacaccagcccgcuuugcaccacaaacaccaaggaaggcuccaacaucugccucacucgaaccgaccgcggcugguacugcgacaacgcaggcuccgucaguuucuuuccccaagcagaaacaugcaaaguccaauccaaccgaguauucugcgacaccaugaacucccucacccuaccauccgaaguuaaccuaugcaacguggacaucuucaaccccaaguacgacugcaaaauuaugaccuccaaaaccgacguauccuccagcgucaucaccagccucggagcaauagucuccugcuacggcaagaccaagugcaccgcuuccaacaagugucgcggaaucaucaaaaccuucucaaacggcugcgacuacgucuccaacaaaggcgucgacaccguauccguaggaaacacccuauacuacgucaacaaacaagaaggacaaucccucuaugucaaaggcgaacccaucaucaauuucuacgacccccuagucuucccuuccgacgaguucgacgcguccaucagccaagucaaugaaaagaucaaccagagccuggcauucauccgcaaauccgacgaacuccuccacaacgucaacgcgggaaaauccacgacaaacaucaugaucaccaccaucaucaucgucaucauagucauucuccuuucucucaucgccgugggacuacuucucuacugcaaagcccgauaaggacuaguguccaccugucccuccugggcugcuggauugucucguuuuccugccaaauaaacaggaucagcgcuuuacagaucuaaaaaaaaaaaaaaaaaaaaaaaaaaaaaaaaaaaaaaaaaaaaaaaaaaaaaaaaaaaaaaaaugcaucccccccccccccccccccccccccccccccaaaggcucuuuucagagccaccagaauu

SEQ ID NO: 7982 - RNA, 1888 nt, Artificial Sequence
  mRNA product Design b-4 comprising derived and/or modified sequence from HRSV(A2)__F-del_DSCav1_mut8 (opt1)
gggagagucccgcagucggcguccagcggcucugcuuguucgugugugugucguugcaggccuuauucaagcuuaccauggagcugcucauccugaaggccaacgccaucaccaccauccugacggcggugaccuucugcuucgccagcggccagaacaucaccgaggaguucuaccaguccacgugcagcgccgucuccaagggguaccucggcgcccugcggaccggcugguacaccuccgugaucaccaucgagcugagcaacaucaaggagaucaagugcaacgggaccgacgccaaggugaagcucaucaagcaggagcuggacaaguacaagaacgcggucacggaccugcagcuccugaugcaguccaccccggcaaccggcuccggcuccgccaucgcgagcggcgucgccgugugcaaggugcugcaccucgagggggaggucaacaagaucaagagcgcccugcuguccaccaacaaggccguggugagccucuccggcugcggcgucagcgugcugaccuucaaggugcuggaccucaagaacuacaucgacaagcagcugcugcccauccugaacaagcagagcugcuccauccccaacaucgagacggugaucgaguuccagcagaagaacaaccggcuccuggagaucacccgcgaguucagcgugaacgccggggucaccacccccguguccacguacaugcugaccaacagcgagcuccugucccugaucaacgacaugccgaucaccaacgaccagaagaagcucaugagcaacaacgugcagaucguccggcagcaguccuacagcaucaugugcaucaucaaggaggaggugcuggcguacgugguccagcugccccucuacggcgugaucgacacccccugcuggaagcugcacacgagcccccugugcaccaccaacaccaaggagggguccaacaucugccucacgcgcaccgaccggggcugguacugcgacaacgccggcagcgucuccuucuucccgcaggccgagaccugcaaggugcagagcaaccgcguguucugcgacaccaugaacucccugacgcugcccagcgagguaaaccucugcaacgucgacaucuucaaccccaaguacgacugcaagaucaugaccuccaagaccgacgugagcuccagcgugaucaccucccugggggccaucgucagcugcuacggcaagacgaagugcaccgccagcaacaagugccgggggaucaucaagaccuucuccaacggcugcgacuacgugagcaacaagggcguggacaccguguccgucgggaacacccuguacuacgugaacaagcaggagggccagagccucuacgugaagggggagcccaucaucaacuucuacgacccgcuggucuuccccuccgacgaguucgacgcgagcaucucccaggugaacgagaagaucaaccagagccuggccuucauccgcaaguccgacgagcugcuccacaacgugaacgccggcaagagcacgaccaacaucaugaucaccaccaucaucaucgucaucaucgugauccugcugucccucaucgccguggggcugcugcucuacugcaaggcccggugaggacuaguaauaaggaaacuguaugaaugucugugggcaggaagugaagagauccuucuguaaagguuuuuggaauuaugucugcugaauaauaaacuuuuuugaaauaauaaaucugguagaaaaaugagaucuaaaaaaaaaaaaaaaaaaaaaaaaaaaaaaaaaaaaaaaaaaaaaaaaaaaaaaaaaaaaaaaaugcaucccccccccccccccccccccccccccccccaaaggcucuuuucagagccaccagaauu

SEQ ID NO: 7983 - RNA, 1888 nt, Artificial Sequence
  mRNA product Design b-4 comprising derived and/or modified sequence from HRSV(A2)__F-del_DSCav1_mut8 (opt1)
gggagagucccgcagucggcguccagcggcucugcuuguucgugugugugucguugcaggccuuauucaagcuuaccauggagcugcucauccugaaggccaacgccaucaccaccauccugacggcggugaccuucugcuucgccagcggccagaacaucaccgaggaguucuaccaguccacgugcagcgccgucuccaagggguaccucggcgcccugcgcaccgggugguacaccagcgugaucaccaucgagcuguccaacaucaaggagaucaagugcaacggcaccgacgccaaggugaagcucaucaagcaggagcuggacaaguacaagaacgcggucacggaccugcagcuccugaugcagagcacccccgccaccggguccggcagcgccaucgccuccggcguggcggugugcaagguccugcaccucgagggggaggugaacaagaucaagagcgcccugcuguccaccaacaaggccguggucagccucuccggcugcggggugagcgugcugacguucaagguccuggaccucaagaacuacaucgacaagcagcugcugccgauccucaacaagcaguccugcagcauccccaacaucgagaccgugaucgaguuccagcagaagaacaaccggcugcuggagaucacccgcgaguucuccgugaacgccggcgucaccacgcccgugagcaccuacaugcucaccaacuccgagcugcugagccucaucaacgacaugcccaucaccaacgaccagaagaagcugaugagcaacaacgugcagaucguccggcagcaguccuacagcaucaugugcaucaucaaggaggaggugcuggccuacgugguccagcucccgcuguacggggugaucgacacgcccugcuggaagcugcacaccagcccccucugcaccaccaacacgaaggagggcuccaacaucugccugacccgcaccgaccggggcugguacugcgacaacgcgggguccgugagcuucuucccccaggccgagaccugcaagguccaguccaaccgcguguucugcgacacgaugaacagccugacccucccguccgaggucaaccugugcaacguggacaucuucaaccccaaguacgacugcaagaucaugaccagcaagaccgacguguccagcuccgucaucacgagccugggcgccaucguguccugcuacgggaagaccaagugcaccgccagcaacaagugccggggcaucaucaagaccuucuccaacggcugcgacuacgugagcaacaagggggucgacacgguguccgugggcaacacccucuacuacgucaacaagcaggaggggcagagccuguacgugaagggcgagcccaucaucaacuucuacgacccccugguguucccgagcgacgaguucgacgccuccaucagccaggucaacgagaagaucaaccagucccucgcguucauccgcaagagcgacgagcugcugcacaacgugaacgccgggaaguccaccaccaacaucaugaucaccacgaucaucaucgugaucaucgucauccuccugagccugaucgccgugggccuccugcuguacugcaaggcccggugaggacuaguaauaaggaaacuguaugaaugucugugggcaggaagugaagagauccuucuguaaagguuuuuggaauuaugucugcugaauaauaaacuuuuuugaaauaauaaaucugguagaaaaaugagaucuaaaaaaaaaaaaaaaaaaaaaaaaaaaaaaaaaaaaaaaaaaaaaaaaaaaaaaaaaaaaaaaaugcaucccccccccccccccccccccccccccccccaaaggcucuuuucagagccaccagaauu

SEQ ID NO: 7984 - RNA, 1888 nt, Artificial Sequence
  mRNA product Design b-4 comprising derived and/or modified sequence from HRSV(A2)__F-del_DSCav1_mut8 (opt2)
gggagagucccgcagucggcguccagcggcucugcuuguucgugugugugucguugcaggccuuauucaagcuuaccauggagcuccucauccucaaggccaacgccaucaccaccauccucaccgccgucaccuucugcuucgccuccggccagaacaucaccgaggaguucuaccaguccaccugcuccgccgucuccaagggcuaccucggcgcccuccgcaccggcugguacaccuccgucaucaccaucgagcucuccaacaucaaggagaucaagugcaacggcaccgacgccaaggucaagcucaucaagcaggagcucgacaaguacaagaacgccgucaccgaccuccagcuccucaugcaguccacccccgccaccggcuccggcuccgccaucgccuccggcgucgccgucugcaagguccuccaccucgagggcgaggucaacaagaucaaguccgcccuccucuccaccaacaaggccgucgucucccucuccggcugcggcgucuccguccucaccuucaagguccucgaccucaagaacuacaucgacaagcagcuccuccccauccucaacaagcaguccugcuccauccccaacaucgagaccgucaucgaguuccagcagaagaacaaccgccuccucgagaucacccgcgaguucuccgucaacgccggcgucaccacccccgucuccaccuacaugcucaccaacuccgagcuccucucccucaucaacgacaugcccaucaccaacgaccagaagaagcucauguccaacaacguccagaucguccgccagcaguccuacuccaucaugugcaucaucaaggaggagguccucgccuacgucguccagcucccccucuacggcgucaucgacacccccugcuggaagcuccacaccuccccccucugcaccaccaacaccaaggagggcuccaacaucugccucacccgcaccgaccgcggcugguacugcgacaacgccggcuccgucuccuucuucccccaggccgagaccugcaagguccaguccaaccgcgucuucugcgacaccaugaacucccucacccuccccuccgaggucaaccucugcaacgucgacaucuucaaccccaaguacgacugcaagaucaugaccuccaagaccgacgucuccuccuccgucaucaccucccucggcgccaucgucuccugcuacggcaagaccaagugcaccgccuccaacaagugccgcggcaucaucaagaccuucuccaacggcugcgacuacgucuccaacaagggcgucgacaccgucuccgucggcaacacccucuacuacgucaacaagcaggagggccagucccucuacgucaagggcgagcccaucaucaacuucuacgacccccucgucuuccccuccgacgaguucgacgccuccaucucccaggucaacgagaagaucaaccagucccucgccuucauccgcaaguccgacgagcuccuccacaacgucaacgccggcaaguccaccaccaacaucaugaucaccaccaucaucaucgucaucaucgucauccuccucucccucaucgccgucggccuccuccucuacugcaaggcccgcugaggacuaguaauaaggaaacuguaugaaugucugugggcaggaagugaagagauccuucuguaaagguuuuuggaauuaugucugcugaauaauaaacuuuuuugaaauaauaaaucugguagaaaaaugagaucuaaaaaaaaaaaaaaaaaaaaaaaaaaaaaaaaaaaaaaaaaaaaaaaaaaaaaaaaaaaaaaaaugcaucccccccccccccccccccccccccccccccaaaggcucuuuucagagccaccagaauu

SEQ ID NO: 7985 - RNA, 1888 nt, Artificial Sequence
  mRNA product Design b-4 comprising derived and/or modified sequence from HRSV(A2)__F-del_DSCav1_mut8 (opt3)
gggagagucccgcagucggcguccagcggcucugcuuguucgugugugugucguugcaggccuuauucaagcuuaccauggagcugcucauccuuaaggccaacgcuauuaccacaauacugacugcagugacguucugcuuugccagcggccagaauaucaccgaagaguucuaccaauccacauguucugcggucucaaaaggguauuugggagcuuuaagaacugguugguacaccaguguuauuacaaucgaacugagcaacauuaaggagaucaaaugcaauggcaccgacgccaaggugaaacuaauaaagcaggaacucgauaaguauaaaaacgcaguaacugaccugcagcuucugaugcaguccacacccgccaccgggucuggaucggcuaucgcaucaggcguggccgucuguaagguguugcaccucgagggugagguuaauaaaauuaagagcgcucugcugaguacgaacaaagccguggucucccucucugggugcggagugagcguauuaacuuuuaagguucuggaucuuaagaauuacaucgacaaacaauugcugccuauucuaaacaagcaguccuguucaaucccaaauauagaaaccgugauugaguuccagcagaaaaacaauaggcuccuggaaaucacacgggaguuuagugucaacgcgggcgugacuaccccggugagcacauauaugcuuaccaauucugagcuguugucccucauuaacgauaugcccaucacgaaugaccaaaagaaacugaugucaaacaacguccagaucguucgccagcagagcuacaguauuaugugcauaaucaaggaagagguguuagcauauguagugcaacugccucucuacggcgucauugauacuccauguuggaaacuucauacaucuccccugugcaccacuaauacaaaggaaggguccaacaucuguuugacccgaacggaccguggaugguacugcgauaaugccgguagcgugucguucuuuccucaggcugagaccuguaagguucagucuaacagaguguucugcgacacaaugaacucccuaacucugccaucagaagucaaucucugcaauguggauauauuuaaccccaaauaugacuguaagauuaugaccaguaaaacagauguaagcuccucuguuaucacuagccugggcgccaucgugucaugcuacgggaagaccaaauguacagcaaguaauaagugcaggggaauuaucaagaccuucuccaacggcugugacuaugucagcaauaaagguguggacacugucucuguggggaacacgcuuuacuauguuaauaagcaagagggacagucacuguacgugaaaggcgagccuauuauaaacuuuuaugauccauugguauucccgagugacgaauuugaugcuagcaucucccaggucaaugagaagauuaaccagucucucgccuucauccggaaaucggacgaacuguuacacaacgugaaugcgggcaagagcacaaccaacaucaugauuacuaccauaaucauuguuaucauugugauccugcuaucccucauagccgucgggcugcuuuuguacugcaaggcacgcugaggacuaguaauaaggaaacuguaugaaugucugugggcaggaagugaagagauccuucuguaaagguuuuuggaauuaugucugcugaauaauaaacuuuuuugaaauaauaaaucugguagaaaaaugagaucuaaaaaaaaaaaaaaaaaaaaaaaaaaaaaaaaaaaaaaaaaaaaaaaaaaaaaaaaaaaaaaaaugcaucccccccccccccccccccccccccccccccaaaggcucuuuucagagccaccagaauu

SEQ ID NO: 7986 - RNA, 1888 nt, Artificial Sequence
  mRNA product Design b-4 comprising derived and/or modified sequence from HRSV(A2)__F-del_DSCav1_mut8 (opt4)
gggagagucccgcagucggcguccagcggcucugcuuguucgugugugugucguugcaggccuuauucaagcuuaccauggagcugcugauccugaaggccaacgccaucaccaccauccugaccgccgugaccuucugcuucgccagcggccagaacaucaccgaggaguucuaccagagcaccugcagcgccgugagcaagggcuaccugggcgcccugagaaccggcugguacaccagcgugaucaccaucgagcugagcaacaucaaggagaucaagugcaacggcaccgacgccaaggugaagcugaucaagcaggagcuggacaaguacaagaacgccgugaccgaccugcagcugcugaugcagagcacccccgccaccggcagcggcagcgccaucgccagcggcguggccgugugcaaggugcugcaccuggagggcgaggugaacaagaucaagagcgcccugcugagcaccaacaaggccguggugagccugagcggcugcggcgugagcgugcugaccuucaaggugcuggaccugaagaacuacaucgacaagcagcugcugcccauccugaacaagcagagcugcagcauccccaacaucgagaccgugaucgaguuccagcagaagaacaacagacugcuggagaucaccagagaguucagcgugaacgccggcgugaccacccccgugagcaccuacaugcugaccaacagcgagcugcugagccugaucaacgacaugcccaucaccaacgaccagaagaagcugaugagcaacaacgugcagaucgugagacagcagagcuacagcaucaugugcaucaucaaggaggaggugcuggccuacguggugcagcugccccuguacggcgugaucgacacccccugcuggaagcugcacaccagcccccugugcaccaccaacaccaaggagggcagcaacaucugccugaccagaaccgacagaggcugguacugcgacaacgccggcagcgugagcuucuucccccaggccgagaccugcaaggugcagagcaacagaguguucugcgacaccaugaacagccugacccugcccagcgaggugaaccugugcaacguggacaucuucaaccccaaguacgacugcaagaucaugaccagcaagaccgacgugagcagcagcgugaucaccagccugggcgccaucgugagcugcuacggcaagaccaagugcaccgccagcaacaagugcagaggcaucaucaagaccuucagcaacggcugcgacuacgugagcaacaagggcguggacaccgugagcgugggcaacacccuguacuacgugaacaagcaggagggccagagccuguacgugaagggcgagcccaucaucaacuucuacgacccccugguguuccccagcgacgaguucgacgccagcaucagccaggugaacgagaagaucaaccagagccuggccuucaucagaaagagcgacgagcugcugcacaacgugaacgccggcaagagcaccaccaacaucaugaucaccaccaucaucaucgugaucaucgugauccugcugagccugaucgccgugggccugcugcuguacugcaaggccagaugaggacuaguaauaaggaaacuguaugaaugucugugggcaggaagugaagagauccuucuguaaagguuuuuggaauuaugucugcugaauaauaaacuuuuuugaaauaauaaaucugguagaaaaaugagaucuaaaaaaaaaaaaaaaaaaaaaaaaaaaaaaaaaaaaaaaaaaaaaaaaaaaaaaaaaaaaaaaaugcaucccccccccccccccccccccccccccccccaaaggcucuuuucagagccaccagaauu

SEQ ID NO: 7987 - RNA, 1888 nt, Artificial Sequence
  mRNA product Design b-4 comprising derived and/or modified sequence from HRSV(A2)__F-del_DSCav1_mut8 (opt5)
gggagagucccgcagucggcguccagcggcucugcuuguucgugugugugucguugcaggccuuauucaagcuuaccauggagcugcucauccugaaggccaacgcuauuaccacaauccuuacggccgugaccuucugcuuugcgagcggccagaauauuacagaagaguucuaccaauccaccuguucugcugucagcaaaggguaucugggagcccucagaacaggcugguacaccuccguuaucacaauugaacugucuaacaucaaggagaucaaaugcaaugggaccgacgccaaggugaaacuuauuaagcaggaacuggauaaguauaaaaacgcugugacggaccuccagcugcugaugcagagcacccccgccacaggauccggcucugcuaucgccagcggggucgcgguguguaagguucuccaccuggagggagaggugaauaaaauuaaguccgcccuucugagcaccaacaaagcugucgugucucucuccggcugcggcguuagcgugcugacauuuaagguccuugaucugaagaauuacaucgacaaacaacuccugccuauucugaacaagcagucuuguuccaucccgaauauugaaaccgugaucgaguuccagcagaaaaacaaucggcuccuggaaaucacgcgcgaguuuagcgugaacgccggggucacaacccccguuucuacauauaugcuuaccaauuccgagcugcucagccugauuaacgauaugccuaucaccaaugaccaaaagaaacuuauguccaacaacgugcagauugugagacagcagucuuacagcaucaugugcauuaucaaggaagagguccuggcuuaugugguucaacucccccuguacggagugaucgauacaccuuguuggaaacugcauacgagcccccucugcaccacaaauaccaaggaaggcagcaacauuugucugacacggaccgaccgcgggugguacugcgauaaugccggaucugucuccuucuuuccucaggcggagacguguaaggugcagagcaacagaguuuucugcgacacaaugaacucucuuacccugccgagcgaagugaaucucugcaaugucgauaucuuuaaccccaaauaugacuguaagauuaugaccuccaaaacagaugugucuagcuccgucaucaccagccugggcgccauugugucuugcuacgggaagacaaaauguacggcuuccaauaagugccggggaaucaucaagaccuucagcaacggcugugacuauguuucuaauaaaggcguggacacagucuccguggggaacacccuuuacuauguuaauaagcaagagggacagagccuguacgugaaaggcgagccuauuaucaacuuuuaugauccccucgucuucccuuccgacgaauuugaugccucuauuagccaggugaaugagaagaucaaccagucccuggcuuucauucgcaaaucugacgaacugcuccacaacgugaaugccgggaaguccacaaccaacaucaugauuacgaccaucaucauuguuaucauugucauccugcuuucccugauugccgugggacuccugcuguacugcaaggcuagaugaggacuaguaauaaggaaacuguaugaaugucugugggcaggaagugaagagauccuucuguaaagguuuuuggaauuaugucugcugaauaauaaacuuuuuugaaauaauaaaucugguagaaaaaugagaucuaaaaaaaaaaaaaaaaaaaaaaaaaaaaaaaaaaaaaaaaaaaaaaaaaaaaaaaaaaaaaaaaugcaucccccccccccccccccccccccccccccccaaaggcucuuuucagagccaccagaauu

SEQ ID NO: 7988 - RNA, 1888 nt, Artificial Sequence
  mRNA product Design b-4 comprising derived and/or modified sequence from HRSV(A2)__F-del_DSCav1_mut8 (opt6)
gggagagucccgcagucggcguccagcggcucugcuuguucgugugugugucguugcaggccuuauucaagcuuaccauggaacuacucauauugaaagccaacgcaaucacaacaauacuaaccgccguaacauuuugcuucgcgucaggccaaaauauaacagaagaauuuuaccaaucaacaugcuccgccguaucaaaaggauaccuaggugcauuacgaaccgguugguacacaucaguaaucacaauagaacuuuccaacauuaaagaaauaaaaugcaauggcacagacgcaaaagucaaacuaauaaaacaagaacuagacaaauauaaaaacgccgucacagacuuacaacuauuaaugcaaagcacaccagcaacaggauccggaucagcaauagcaucaggaguagccgucuguaaaguacuacaccuagaaggcgaaguuaauaaaauuaaaucagcuuuauuaucaaccaacaaagcaguaguaucacuauccggaugcggagucuccguccuaacauucaaaguacuagaccucaagaauuacauagauaaacaacuacuaccaauacucaacaaacaaucauguucaauaccaaacaucgaaaccgucauagaauuucaacaaaaaaauaauagacucuuagaaauaacacgagaauuuagcguaaacgcaggagucacaaccccugucucaacauacaugcuaaccaauuccgaauuauuaucacucauaaaugacaugccaauaacuaaugaccaaaaaaaacuuaugucaaacaacguacaaauaguaagacaacaaucauauucaauaaugugcauaaucaaagaagaaguuuuagcauauguaguacaacuaccacuauauggcgucauagacacaccaugcuggaaauuacacacaucaccucuaugcacaacaaacacaaaagaaggaagcaacauuugccuaaccagaaccgauagaggaugguacugcgauaacgcaggcucaguaucauucuucccucaagccgaaacuugcaaaguccaaucaaauagagucuucugcgauacaaugaacuccuuaacuuuaccaucagaaguaaaucuaugcaacguagauaucuuuaauccaaaauacgauugcaaaaucaugacaucaaaaacagauguaucaucuaguguaauuaccucccuaggagcaauaguaagcugcuacggaaaaacaaaaugcaccgccucuaacaaaugucguggaauaauaaaaacauucucaaacggaugcgauuauguaucaaauaaaggugucgacaccguaucaguaggcaauacacuauacuauguaaauaaacaagaaggacaaucacucuacgucaaaggugaaccaauaauaaacuucuacgacccacuuguauucccaagcgacgaauuugacgcaucaauaagccaaguaaacgaaaaaauaaaccaaucacuagcauucaucagaaaaucagacgaacuacuccacaauguaaaugcaggaaaaucaacaaccaauaucaugauaacaaccauaauaauagucauaauaguaauacuauuaucccucauagccguuggacuacuccuauauuguaaagcacgauaaggacuaguaauaaggaaacuguaugaaugucugugggcaggaagugaagagauccuucuguaaagguuuuuggaauuaugucugcugaauaauaaacuuuuuugaaauaauaaaucugguagaaaaaugagaucuaaaaaaaaaaaaaaaaaaaaaaaaaaaaaaaaaaaaaaaaaaaaaaaaaaaaaaaaaaaaaaaaugcaucccccccccccccccccccccccccccccccaaaggcucuuuucagagccaccagaauu

SEQ ID NO: 7989 - RNA, 1888 nt, Artificial Sequence
  mRNA product Design b-4 comprising derived and/or modified sequence from HRSV(A2)__F-del_DSCav1_mut8 (opt11)
gggagagucccgcagucggcguccagcggcucugcuuguucgugugugugucguugcaggccuuauucaagcuuaccauggaacuccucauccucaaagccaacgccaucaccaccauacucaccgcaguaaccuucugcuucgcauccggccaaaacaucacagaagaguucuaccagaguaccugcuccgccgucuccaaaggcuaccuuggcgcccuccguaccgggugguacacauccgucaucacaaucgaacucuccaacaucaaagaaauaaagugcaacggcacagacgccaaaguaaaacugauaaagcaagaacucgacaaauacaaaaacgccguaaccgaccuccagcuacuaaugcaauccacucccgccaccggcagcggauccgccaucgccuccggaguagccgucuguaaagucuuacaccucgaaggcgaagugaacaaaaucaaauccgcccuacucucaaccaacaaagccguaguaucacucuccgggugcggcguuucagugcuaacguucaaaguccuugaccucaaaaacuacaucgacaaacaacuccuccccauccuaaauaaacaauccugcuccauacccaacaucgagacugucaucgaguuccagcagaaaaacaaccgacuccucgaaaucacacgcgaguucucugucaacgccggcgucacaacccccgucuccacauacaugcucaccaacagcgaacuccucucccuaaucaaugacaugcccaucaccaacgaccaaaagaaacucaugucaaacaacguccaaaucguccgccaacaauccuacagcaucaugugcaucaucaaagaagaaguucucgcauacguaguacaacucccccucuacggagugaucgacacccccugcuggaaacuacacaccagcccgcuuugcaccacaaacaccaaggaaggcuccaacaucugccucacucgaaccgaccgcggcugguacugcgacaacgcaggcuccgucaguuucuuuccccaagcagaaacaugcaaaguccaauccaaccgaguauucugcgacaccaugaacucccucacccuaccauccgaaguuaaccuaugcaacguggacaucuucaaccccaaguacgacugcaaaauuaugaccuccaaaaccgacguauccuccagcgucaucaccagccucggagcaauagucuccugcuacggcaagaccaagugcaccgcuuccaacaagugucgcggaaucaucaaaaccuucucaaacggcugcgacuacgucuccaacaaaggcgucgacaccguauccguaggaaacacccuauacuacgucaacaaacaagaaggacaaucccucuaugucaaaggcgaacccaucaucaauuucuacgacccccuagucuucccuuccgacgaguucgacgcguccaucagccaagucaaugaaaagaucaaccagagccuggcauucauccgcaaauccgacgaacuccuccacaacgucaacgcgggaaaauccacgacaaacaucaugaucaccaccaucaucaucgucaucauagucauucuccuuucucucaucgccgugggacuacuucucuacugcaaagcccgauaaggacuaguaauaaggaaacuguaugaaugucugugggcaggaagugaagagauccuucuguaaagguuuuuggaauuaugucugcugaauaauaaacuuuuuugaaauaauaaaucugguagaaaaaugagaucuaaaaaaaaaaaaaaaaaaaaaaaaaaaaaaaaaaaaaaaaaaaaaaaaaaaaaaaaaaaaaaaaugcaucccccccccccccccccccccccccccccccaaaggcucuuuucagagccaccagaauu

SEQ ID NO: 7990 - RNA, 1950 nt, Artificial Sequence
  mRNA product Design b-5 comprising derived and/or modified sequence from HRSV(A2)__F-del_DSCav1_mut8 (opt1)
gggagacuccugucgggcggaaguaggaggaguagaguuuaaaaacaguacucuuuuuccgguucgggacguaguugaagcaacgacaagccggauaaccgcucuugagacaggaagcuuaccauggagcugcucauccugaaggccaacgccaucaccaccauccugacggcggugaccuucugcuucgccagcggccagaacaucaccgaggaguucuaccaguccacgugcagcgccgucuccaagggguaccucggcgcccugcggaccggcugguacaccuccgugaucaccaucgagcugagcaacaucaaggagaucaagugcaacgggaccgacgccaaggugaagcucaucaagcaggagcuggacaaguacaagaacgcggucacggaccugcagcuccugaugcaguccaccccggcaaccggcuccggcuccgccaucgcgagcggcgucgccgugugcaaggugcugcaccucgagggggaggucaacaagaucaagagcgcccugcuguccaccaacaaggccguggugagccucuccggcugcggcgucagcgugcugaccuucaaggugcuggaccucaagaacuacaucgacaagcagcugcugcccauccugaacaagcagagcugcuccauccccaacaucgagacggugaucgaguuccagcagaagaacaaccggcuccuggagaucacccgcgaguucagcgugaacgccggggucaccacccccguguccacguacaugcugaccaacagcgagcuccugucccugaucaacgacaugccgaucaccaacgaccagaagaagcucaugagcaacaacgugcagaucguccggcagcaguccuacagcaucaugugcaucaucaaggaggaggugcuggcguacgugguccagcugccccucuacggcgugaucgacacccccugcuggaagcugcacacgagcccccugugcaccaccaacaccaaggagggguccaacaucugccucacgcgcaccgaccggggcugguacugcgacaacgccggcagcgucuccuucuucccgcaggccgagaccugcaaggugcagagcaaccgcguguucugcgacaccaugaacucccugacgcugcccagcgagguaaaccucugcaacgucgacaucuucaaccccaaguacgacugcaagaucaugaccuccaagaccgacgugagcuccagcgugaucaccucccugggggccaucgucagcugcuacggcaagacgaagugcaccgccagcaacaagugccgggggaucaucaagaccuucuccaacggcugcgacuacgugagcaacaagggcguggacaccguguccgucgggaacacccuguacuacgugaacaagcaggagggccagagccucuacgugaagggggagcccaucaucaacuucuacgacccgcuggucuuccccuccgacgaguucgacgcgagcaucucccaggugaacgagaagaucaaccagagccuggccuucauccgcaaguccgacgagcugcuccacaacgugaacgccggcaagagcacgaccaacaucaugaucaccaccaucaucaucgucaucaucgugauccugcugucccucaucgccguggggcugcugcucuacugcaaggcccggugaggacuaguacuggcugcaucucccuuuccucuguccuccauccuucucccaggauggugaagggggaccugguacccagugauccccaccccaggauccuaaaucaugacuuaccugcuaauaaaaacucauuggaaaagugagaagaucuaaaaaaaaaaaaaaaaaaaaaaaaaaaaaaaaaaaaaaaaaaaaaaaaaaaaaaaaaaaaaaaaugcaucccccccccccccccccccccccccccccccaaaggcucuuuucagagccaccagaauu

SEQ ID NO: 7991 - RNA, 1950 nt, Artificial Sequence
  mRNA product Design b-5 comprising derived and/or modified sequence from HRSV(A2)__F-del_DSCav1_mut8 (opt1)
gggagacuccugucgggcggaaguaggaggaguagaguuuaaaaacaguacucuuuuuccgguucgggacguaguugaagcaacgacaagccggauaaccgcucuugagacaggaagcuuaccauggagcugcucauccugaaggccaacgccaucaccaccauccugacggcggugaccuucugcuucgccagcggccagaacaucaccgaggaguucuaccaguccacgugcagcgccgucuccaagggguaccucggcgcccugcgcaccgggugguacaccagcgugaucaccaucgagcuguccaacaucaaggagaucaagugcaacggcaccgacgccaaggugaagcucaucaagcaggagcuggacaaguacaagaacgcggucacggaccugcagcuccugaugcagagcacccccgccaccggguccggcagcgccaucgccuccggcguggcggugugcaagguccugcaccucgagggggaggugaacaagaucaagagcgcccugcuguccaccaacaaggccguggucagccucuccggcugcggggugagcgugcugacguucaagguccuggaccucaagaacuacaucgacaagcagcugcugccgauccucaacaagcaguccugcagcauccccaacaucgagaccgugaucgaguuccagcagaagaacaaccggcugcuggagaucacccgcgaguucuccgugaacgccggcgucaccacgcccgugagcaccuacaugcucaccaacuccgagcugcugagccucaucaacgacaugcccaucaccaacgaccagaagaagcugaugagcaacaacgugcagaucguccggcagcaguccuacagcaucaugugcaucaucaaggaggaggugcuggccuacgugguccagcucccgcuguacggggugaucgacacgcccugcuggaagcugcacaccagcccccucugcaccaccaacacgaaggagggcuccaacaucugccugacccgcaccgaccggggcugguacugcgacaacgcgggguccgugagcuucuucccccaggccgagaccugcaagguccaguccaaccgcguguucugcgacacgaugaacagccugacccucccguccgaggucaaccugugcaacguggacaucuucaaccccaaguacgacugcaagaucaugaccagcaagaccgacguguccagcuccgucaucacgagccugggcgccaucguguccugcuacgggaagaccaagugcaccgccagcaacaagugccggggcaucaucaagaccuucuccaacggcugcgacuacgugagcaacaagggggucgacacgguguccgugggcaacacccucuacuacgucaacaagcaggaggggcagagccuguacgugaagggcgagcccaucaucaacuucuacgacccccugguguucccgagcgacgaguucgacgccuccaucagccaggucaacgagaagaucaaccagucccucgcguucauccgcaagagcgacgagcugcugcacaacgugaacgccgggaaguccaccaccaacaucaugaucaccacgaucaucaucgugaucaucgucauccuccugagccugaucgccgugggccuccugcuguacugcaaggcccggugaggacuaguacuggcugcaucucccuuuccucuguccuccauccuucucccaggauggugaagggggaccugguacccagugauccccaccccaggauccuaaaucaugacuuaccugcuaauaaaaacucauuggaaaagugagaagaucuaaaaaaaaaaaaaaaaaaaaaaaaaaaaaaaaaaaaaaaaaaaaaaaaaaaaaaaaaaaaaaaaugcaucccccccccccccccccccccccccccccccaaaggcucuuuucagagccaccagaauu

SEQ ID NO: 7992 - RNA, 1950 nt, Artificial Sequence
  mRNA product Design b-5 comprising derived and/or modified sequence from HRSV(A2)__F-del_DSCav1_mut8 (opt2)
gggagacuccugucgggcggaaguaggaggaguagaguuuaaaaacaguacucuuuuuccgguucgggacguaguugaagcaacgacaagccggauaaccgcucuugagacaggaagcuuaccauggagcuccucauccucaaggccaacgccaucaccaccauccucaccgccgucaccuucugcuucgccuccggccagaacaucaccgaggaguucuaccaguccaccugcuccgccgucuccaagggcuaccucggcgcccuccgcaccggcugguacaccuccgucaucaccaucgagcucuccaacaucaaggagaucaagugcaacggcaccgacgccaaggucaagcucaucaagcaggagcucgacaaguacaagaacgccgucaccgaccuccagcuccucaugcaguccacccccgccaccggcuccggcuccgccaucgccuccggcgucgccgucugcaagguccuccaccucgagggcgaggucaacaagaucaaguccgcccuccucuccaccaacaaggccgucgucucccucuccggcugcggcgucuccguccucaccuucaagguccucgaccucaagaacuacaucgacaagcagcuccuccccauccucaacaagcaguccugcuccauccccaacaucgagaccgucaucgaguuccagcagaagaacaaccgccuccucgagaucacccgcgaguucuccgucaacgccggcgucaccacccccgucuccaccuacaugcucaccaacuccgagcuccucucccucaucaacgacaugcccaucaccaacgaccagaagaagcucauguccaacaacguccagaucguccgccagcaguccuacuccaucaugugcaucaucaaggaggagguccucgccuacgucguccagcucccccucuacggcgucaucgacacccccugcuggaagcuccacaccuccccccucugcaccaccaacaccaaggagggcuccaacaucugccucacccgcaccgaccgcggcugguacugcgacaacgccggcuccgucuccuucuucccccaggccgagaccugcaagguccaguccaaccgcgucuucugcgacaccaugaacucccucacccuccccuccgaggucaaccucugcaacgucgacaucuucaaccccaaguacgacugcaagaucaugaccuccaagaccgacgucuccuccuccgucaucaccucccucggcgccaucgucuccugcuacggcaagaccaagugcaccgccuccaacaagugccgcggcaucaucaagaccuucuccaacggcugcgacuacgucuccaacaagggcgucgacaccgucuccgucggcaacacccucuacuacgucaacaagcaggagggccagucccucuacgucaagggcgagcccaucaucaacuucuacgacccccucgucuuccccuccgacgaguucgacgccuccaucucccaggucaacgagaagaucaaccagucccucgccuucauccgcaaguccgacgagcuccuccacaacgucaacgccggcaaguccaccaccaacaucaugaucaccaccaucaucaucgucaucaucgucauccuccucucccucaucgccgucggccuccuccucuacugcaaggcccgcugaggacuaguacuggcugcaucucccuuuccucuguccuccauccuucucccaggauggugaagggggaccugguacccagugauccccaccccaggauccuaaaucaugacuuaccugcuaauaaaaacucauuggaaaagugagaagaucuaaaaaaaaaaaaaaaaaaaaaaaaaaaaaaaaaaaaaaaaaaaaaaaaaaaaaaaaaaaaaaaaugcaucccccccccccccccccccccccccccccccaaaggcucuuuucagagccaccagaauu

SEQ ID NO: 7993 - RNA, 1950 nt, Artificial Sequence
  mRNA product Design b-5 comprising derived and/or modified sequence from HRSV(A2)__F-del_DSCav1_mut8 (opt3)
gggagacuccugucgggcggaaguaggaggaguagaguuuaaaaacaguacucuuuuuccgguucgggacguaguugaagcaacgacaagccggauaaccgcucuugagacaggaagcuuaccauggagcugcucauccuuaaggccaacgcuauuaccacaauacugacugcagugacguucugcuuugccagcggccagaauaucaccgaagaguucuaccaauccacauguucugcggucucaaaaggguauuugggagcuuuaagaacugguugguacaccaguguuauuacaaucgaacugagcaacauuaaggagaucaaaugcaauggcaccgacgccaaggugaaacuaauaaagcaggaacucgauaaguauaaaaacgcaguaacugaccugcagcuucugaugcaguccacacccgccaccgggucuggaucggcuaucgcaucaggcguggccgucuguaagguguugcaccucgagggugagguuaauaaaauuaagagcgcucugcugaguacgaacaaagccguggucucccucucugggugcggagugagcguauuaacuuuuaagguucuggaucuuaagaauuacaucgacaaacaauugcugccuauucuaaacaagcaguccuguucaaucccaaauauagaaaccgugauugaguuccagcagaaaaacaauaggcuccuggaaaucacacgggaguuuagugucaacgcgggcgugacuaccccggugagcacauauaugcuuaccaauucugagcuguugucccucauuaacgauaugcccaucacgaaugaccaaaagaaacugaugucaaacaacguccagaucguucgccagcagagcuacaguauuaugugcauaaucaaggaagagguguuagcauauguagugcaacugccucucuacggcgucauugauacuccauguuggaaacuucauacaucuccccugugcaccacuaauacaaaggaaggguccaacaucuguuugacccgaacggaccguggaugguacugcgauaaugccgguagcgugucguucuuuccucaggcugagaccuguaagguucagucuaacagaguguucugcgacacaaugaacucccuaacucugccaucagaagucaaucucugcaauguggauauauuuaaccccaaauaugacuguaagauuaugaccaguaaaacagauguaagcuccucuguuaucacuagccugggcgccaucgugucaugcuacgggaagaccaaauguacagcaaguaauaagugcaggggaauuaucaagaccuucuccaacggcugugacuaugucagcaauaaagguguggacacugucucuguggggaacacgcuuuacuauguuaauaagcaagagggacagucacuguacgugaaaggcgagccuauuauaaacuuuuaugauccauugguauucccgagugacgaauuugaugcuagcaucucccaggucaaugagaagauuaaccagucucucgccuucauccggaaaucggacgaacuguuacacaacgugaaugcgggcaagagcacaaccaacaucaugauuacuaccauaaucauuguuaucauugugauccugcuaucccucauagccgucgggcugcuuuuguacugcaaggcacgcugaggacuaguacuggcugcaucucccuuuccucuguccuccauccuucucccaggauggugaagggggaccugguacccagugauccccaccccaggauccuaaaucaugacuuaccugcuaauaaaaacucauuggaaaagugagaagaucuaaaaaaaaaaaaaaaaaaaaaaaaaaaaaaaaaaaaaaaaaaaaaaaaaaaaaaaaaaaaaaaaugcaucccccccccccccccccccccccccccccccaaaggcucuuuucagagccaccagaauu

SEQ ID NO: 7994 - RNA, 1950 nt, Artificial Sequence
  mRNA product Design b-5 comprising derived and/or modified sequence from HRSV(A2)__F-del_DSCav1_mut8 (opt4)
gggagacuccugucgggcggaaguaggaggaguagaguuuaaaaacaguacucuuuuuccgguucgggacguaguugaagcaacgacaagccggauaaccgcucuugagacaggaagcuuaccauggagcugcugauccugaaggccaacgccaucaccaccauccugaccgccgugaccuucugcuucgccagcggccagaacaucaccgaggaguucuaccagagcaccugcagcgccgugagcaagggcuaccugggcgcccugagaaccggcugguacaccagcgugaucaccaucgagcugagcaacaucaaggagaucaagugcaacggcaccgacgccaaggugaagcugaucaagcaggagcuggacaaguacaagaacgccgugaccgaccugcagcugcugaugcagagcacccccgccaccggcagcggcagcgccaucgccagcggcguggccgugugcaaggugcugcaccuggagggcgaggugaacaagaucaagagcgcccugcugagcaccaacaaggccguggugagccugagcggcugcggcgugagcgugcugaccuucaaggugcuggaccugaagaacuacaucgacaagcagcugcugcccauccugaacaagcagagcugcagcauccccaacaucgagaccgugaucgaguuccagcagaagaacaacagacugcuggagaucaccagagaguucagcgugaacgccggcgugaccacccccgugagcaccuacaugcugaccaacagcgagcugcugagccugaucaacgacaugcccaucaccaacgaccagaagaagcugaugagcaacaacgugcagaucgugagacagcagagcuacagcaucaugugcaucaucaaggaggaggugcuggccuacguggugcagcugccccuguacggcgugaucgacacccccugcuggaagcugcacaccagcccccugugcaccaccaacaccaaggagggcagcaacaucugccugaccagaaccgacagaggcugguacugcgacaacgccggcagcgugagcuucuucccccaggccgagaccugcaaggugcagagcaacagaguguucugcgacaccaugaacagccugacccugcccagcgaggugaaccugugcaacguggacaucuucaaccccaaguacgacugcaagaucaugaccagcaagaccgacgugagcagcagcgugaucaccagccugggcgccaucgugagcugcuacggcaagaccaagugcaccgccagcaacaagugcagaggcaucaucaagaccuucagcaacggcugcgacuacgugagcaacaagggcguggacaccgugagcgugggcaacacccuguacuacgugaacaagcaggagggccagagccuguacgugaagggcgagcccaucaucaacuucuacgacccccugguguuccccagcgacgaguucgacgccagcaucagccaggugaacgagaagaucaaccagagccuggccuucaucagaaagagcgacgagcugcugcacaacgugaacgccggcaagagcaccaccaacaucaugaucaccaccaucaucaucgugaucaucgugauccugcugagccugaucgccgugggccugcugcuguacugcaaggccagaugaggacuaguacuggcugcaucucccuuuccucuguccuccauccuucucccaggauggugaagggggaccugguacccagugauccccaccccaggauccuaaaucaugacuuaccugcuaauaaaaacucauuggaaaagugagaagaucuaaaaaaaaaaaaaaaaaaaaaaaaaaaaaaaaaaaaaaaaaaaaaaaaaaaaaaaaaaaaaaaaugcaucccccccccccccccccccccccccccccccaaaggcucuuuucagagccaccagaauu

SEQ ID NO: 7995 - RNA, 1950 nt, Artificial Sequence
  mRNA product Design b-5 comprising derived and/or modified sequence from HRSV(A2)__F-del_DSCav1_mut8 (opt5)
gggagacuccugucgggcggaaguaggaggaguagaguuuaaaaacaguacucuuuuuccgguucgggacguaguugaagcaacgacaagccggauaaccgcucuugagacaggaagcuuaccauggagcugcucauccugaaggccaacgcuauuaccacaauccuuacggccgugaccuucugcuuugcgagcggccagaauauuacagaagaguucuaccaauccaccuguucugcugucagcaaaggguaucugggagcccucagaacaggcugguacaccuccguuaucacaauugaacugucuaacaucaaggagaucaaaugcaaugggaccgacgccaaggugaaacuuauuaagcaggaacuggauaaguauaaaaacgcugugacggaccuccagcugcugaugcagagcacccccgccacaggauccggcucugcuaucgccagcggggucgcgguguguaagguucuccaccuggagggagaggugaauaaaauuaaguccgcccuucugagcaccaacaaagcugucgugucucucuccggcugcggcguuagcgugcugacauuuaagguccuugaucugaagaauuacaucgacaaacaacuccugccuauucugaacaagcagucuuguuccaucccgaauauugaaaccgugaucgaguuccagcagaaaaacaaucggcuccuggaaaucacgcgcgaguuuagcgugaacgccggggucacaacccccguuucuacauauaugcuuaccaauuccgagcugcucagccugauuaacgauaugccuaucaccaaugaccaaaagaaacuuauguccaacaacgugcagauugugagacagcagucuuacagcaucaugugcauuaucaaggaagagguccuggcuuaugugguucaacucccccuguacggagugaucgauacaccuuguuggaaacugcauacgagcccccucugcaccacaaauaccaaggaaggcagcaacauuugucugacacggaccgaccgcgggugguacugcgauaaugccggaucugucuccuucuuuccucaggcggagacguguaaggugcagagcaacagaguuuucugcgacacaaugaacucucuuacccugccgagcgaagugaaucucugcaaugucgauaucuuuaaccccaaauaugacuguaagauuaugaccuccaaaacagaugugucuagcuccgucaucaccagccugggcgccauugugucuugcuacgggaagacaaaauguacggcuuccaauaagugccggggaaucaucaagaccuucagcaacggcugugacuauguuucuaauaaaggcguggacacagucuccguggggaacacccuuuacuauguuaauaagcaagagggacagagccuguacgugaaaggcgagccuauuaucaacuuuuaugauccccucgucuucccuuccgacgaauuugaugccucuauuagccaggugaaugagaagaucaaccagucccuggcuuucauucgcaaaucugacgaacugcuccacaacgugaaugccgggaaguccacaaccaacaucaugauuacgaccaucaucauuguuaucauugucauccugcuuucccugauugccgugggacuccugcuguacugcaaggcuagaugaggacuaguacuggcugcaucucccuuuccucuguccuccauccuucucccaggauggugaagggggaccugguacccagugauccccaccccaggauccuaaaucaugacuuaccugcuaauaaaaacucauuggaaaagugagaagaucuaaaaaaaaaaaaaaaaaaaaaaaaaaaaaaaaaaaaaaaaaaaaaaaaaaaaaaaaaaaaaaaaugcaucccccccccccccccccccccccccccccccaaaggcucuuuucagagccaccagaauu

SEQ ID NO: 7996 - RNA, 1950 nt, Artificial Sequence
  mRNA product Design b-5 comprising derived and/or modified sequence from HRSV(A2)__F-del_DSCav1_mut8 (opt6)
gggagacuccugucgggcggaaguaggaggaguagaguuuaaaaacaguacucuuuuuccgguucgggacguaguugaagcaacgacaagccggauaaccgcucuugagacaggaagcuuaccauggaacuacucauauugaaagccaacgcaaucacaacaauacuaaccgccguaacauuuugcuucgcgucaggccaaaauauaacagaagaauuuuaccaaucaacaugcuccgccguaucaaaaggauaccuaggugcauuacgaaccgguugguacacaucaguaaucacaauagaacuuuccaacauuaaagaaauaaaaugcaauggcacagacgcaaaagucaaacuaauaaaacaagaacuagacaaauauaaaaacgccgucacagacuuacaacuauuaaugcaaagcacaccagcaacaggauccggaucagcaauagcaucaggaguagccgucuguaaaguacuacaccuagaaggcgaaguuaauaaaauuaaaucagcuuuauuaucaaccaacaaagcaguaguaucacuauccggaugcggagucuccguccuaacauucaaaguacuagaccucaagaauuacauagauaaacaacuacuaccaauacucaacaaacaaucauguucaauaccaaacaucgaaaccgucauagaauuucaacaaaaaaauaauagacucuuagaaauaacacgagaauuuagcguaaacgcaggagucacaaccccugucucaacauacaugcuaaccaauuccgaauuauuaucacucauaaaugacaugccaauaacuaaugaccaaaaaaaacuuaugucaaacaacguacaaauaguaagacaacaaucauauucaauaaugugcauaaucaaagaagaaguuuuagcauauguaguacaacuaccacuauauggcgucauagacacaccaugcuggaaauuacacacaucaccucuaugcacaacaaacacaaaagaaggaagcaacauuugccuaaccagaaccgauagaggaugguacugcgauaacgcaggcucaguaucauucuucccucaagccgaaacuugcaaaguccaaucaaauagagucuucugcgauacaaugaacuccuuaacuuuaccaucagaaguaaaucuaugcaacguagauaucuuuaauccaaaauacgauugcaaaaucaugacaucaaaaacagauguaucaucuaguguaauuaccucccuaggagcaauaguaagcugcuacggaaaaacaaaaugcaccgccucuaacaaaugucguggaauaauaaaaacauucucaaacggaugcgauuauguaucaaauaaaggugucgacaccguaucaguaggcaauacacuauacuauguaaauaaacaagaaggacaaucacucuacgucaaaggugaaccaauaauaaacuucuacgacccacuuguauucccaagcgacgaauuugacgcaucaauaagccaaguaaacgaaaaaauaaaccaaucacuagcauucaucagaaaaucagacgaacuacuccacaauguaaaugcaggaaaaucaacaaccaauaucaugauaacaaccauaauaauagucauaauaguaauacuauuaucccucauagccguuggacuacuccuauauuguaaagcacgauaaggacuaguacuggcugcaucucccuuuccucuguccuccauccuucucccaggauggugaagggggaccugguacccagugauccccaccccaggauccuaaaucaugacuuaccugcuaauaaaaacucauuggaaaagugagaagaucuaaaaaaaaaaaaaaaaaaaaaaaaaaaaaaaaaaaaaaaaaaaaaaaaaaaaaaaaaaaaaaaaugcaucccccccccccccccccccccccccccccccaaaggcucuuuucagagccaccagaauu

SEQ ID NO: 7997 - RNA, 1950 nt, Artificial Sequence
  mRNA product Design b-5 comprising derived and/or modified sequence from HRSV(A2)__F-del_DSCav1_mut8 (opt11)
gggagacuccugucgggcggaaguaggaggaguagaguuuaaaaacaguacucuuuuuccgguucgggacguaguugaagcaacgacaagccggauaaccgcucuugagacaggaagcuuaccauggaacuccucauccucaaagccaacgccaucaccaccauacucaccgcaguaaccuucugcuucgcauccggccaaaacaucacagaagaguucuaccagaguaccugcuccgccgucuccaaaggcuaccuuggcgcccuccguaccgggugguacacauccgucaucacaaucgaacucuccaacaucaaagaaauaaagugcaacggcacagacgccaaaguaaaacugauaaagcaagaacucgacaaauacaaaaacgccguaaccgaccuccagcuacuaaugcaauccacucccgccaccggcagcggauccgccaucgccuccggaguagccgucuguaaagucuuacaccucgaaggcgaagugaacaaaaucaaauccgcccuacucucaaccaacaaagccguaguaucacucuccgggugcggcguuucagugcuaacguucaaaguccuugaccucaaaaacuacaucgacaaacaacuccuccccauccuaaauaaacaauccugcuccauacccaacaucgagacugucaucgaguuccagcagaaaaacaaccgacuccucgaaaucacacgcgaguucucugucaacgccggcgucacaacccccgucuccacauacaugcucaccaacagcgaacuccucucccuaaucaaugacaugcccaucaccaacgaccaaaagaaacucaugucaaacaacguccaaaucguccgccaacaauccuacagcaucaugugcaucaucaaagaagaaguucucgcauacguaguacaacucccccucuacggagugaucgacacccccugcuggaaacuacacaccagcccgcuuugcaccacaaacaccaaggaaggcuccaacaucugccucacucgaaccgaccgcggcugguacugcgacaacgcaggcuccgucaguuucuuuccccaagcagaaacaugcaaaguccaauccaaccgaguauucugcgacaccaugaacucccucacccuaccauccgaaguuaaccuaugcaacguggacaucuucaaccccaaguacgacugcaaaauuaugaccuccaaaaccgacguauccuccagcgucaucaccagccucggagcaauagucuccugcuacggcaagaccaagugcaccgcuuccaacaagugucgcggaaucaucaaaaccuucucaaacggcugcgacuacgucuccaacaaaggcgucgacaccguauccguaggaaacacccuauacuacgucaacaaacaagaaggacaaucccucuaugucaaaggcgaacccaucaucaauuucuacgacccccuagucuucccuuccgacgaguucgacgcguccaucagccaagucaaugaaaagaucaaccagagccuggcauucauccgcaaauccgacgaacuccuccacaacgucaacgcgggaaaauccacgacaaacaucaugaucaccaccaucaucaucgucaucauagucauucuccuuucucucaucgccgugggacuacuucucuacugcaaagcccgauaaggacuaguacuggcugcaucucccuuuccucuguccuccauccuucucccaggauggugaagggggaccugguacccagugauccccaccccaggauccuaaaucaugacuuaccugcuaauaaaaacucauuggaaaagugagaagaucuaaaaaaaaaaaaaaaaaaaaaaaaaaaaaaaaaaaaaaaaaaaaaaaaaaaaaaaaaaaaaaaaugcaucccccccccccccccccccccccccccccccaaaggcucuuuucagagccaccagaauu

SEQ ID NO: 7998 - RNA, 1856 nt, Artificial Sequence
  mRNA product Design c-1 comprising derived and/or modified sequence from HRSV(A2)__F-del_DSCav1_mut8 (opt1)
gggagaguccgcucagccagguugcagaagcggcuuagcguguguccuaaucuucucucugcguguagguaggccugugccgcaaacaagcuuaccauggagcugcucauccugaaggccaacgccaucaccaccauccugacggcggugaccuucugcuucgccagcggccagaacaucaccgaggaguucuaccaguccacgugcagcgccgucuccaagggguaccucggcgcccugcggaccggcugguacaccuccgugaucaccaucgagcugagcaacaucaaggagaucaagugcaacgggaccgacgccaaggugaagcucaucaagcaggagcuggacaaguacaagaacgcggucacggaccugcagcuccugaugcaguccaccccggcaaccggcuccggcuccgccaucgcgagcggcgucgccgugugcaaggugcugcaccucgagggggaggucaacaagaucaagagcgcccugcuguccaccaacaaggccguggugagccucuccggcugcggcgucagcgugcugaccuucaaggugcuggaccucaagaacuacaucgacaagcagcugcugcccauccugaacaagcagagcugcuccauccccaacaucgagacggugaucgaguuccagcagaagaacaaccggcuccuggagaucacccgcgaguucagcgugaacgccggggucaccacccccguguccacguacaugcugaccaacagcgagcuccugucccugaucaacgacaugccgaucaccaacgaccagaagaagcucaugagcaacaacgugcagaucguccggcagcaguccuacagcaucaugugcaucaucaaggaggaggugcuggcguacgugguccagcugccccucuacggcgugaucgacacccccugcuggaagcugcacacgagcccccugugcaccaccaacaccaaggagggguccaacaucugccucacgcgcaccgaccggggcugguacugcgacaacgccggcagcgucuccuucuucccgcaggccgagaccugcaaggugcagagcaaccgcguguucugcgacaccaugaacucccugacgcugcccagcgagguaaaccucugcaacgucgacaucuucaaccccaaguacgacugcaagaucaugaccuccaagaccgacgugagcuccagcgugaucaccucccugggggccaucgucagcugcuacggcaagacgaagugcaccgccagcaacaagugccgggggaucaucaagaccuucuccaacggcugcgacuacgugagcaacaagggcguggacaccguguccgucgggaacacccuguacuacgugaacaagcaggagggccagagccucuacgugaagggggagcccaucaucaacuucuacgacccgcuggucuuccccuccgacgaguucgacgcgagcaucucccaggugaacgagaagaucaaccagagccuggccuucauccgcaaguccgacgagcugcuccacaacgugaacgccggcaagagcacgaccaacaucaugaucaccaccaucaucaucgucaucaucgugauccugcugucccucaucgccguggggcugcugcucuacugcaaggcccggugaggacuaguguccaccugucccuccugggcugcuggauugucucguuuuccugccaaauaaacaggaucagcgcuuuacagaucuaaaaaaaaaaaaaaaaaaaaaaaaaaaaaaaaaaaaaaaaaaaaaaaaaaaaaaaaaaaaaaaaugcaucccccccccccccccccccccccccccccccaaaggcucuuuucagagccaccagaauu

SEQ ID NO: 7999 - RNA, 1856 nt, Artificial Sequence
  mRNA product Design c-1 comprising derived and/or modified sequence from HRSV(A2)__F-del_DSCav1_mut8 (opt1)
gggagaguccgcucagccagguugcagaagcggcuuagcguguguccuaaucuucucucugcguguagguaggccugugccgcaaacaagcuuaccauggagcugcucauccugaaggccaacgccaucaccaccauccugacggcggugaccuucugcuucgccagcggccagaacaucaccgaggaguucuaccaguccacgugcagcgccgucuccaagggguaccucggcgcccugcgcaccgggugguacaccagcgugaucaccaucgagcuguccaacaucaaggagaucaagugcaacggcaccgacgccaaggugaagcucaucaagcaggagcuggacaaguacaagaacgcggucacggaccugcagcuccugaugcagagcacccccgccaccggguccggcagcgccaucgccuccggcguggcggugugcaagguccugcaccucgagggggaggugaacaagaucaagagcgcccugcuguccaccaacaaggccguggucagccucuccggcugcggggugagcgugcugacguucaagguccuggaccucaagaacuacaucgacaagcagcugcugccgauccucaacaagcaguccugcagcauccccaacaucgagaccgugaucgaguuccagcagaagaacaaccggcugcuggagaucacccgcgaguucuccgugaacgccggcgucaccacgcccgugagcaccuacaugcucaccaacuccgagcugcugagccucaucaacgacaugcccaucaccaacgaccagaagaagcugaugagcaacaacgugcagaucguccggcagcaguccuacagcaucaugugcaucaucaaggaggaggugcuggccuacgugguccagcucccgcuguacggggugaucgacacgcccugcuggaagcugcacaccagcccccucugcaccaccaacacgaaggagggcuccaacaucugccugacccgcaccgaccggggcugguacugcgacaacgcgggguccgugagcuucuucccccaggccgagaccugcaagguccaguccaaccgcguguucugcgacacgaugaacagccugacccucccguccgaggucaaccugugcaacguggacaucuucaaccccaaguacgacugcaagaucaugaccagcaagaccgacguguccagcuccgucaucacgagccugggcgccaucguguccugcuacgggaagaccaagugcaccgccagcaacaagugccggggcaucaucaagaccuucuccaacggcugcgacuacgugagcaacaagggggucgacacgguguccgugggcaacacccucuacuacgucaacaagcaggaggggcagagccuguacgugaagggcgagcccaucaucaacuucuacgacccccugguguucccgagcgacgaguucgacgccuccaucagccaggucaacgagaagaucaaccagucccucgcguucauccgcaagagcgacgagcugcugcacaacgugaacgccgggaaguccaccaccaacaucaugaucaccacgaucaucaucgugaucaucgucauccuccugagccugaucgccgugggccuccugcuguacugcaaggcccggugaggacuaguguccaccugucccuccugggcugcuggauugucucguuuuccugccaaauaaacaggaucagcgcuuuacagaucuaaaaaaaaaaaaaaaaaaaaaaaaaaaaaaaaaaaaaaaaaaaaaaaaaaaaaaaaaaaaaaaaugcaucccccccccccccccccccccccccccccccaaaggcucuuuucagagccaccagaauu

SEQ ID NO: 8000 - RNA, 1856 nt, Artificial Sequence
  mRNA product Design c-1 comprising derived and/or modified sequence from HRSV(A2)__F-del_DSCav1_mut8 (opt2)
gggagaguccgcucagccagguugcagaagcggcuuagcguguguccuaaucuucucucugcguguagguaggccugugccgcaaacaagcuuaccauggagcuccucauccucaaggccaacgccaucaccaccauccucaccgccgucaccuucugcuucgccuccggccagaacaucaccgaggaguucuaccaguccaccugcuccgccgucuccaagggcuaccucggcgcccuccgcaccggcugguacaccuccgucaucaccaucgagcucuccaacaucaaggagaucaagugcaacggcaccgacgccaaggucaagcucaucaagcaggagcucgacaaguacaagaacgccgucaccgaccuccagcuccucaugcaguccacccccgccaccggcuccggcuccgccaucgccuccggcgucgccgucugcaagguccuccaccucgagggcgaggucaacaagaucaaguccgcccuccucuccaccaacaaggccgucgucucccucuccggcugcggcgucuccguccucaccuucaagguccucgaccucaagaacuacaucgacaagcagcuccuccccauccucaacaagcaguccugcuccauccccaacaucgagaccgucaucgaguuccagcagaagaacaaccgccuccucgagaucacccgcgaguucuccgucaacgccggcgucaccacccccgucuccaccuacaugcucaccaacuccgagcuccucucccucaucaacgacaugcccaucaccaacgaccagaagaagcucauguccaacaacguccagaucguccgccagcaguccuacuccaucaugugcaucaucaaggaggagguccucgccuacgucguccagcucccccucuacggcgucaucgacacccccugcuggaagcuccacaccuccccccucugcaccaccaacaccaaggagggcuccaacaucugccucacccgcaccgaccgcggcugguacugcgacaacgccggcuccgucuccuucuucccccaggccgagaccugcaagguccaguccaaccgcgucuucugcgacaccaugaacucccucacccuccccuccgaggucaaccucugcaacgucgacaucuucaaccccaaguacgacugcaagaucaugaccuccaagaccgacgucuccuccuccgucaucaccucccucggcgccaucgucuccugcuacggcaagaccaagugcaccgccuccaacaagugccgcggcaucaucaagaccuucuccaacggcugcgacuacgucuccaacaagggcgucgacaccgucuccgucggcaacacccucuacuacgucaacaagcaggagggccagucccucuacgucaagggcgagcccaucaucaacuucuacgacccccucgucuuccccuccgacgaguucgacgccuccaucucccaggucaacgagaagaucaaccagucccucgccuucauccgcaaguccgacgagcuccuccacaacgucaacgccggcaaguccaccaccaacaucaugaucaccaccaucaucaucgucaucaucgucauccuccucucccucaucgccgucggccuccuccucuacugcaaggcccgcugaggacuaguguccaccugucccuccugggcugcuggauugucucguuuuccugccaaauaaacaggaucagcgcuuuacagaucuaaaaaaaaaaaaaaaaaaaaaaaaaaaaaaaaaaaaaaaaaaaaaaaaaaaaaaaaaaaaaaaaugcaucccccccccccccccccccccccccccccccaaaggcucuuuucagagccaccagaauu

SEQ ID NO: 8001 - RNA, 1856 nt, Artificial Sequence
  mRNA product Design c-1 comprising derived and/or modified sequence from HRSV(A2)__F-del_DSCav1_mut8 (opt3)
gggagaguccgcucagccagguugcagaagcggcuuagcguguguccuaaucuucucucugcguguagguaggccugugccgcaaacaagcuuaccauggagcugcucauccuuaaggccaacgcuauuaccacaauacugacugcagugacguucugcuuugccagcggccagaauaucaccgaagaguucuaccaauccacauguucugcggucucaaaaggguauuugggagcuuuaagaacugguugguacaccaguguuauuacaaucgaacugagcaacauuaaggagaucaaaugcaauggcaccgacgccaaggugaaacuaauaaagcaggaacucgauaaguauaaaaacgcaguaacugaccugcagcuucugaugcaguccacacccgccaccgggucuggaucggcuaucgcaucaggcguggccgucuguaagguguugcaccucgagggugagguuaauaaaauuaagagcgcucugcugaguacgaacaaagccguggucucccucucugggugcggagugagcguauuaacuuuuaagguucuggaucuuaagaauuacaucgacaaacaauugcugccuauucuaaacaagcaguccuguucaaucccaaauauagaaaccgugauugaguuccagcagaaaaacaauaggcuccuggaaaucacacgggaguuuagugucaacgcgggcgugacuaccccggugagcacauauaugcuuaccaauucugagcuguugucccucauuaacgauaugcccaucacgaaugaccaaaagaaacugaugucaaacaacguccagaucguucgccagcagagcuacaguauuaugugcauaaucaaggaagagguguuagcauauguagugcaacugccucucuacggcgucauugauacuccauguuggaaacuucauacaucuccccugugcaccacuaauacaaaggaaggguccaacaucuguuugacccgaacggaccguggaugguacugcgauaaugccgguagcgugucguucuuuccucaggcugagaccuguaagguucagucuaacagaguguucugcgacacaaugaacucccuaacucugccaucagaagucaaucucugcaauguggauauauuuaaccccaaauaugacuguaagauuaugaccaguaaaacagauguaagcuccucuguuaucacuagccugggcgccaucgugucaugcuacgggaagaccaaauguacagcaaguaauaagugcaggggaauuaucaagaccuucuccaacggcugugacuaugucagcaauaaagguguggacacugucucuguggggaacacgcuuuacuauguuaauaagcaagagggacagucacuguacgugaaaggcgagccuauuauaaacuuuuaugauccauugguauucccgagugacgaauuugaugcuagcaucucccaggucaaugagaagauuaaccagucucucgccuucauccggaaaucggacgaacuguuacacaacgugaaugcgggcaagagcacaaccaacaucaugauuacuaccauaaucauuguuaucauugugauccugcuaucccucauagccgucgggcugcuuuuguacugcaaggcacgcugaggacuaguguccaccugucccuccugggcugcuggauugucucguuuuccugccaaauaaacaggaucagcgcuuuacagaucuaaaaaaaaaaaaaaaaaaaaaaaaaaaaaaaaaaaaaaaaaaaaaaaaaaaaaaaaaaaaaaaaugcaucccccccccccccccccccccccccccccccaaaggcucuuuucagagccaccagaauu

SEQ ID NO: 8002 - RNA, 1856 nt, Artificial Sequence
  mRNA product Design c-1 comprising derived and/or modified sequence from HRSV(A2)__F-del_DSCav1_mut8 (opt4)
gggagaguccgcucagccagguugcagaagcggcuuagcguguguccuaaucuucucucugcguguagguaggccugugccgcaaacaagcuuaccauggagcugcugauccugaaggccaacgccaucaccaccauccugaccgccgugaccuucugcuucgccagcggccagaacaucaccgaggaguucuaccagagcaccugcagcgccgugagcaagggcuaccugggcgcccugagaaccggcugguacaccagcgugaucaccaucgagcugagcaacaucaaggagaucaagugcaacggcaccgacgccaaggugaagcugaucaagcaggagcuggacaaguacaagaacgccgugaccgaccugcagcugcugaugcagagcacccccgccaccggcagcggcagcgccaucgccagcggcguggccgugugcaaggugcugcaccuggagggcgaggugaacaagaucaagagcgcccugcugagcaccaacaaggccguggugagccugagcggcugcggcgugagcgugcugaccuucaaggugcuggaccugaagaacuacaucgacaagcagcugcugcccauccugaacaagcagagcugcagcauccccaacaucgagaccgugaucgaguuccagcagaagaacaacagacugcuggagaucaccagagaguucagcgugaacgccggcgugaccacccccgugagcaccuacaugcugaccaacagcgagcugcugagccugaucaacgacaugcccaucaccaacgaccagaagaagcugaugagcaacaacgugcagaucgugagacagcagagcuacagcaucaugugcaucaucaaggaggaggugcuggccuacguggugcagcugccccuguacggcgugaucgacacccccugcuggaagcugcacaccagcccccugugcaccaccaacaccaaggagggcagcaacaucugccugaccagaaccgacagaggcugguacugcgacaacgccggcagcgugagcuucuucccccaggccgagaccugcaaggugcagagcaacagaguguucugcgacaccaugaacagccugacccugcccagcgaggugaaccugugcaacguggacaucuucaaccccaaguacgacugcaagaucaugaccagcaagaccgacgugagcagcagcgugaucaccagccugggcgccaucgugagcugcuacggcaagaccaagugcaccgccagcaacaagugcagaggcaucaucaagaccuucagcaacggcugcgacuacgugagcaacaagggcguggacaccgugagcgugggcaacacccuguacuacgugaacaagcaggagggccagagccuguacgugaagggcgagcccaucaucaacuucuacgacccccugguguuccccagcgacgaguucgacgccagcaucagccaggugaacgagaagaucaaccagagccuggccuucaucagaaagagcgacgagcugcugcacaacgugaacgccggcaagagcaccaccaacaucaugaucaccaccaucaucaucgugaucaucgugauccugcugagccugaucgccgugggccugcugcuguacugcaaggccagaugaggacuaguguccaccugucccuccugggcugcuggauugucucguuuuccugccaaauaaacaggaucagcgcuuuacagaucuaaaaaaaaaaaaaaaaaaaaaaaaaaaaaaaaaaaaaaaaaaaaaaaaaaaaaaaaaaaaaaaaugcaucccccccccccccccccccccccccccccccaaaggcucuuuucagagccaccagaauu

SEQ ID NO: 8003 - RNA, 1856 nt, Artificial Sequence
  mRNA product Design c-1 comprising derived and/or modified sequence from HRSV(A2)__F-del_DSCav1_mut8 (opt5)
gggagaguccgcucagccagguugcagaagcggcuuagcguguguccuaaucuucucucugcguguagguaggccugugccgcaaacaagcuuaccauggagcugcucauccugaaggccaacgcuauuaccacaauccuuacggccgugaccuucugcuuugcgagcggccagaauauuacagaagaguucuaccaauccaccuguucugcugucagcaaaggguaucugggagcccucagaacaggcugguacaccuccguuaucacaauugaacugucuaacaucaaggagaucaaaugcaaugggaccgacgccaaggugaaacuuauuaagcaggaacuggauaaguauaaaaacgcugugacggaccuccagcugcugaugcagagcacccccgccacaggauccggcucugcuaucgccagcggggucgcgguguguaagguucuccaccuggagggagaggugaauaaaauuaaguccgcccuucugagcaccaacaaagcugucgugucucucuccggcugcggcguuagcgugcugacauuuaagguccuugaucugaagaauuacaucgacaaacaacuccugccuauucugaacaagcagucuuguuccaucccgaauauugaaaccgugaucgaguuccagcagaaaaacaaucggcuccuggaaaucacgcgcgaguuuagcgugaacgccggggucacaacccccguuucuacauauaugcuuaccaauuccgagcugcucagccugauuaacgauaugccuaucaccaaugaccaaaagaaacuuauguccaacaacgugcagauugugagacagcagucuuacagcaucaugugcauuaucaaggaagagguccuggcuuaugugguucaacucccccuguacggagugaucgauacaccuuguuggaaacugcauacgagcccccucugcaccacaaauaccaaggaaggcagcaacauuugucugacacggaccgaccgcgggugguacugcgauaaugccggaucugucuccuucuuuccucaggcggagacguguaaggugcagagcaacagaguuuucugcgacacaaugaacucucuuacccugccgagcgaagugaaucucugcaaugucgauaucuuuaaccccaaauaugacuguaagauuaugaccuccaaaacagaugugucuagcuccgucaucaccagccugggcgccauugugucuugcuacgggaagacaaaauguacggcuuccaauaagugccggggaaucaucaagaccuucagcaacggcugugacuauguuucuaauaaaggcguggacacagucuccguggggaacacccuuuacuauguuaauaagcaagagggacagagccuguacgugaaaggcgagccuauuaucaacuuuuaugauccccucgucuucccuuccgacgaauuugaugccucuauuagccaggugaaugagaagaucaaccagucccuggcuuucauucgcaaaucugacgaacugcuccacaacgugaaugccgggaaguccacaaccaacaucaugauuacgaccaucaucauuguuaucauugucauccugcuuucccugauugccgugggacuccugcuguacugcaaggcuagaugaggacuaguguccaccugucccuccugggcugcuggauugucucguuuuccugccaaauaaacaggaucagcgcuuuacagaucuaaaaaaaaaaaaaaaaaaaaaaaaaaaaaaaaaaaaaaaaaaaaaaaaaaaaaaaaaaaaaaaaugcaucccccccccccccccccccccccccccccccaaaggcucuuuucagagccaccagaauu

SEQ ID NO: 8004 - RNA, 1856 nt, Artificial Sequence
  mRNA product Design c-1 comprising derived and/or modified sequence from HRSV(A2)__F-del_DSCav1_mut8 (opt6)
gggagaguccgcucagccagguugcagaagcggcuuagcguguguccuaaucuucucucugcguguagguaggccugugccgcaaacaagcuuaccauggaacuacucauauugaaagccaacgcaaucacaacaauacuaaccgccguaacauuuugcuucgcgucaggccaaaauauaacagaagaauuuuaccaaucaacaugcuccgccguaucaaaaggauaccuaggugcauuacgaaccgguugguacacaucaguaaucacaauagaacuuuccaacauuaaagaaauaaaaugcaauggcacagacgcaaaagucaaacuaauaaaacaagaacuagacaaauauaaaaacgccgucacagacuuacaacuauuaaugcaaagcacaccagcaacaggauccggaucagcaauagcaucaggaguagccgucuguaaaguacuacaccuagaaggcgaaguuaauaaaauuaaaucagcuuuauuaucaaccaacaaagcaguaguaucacuauccggaugcggagucuccguccuaacauucaaaguacuagaccucaagaauuacauagauaaacaacuacuaccaauacucaacaaacaaucauguucaauaccaaacaucgaaaccgucauagaauuucaacaaaaaaauaauagacucuuagaaauaacacgagaauuuagcguaaacgcaggagucacaaccccugucucaacauacaugcuaaccaauuccgaauuauuaucacucauaaaugacaugccaauaacuaaugaccaaaaaaaacuuaugucaaacaacguacaaauaguaagacaacaaucauauucaauaaugugcauaaucaaagaagaaguuuuagcauauguaguacaacuaccacuauauggcgucauagacacaccaugcuggaaauuacacacaucaccucuaugcacaacaaacacaaaagaaggaagcaacauuugccuaaccagaaccgauagaggaugguacugcgauaacgcaggcucaguaucauucuucccucaagccgaaacuugcaaaguccaaucaaauagagucuucugcgauacaaugaacuccuuaacuuuaccaucagaaguaaaucuaugcaacguagauaucuuuaauccaaaauacgauugcaaaaucaugacaucaaaaacagauguaucaucuaguguaauuaccucccuaggagcaauaguaagcugcuacggaaaaacaaaaugcaccgccucuaacaaaugucguggaauaauaaaaacauucucaaacggaugcgauuauguaucaaauaaaggugucgacaccguaucaguaggcaauacacuauacuauguaaauaaacaagaaggacaaucacucuacgucaaaggugaaccaauaauaaacuucuacgacccacuuguauucccaagcgacgaauuugacgcaucaauaagccaaguaaacgaaaaaauaaaccaaucacuagcauucaucagaaaaucagacgaacuacuccacaauguaaaugcaggaaaaucaacaaccaauaucaugauaacaaccauaauaauagucauaauaguaauacuauuaucccucauagccguuggacuacuccuauauuguaaagcacgauaaggacuaguguccaccugucccuccugggcugcuggauugucucguuuuccugccaaauaaacaggaucagcgcuuuacagaucuaaaaaaaaaaaaaaaaaaaaaaaaaaaaaaaaaaaaaaaaaaaaaaaaaaaaaaaaaaaaaaaaugcaucccccccccccccccccccccccccccccccaaaggcucuuuucagagccaccagaauu

SEQ ID NO: 8005 - RNA, 1856 nt, Artificial Sequence
  mRNA product Design c-1 comprising derived and/or modified sequence from HRSV(A2)__F-del_DSCav1_mut8 (opt11)
gggagaguccgcucagccagguugcagaagcggcuuagcguguguccuaaucuucucucugcguguagguaggccugugccgcaaacaagcuuaccauggaacuccucauccucaaagccaacgccaucaccaccauacucaccgcaguaaccuucugcuucgcauccggccaaaacaucacagaagaguucuaccagaguaccugcuccgccgucuccaaaggcuaccuuggcgcccuccguaccgggugguacacauccgucaucacaaucgaacucuccaacaucaaagaaauaaagugcaacggcacagacgccaaaguaaaacugauaaagcaagaacucgacaaauacaaaaacgccguaaccgaccuccagcuacuaaugcaauccacucccgccaccggcagcggauccgccaucgccuccggaguagccgucuguaaagucuuacaccucgaaggcgaagugaacaaaaucaaauccgcccuacucucaaccaacaaagccguaguaucacucuccgggugcggcguuucagugcuaacguucaaaguccuugaccucaaaaacuacaucgacaaacaacuccuccccauccuaaauaaacaauccugcuccauacccaacaucgagacugucaucgaguuccagcagaaaaacaaccgacuccucgaaaucacacgcgaguucucugucaacgccggcgucacaacccccgucuccacauacaugcucaccaacagcgaacuccucucccuaaucaaugacaugcccaucaccaacgaccaaaagaaacucaugucaaacaacguccaaaucguccgccaacaauccuacagcaucaugugcaucaucaaagaagaaguucucgcauacguaguacaacucccccucuacggagugaucgacacccccugcuggaaacuacacaccagcccgcuuugcaccacaaacaccaaggaaggcuccaacaucugccucacucgaaccgaccgcggcugguacugcgacaacgcaggcuccgucaguuucuuuccccaagcagaaacaugcaaaguccaauccaaccgaguauucugcgacaccaugaacucccucacccuaccauccgaaguuaaccuaugcaacguggacaucuucaaccccaaguacgacugcaaaauuaugaccuccaaaaccgacguauccuccagcgucaucaccagccucggagcaauagucuccugcuacggcaagaccaagugcaccgcuuccaacaagugucgcggaaucaucaaaaccuucucaaacggcugcgacuacgucuccaacaaaggcgucgacaccguauccguaggaaacacccuauacuacgucaacaaacaagaaggacaaucccucuaugucaaaggcgaacccaucaucaauuucuacgacccccuagucuucccuuccgacgaguucgacgcguccaucagccaagucaaugaaaagaucaaccagagccuggcauucauccgcaaauccgacgaacuccuccacaacgucaacgcgggaaaauccacgacaaacaucaugaucaccaccaucaucaucgucaucauagucauucuccuuucucucaucgccgugggacuacuucucuacugcaaagcccgauaaggacuaguguccaccugucccuccugggcugcuggauugucucguuuuccugccaaauaaacaggaucagcgcuuuacagaucuaaaaaaaaaaaaaaaaaaaaaaaaaaaaaaaaaaaaaaaaaaaaaaaaaaaaaaaaaaaaaaaaugcaucccccccccccccccccccccccccccccccaaaggcucuuuucagagccaccagaauu

SEQ ID NO: 8006 - RNA, 1946 nt, Artificial Sequence
  mRNA product Design c-2 comprising derived and/or modified sequence from HRSV(A2)__F-del_DSCav1_mut8 (opt1)
gggagacuccugucgggcggaaguaggaggaguagaguuuaaaaacaguacucuuuuuccgguucgggacguaguugaagcaacgacaagccggauaaccgcucuugagacaggaagcuuaccauggagcugcucauccugaaggccaacgccaucaccaccauccugacggcggugaccuucugcuucgccagcggccagaacaucaccgaggaguucuaccaguccacgugcagcgccgucuccaagggguaccucggcgcccugcggaccggcugguacaccuccgugaucaccaucgagcugagcaacaucaaggagaucaagugcaacgggaccgacgccaaggugaagcucaucaagcaggagcuggacaaguacaagaacgcggucacggaccugcagcuccugaugcaguccaccccggcaaccggcuccggcuccgccaucgcgagcggcgucgccgugugcaaggugcugcaccucgagggggaggucaacaagaucaagagcgcccugcuguccaccaacaaggccguggugagccucuccggcugcggcgucagcgugcugaccuucaaggugcuggaccucaagaacuacaucgacaagcagcugcugcccauccugaacaagcagagcugcuccauccccaacaucgagacggugaucgaguuccagcagaagaacaaccggcuccuggagaucacccgcgaguucagcgugaacgccggggucaccacccccguguccacguacaugcugaccaacagcgagcuccugucccugaucaacgacaugccgaucaccaacgaccagaagaagcucaugagcaacaacgugcagaucguccggcagcaguccuacagcaucaugugcaucaucaaggaggaggugcuggcguacgugguccagcugccccucuacggcgugaucgacacccccugcuggaagcugcacacgagcccccugugcaccaccaacaccaaggagggguccaacaucugccucacgcgcaccgaccggggcugguacugcgacaacgccggcagcgucuccuucuucccgcaggccgagaccugcaaggugcagagcaaccgcguguucugcgacaccaugaacucccugacgcugcccagcgagguaaaccucugcaacgucgacaucuucaaccccaaguacgacugcaagaucaugaccuccaagaccgacgugagcuccagcgugaucaccucccugggggccaucgucagcugcuacggcaagacgaagugcaccgccagcaacaagugccgggggaucaucaagaccuucuccaacggcugcgacuacgugagcaacaagggcguggacaccguguccgucgggaacacccuguacuacgugaacaagcaggagggccagagccucuacgugaagggggagcccaucaucaacuucuacgacccgcuggucuuccccuccgacgaguucgacgcgagcaucucccaggugaacgagaagaucaaccagagccuggccuucauccgcaaguccgacgagcugcuccacaacgugaacgccggcaagagcacgaccaacaucaugaucaccaccaucaucaucgucaucaucgugauccugcugucccucaucgccguggggcugcugcucuacugcaaggcccggugaggacuaguggaagcauuuuccuggcugauuaaaagaaauuacucagcuauggucaucuguuccuguuagaaggcuaugcagcauauuauauacuaugcgcauguuaugaaaugcauaauaaaaaauuuuaaaaaaucuaaaagaucuaaaaaaaaaaaaaaaaaaaaaaaaaaaaaaaaaaaaaaaaaaaaaaaaaaaaaaaaaaaaaaaaugcaucccccccccccccccccccccccccccccccaaaggcucuuuucagagccaccagaauu

SEQ ID NO: 8007 - RNA, 1946 nt, Artificial Sequence
  mRNA product Design c-2 comprising derived and/or modified sequence from HRSV(A2)__F-del_DSCav1_mut8 (opt1)
gggagacuccugucgggcggaaguaggaggaguagaguuuaaaaacaguacucuuuuuccgguucgggacguaguugaagcaacgacaagccggauaaccgcucuugagacaggaagcuuaccauggagcugcucauccugaaggccaacgccaucaccaccauccugacggcggugaccuucugcuucgccagcggccagaacaucaccgaggaguucuaccaguccacgugcagcgccgucuccaagggguaccucggcgcccugcgcaccgggugguacaccagcgugaucaccaucgagcuguccaacaucaaggagaucaagugcaacggcaccgacgccaaggugaagcucaucaagcaggagcuggacaaguacaagaacgcggucacggaccugcagcuccugaugcagagcacccccgccaccggguccggcagcgccaucgccuccggcguggcggugugcaagguccugcaccucgagggggaggugaacaagaucaagagcgcccugcuguccaccaacaaggccguggucagccucuccggcugcggggugagcgugcugacguucaagguccuggaccucaagaacuacaucgacaagcagcugcugccgauccucaacaagcaguccugcagcauccccaacaucgagaccgugaucgaguuccagcagaagaacaaccggcugcuggagaucacccgcgaguucuccgugaacgccggcgucaccacgcccgugagcaccuacaugcucaccaacuccgagcugcugagccucaucaacgacaugcccaucaccaacgaccagaagaagcugaugagcaacaacgugcagaucguccggcagcaguccuacagcaucaugugcaucaucaaggaggaggugcuggccuacgugguccagcucccgcuguacggggugaucgacacgcccugcuggaagcugcacaccagcccccucugcaccaccaacacgaaggagggcuccaacaucugccugacccgcaccgaccggggcugguacugcgacaacgcgggguccgugagcuucuucccccaggccgagaccugcaagguccaguccaaccgcguguucugcgacacgaugaacagccugacccucccguccgaggucaaccugugcaacguggacaucuucaaccccaaguacgacugcaagaucaugaccagcaagaccgacguguccagcuccgucaucacgagccugggcgccaucguguccugcuacgggaagaccaagugcaccgccagcaacaagugccggggcaucaucaagaccuucuccaacggcugcgacuacgugagcaacaagggggucgacacgguguccgugggcaacacccucuacuacgucaacaagcaggaggggcagagccuguacgugaagggcgagcccaucaucaacuucuacgacccccugguguucccgagcgacgaguucgacgccuccaucagccaggucaacgagaagaucaaccagucccucgcguucauccgcaagagcgacgagcugcugcacaacgugaacgccgggaaguccaccaccaacaucaugaucaccacgaucaucaucgugaucaucgucauccuccugagccugaucgccgugggccuccugcuguacugcaaggcccggugaggacuaguggaagcauuuuccuggcugauuaaaagaaauuacucagcuauggucaucuguuccuguuagaaggcuaugcagcauauuauauacuaugcgcauguuaugaaaugcauaauaaaaaauuuuaaaaaaucuaaaagaucuaaaaaaaaaaaaaaaaaaaaaaaaaaaaaaaaaaaaaaaaaaaaaaaaaaaaaaaaaaaaaaaaugcaucccccccccccccccccccccccccccccccaaaggcucuuuucagagccaccagaauu

SEQ ID NO: 8008 - RNA, 1946 nt, Artificial Sequence
  mRNA product Design c-2 comprising derived and/or modified sequence from HRSV(A2)__F-del_DSCav1_mut8 (opt2)
gggagacuccugucgggcggaaguaggaggaguagaguuuaaaaacaguacucuuuuuccgguucgggacguaguugaagcaacgacaagccggauaaccgcucuugagacaggaagcuuaccauggagcuccucauccucaaggccaacgccaucaccaccauccucaccgccgucaccuucugcuucgccuccggccagaacaucaccgaggaguucuaccaguccaccugcuccgccgucuccaagggcuaccucggcgcccuccgcaccggcugguacaccuccgucaucaccaucgagcucuccaacaucaaggagaucaagugcaacggcaccgacgccaaggucaagcucaucaagcaggagcucgacaaguacaagaacgccgucaccgaccuccagcuccucaugcaguccacccccgccaccggcuccggcuccgccaucgccuccggcgucgccgucugcaagguccuccaccucgagggcgaggucaacaagaucaaguccgcccuccucuccaccaacaaggccgucgucucccucuccggcugcggcgucuccguccucaccuucaagguccucgaccucaagaacuacaucgacaagcagcuccuccccauccucaacaagcaguccugcuccauccccaacaucgagaccgucaucgaguuccagcagaagaacaaccgccuccucgagaucacccgcgaguucuccgucaacgccggcgucaccacccccgucuccaccuacaugcucaccaacuccgagcuccucucccucaucaacgacaugcccaucaccaacgaccagaagaagcucauguccaacaacguccagaucguccgccagcaguccuacuccaucaugugcaucaucaaggaggagguccucgccuacgucguccagcucccccucuacggcgucaucgacacccccugcuggaagcuccacaccuccccccucugcaccaccaacaccaaggagggcuccaacaucugccucacccgcaccgaccgcggcugguacugcgacaacgccggcuccgucuccuucuucccccaggccgagaccugcaagguccaguccaaccgcgucuucugcgacaccaugaacucccucacccuccccuccgaggucaaccucugcaacgucgacaucuucaaccccaaguacgacugcaagaucaugaccuccaagaccgacgucuccuccuccgucaucaccucccucggcgccaucgucuccugcuacggcaagaccaagugcaccgccuccaacaagugccgcggcaucaucaagaccuucuccaacggcugcgacuacgucuccaacaagggcgucgacaccgucuccgucggcaacacccucuacuacgucaacaagcaggagggccagucccucuacgucaagggcgagcccaucaucaacuucuacgacccccucgucuuccccuccgacgaguucgacgccuccaucucccaggucaacgagaagaucaaccagucccucgccuucauccgcaaguccgacgagcuccuccacaacgucaacgccggcaaguccaccaccaacaucaugaucaccaccaucaucaucgucaucaucgucauccuccucucccucaucgccgucggccuccuccucuacugcaaggcccgcugaggacuaguggaagcauuuuccuggcugauuaaaagaaauuacucagcuauggucaucuguuccuguuagaaggcuaugcagcauauuauauacuaugcgcauguuaugaaaugcauaauaaaaaauuuuaaaaaaucuaaaagaucuaaaaaaaaaaaaaaaaaaaaaaaaaaaaaaaaaaaaaaaaaaaaaaaaaaaaaaaaaaaaaaaaugcaucccccccccccccccccccccccccccccccaaaggcucuuuucagagccaccagaauu

SEQ ID NO: 8009 - RNA, 1946 nt, Artificial Sequence
  mRNA product Design c-2 comprising derived and/or modified sequence from HRSV(A2)__F-del_DSCav1_mut8 (opt3)
gggagacuccugucgggcggaaguaggaggaguagaguuuaaaaacaguacucuuuuuccgguucgggacguaguugaagcaacgacaagccggauaaccgcucuugagacaggaagcuuaccauggagcugcucauccuuaaggccaacgcuauuaccacaauacugacugcagugacguucugcuuugccagcggccagaauaucaccgaagaguucuaccaauccacauguucugcggucucaaaaggguauuugggagcuuuaagaacugguugguacaccaguguuauuacaaucgaacugagcaacauuaaggagaucaaaugcaauggcaccgacgccaaggugaaacuaauaaagcaggaacucgauaaguauaaaaacgcaguaacugaccugcagcuucugaugcaguccacacccgccaccgggucuggaucggcuaucgcaucaggcguggccgucuguaagguguugcaccucgagggugagguuaauaaaauuaagagcgcucugcugaguacgaacaaagccguggucucccucucugggugcggagugagcguauuaacuuuuaagguucuggaucuuaagaauuacaucgacaaacaauugcugccuauucuaaacaagcaguccuguucaaucccaaauauagaaaccgugauugaguuccagcagaaaaacaauaggcuccuggaaaucacacgggaguuuagugucaacgcgggcgugacuaccccggugagcacauauaugcuuaccaauucugagcuguugucccucauuaacgauaugcccaucacgaaugaccaaaagaaacugaugucaaacaacguccagaucguucgccagcagagcuacaguauuaugugcauaaucaaggaagagguguuagcauauguagugcaacugccucucuacggcgucauugauacuccauguuggaaacuucauacaucuccccugugcaccacuaauacaaaggaaggguccaacaucuguuugacccgaacggaccguggaugguacugcgauaaugccgguagcgugucguucuuuccucaggcugagaccuguaagguucagucuaacagaguguucugcgacacaaugaacucccuaacucugccaucagaagucaaucucugcaauguggauauauuuaaccccaaauaugacuguaagauuaugaccaguaaaacagauguaagcuccucuguuaucacuagccugggcgccaucgugucaugcuacgggaagaccaaauguacagcaaguaauaagugcaggggaauuaucaagaccuucuccaacggcugugacuaugucagcaauaaagguguggacacugucucuguggggaacacgcuuuacuauguuaauaagcaagagggacagucacuguacgugaaaggcgagccuauuauaaacuuuuaugauccauugguauucccgagugacgaauuugaugcuagcaucucccaggucaaugagaagauuaaccagucucucgccuucauccggaaaucggacgaacuguuacacaacgugaaugcgggcaagagcacaaccaacaucaugauuacuaccauaaucauuguuaucauugugauccugcuaucccucauagccgucgggcugcuuuuguacugcaaggcacgcugaggacuaguggaagcauuuuccuggcugauuaaaagaaauuacucagcuauggucaucuguuccuguuagaaggcuaugcagcauauuauauacuaugcgcauguuaugaaaugcauaauaaaaaauuuuaaaaaaucuaaaagaucuaaaaaaaaaaaaaaaaaaaaaaaaaaaaaaaaaaaaaaaaaaaaaaaaaaaaaaaaaaaaaaaaugcaucccccccccccccccccccccccccccccccaaaggcucuuuucagagccaccagaauu

SEQ ID NO: 8010 - RNA, 1946 nt, Artificial Sequence
  mRNA product Design c-2 comprising derived and/or modified sequence from HRSV(A2)__F-del_DSCav1_mut8 (opt4)
gggagacuccugucgggcggaaguaggaggaguagaguuuaaaaacaguacucuuuuuccgguucgggacguaguugaagcaacgacaagccggauaaccgcucuugagacaggaagcuuaccauggagcugcugauccugaaggccaacgccaucaccaccauccugaccgccgugaccuucugcuucgccagcggccagaacaucaccgaggaguucuaccagagcaccugcagcgccgugagcaagggcuaccugggcgcccugagaaccggcugguacaccagcgugaucaccaucgagcugagcaacaucaaggagaucaagugcaacggcaccgacgccaaggugaagcugaucaagcaggagcuggacaaguacaagaacgccgugaccgaccugcagcugcugaugcagagcacccccgccaccggcagcggcagcgccaucgccagcggcguggccgugugcaaggugcugcaccuggagggcgaggugaacaagaucaagagcgcccugcugagcaccaacaaggccguggugagccugagcggcugcggcgugagcgugcugaccuucaaggugcuggaccugaagaacuacaucgacaagcagcugcugcccauccugaacaagcagagcugcagcauccccaacaucgagaccgugaucgaguuccagcagaagaacaacagacugcuggagaucaccagagaguucagcgugaacgccggcgugaccacccccgugagcaccuacaugcugaccaacagcgagcugcugagccugaucaacgacaugcccaucaccaacgaccagaagaagcugaugagcaacaacgugcagaucgugagacagcagagcuacagcaucaugugcaucaucaaggaggaggugcuggccuacguggugcagcugccccuguacggcgugaucgacacccccugcuggaagcugcacaccagcccccugugcaccaccaacaccaaggagggcagcaacaucugccugaccagaaccgacagaggcugguacugcgacaacgccggcagcgugagcuucuucccccaggccgagaccugcaaggugcagagcaacagaguguucugcgacaccaugaacagccugacccugcccagcgaggugaaccugugcaacguggacaucuucaaccccaaguacgacugcaagaucaugaccagcaagaccgacgugagcagcagcgugaucaccagccugggcgccaucgugagcugcuacggcaagaccaagugcaccgccagcaacaagugcagaggcaucaucaagaccuucagcaacggcugcgacuacgugagcaacaagggcguggacaccgugagcgugggcaacacccuguacuacgugaacaagcaggagggccagagccuguacgugaagggcgagcccaucaucaacuucuacgacccccugguguuccccagcgacgaguucgacgccagcaucagccaggugaacgagaagaucaaccagagccuggccuucaucagaaagagcgacgagcugcugcacaacgugaacgccggcaagagcaccaccaacaucaugaucaccaccaucaucaucgugaucaucgugauccugcugagccugaucgccgugggccugcugcuguacugcaaggccagaugaggacuaguggaagcauuuuccuggcugauuaaaagaaauuacucagcuauggucaucuguuccuguuagaaggcuaugcagcauauuauauacuaugcgcauguuaugaaaugcauaauaaaaaauuuuaaaaaaucuaaaagaucuaaaaaaaaaaaaaaaaaaaaaaaaaaaaaaaaaaaaaaaaaaaaaaaaaaaaaaaaaaaaaaaaugcaucccccccccccccccccccccccccccccccaaaggcucuuuucagagccaccagaauu

SEQ ID NO: 8011 - RNA, 1946 nt, Artificial Sequence
  mRNA product Design c-2 comprising derived and/or modified sequence from HRSV(A2)__F-del_DSCav1_mut8 (opt5)
gggagacuccugucgggcggaaguaggaggaguagaguuuaaaaacaguacucuuuuuccgguucgggacguaguugaagcaacgacaagccggauaaccgcucuugagacaggaagcuuaccauggagcugcucauccugaaggccaacgcuauuaccacaauccuuacggccgugaccuucugcuuugcgagcggccagaauauuacagaagaguucuaccaauccaccuguucugcugucagcaaaggguaucugggagcccucagaacaggcugguacaccuccguuaucacaauugaacugucuaacaucaaggagaucaaaugcaaugggaccgacgccaaggugaaacuuauuaagcaggaacuggauaaguauaaaaacgcugugacggaccuccagcugcugaugcagagcacccccgccacaggauccggcucugcuaucgccagcggggucgcgguguguaagguucuccaccuggagggagaggugaauaaaauuaaguccgcccuucugagcaccaacaaagcugucgugucucucuccggcugcggcguuagcgugcugacauuuaagguccuugaucugaagaauuacaucgacaaacaacuccugccuauucugaacaagcagucuuguuccaucccgaauauugaaaccgugaucgaguuccagcagaaaaacaaucggcuccuggaaaucacgcgcgaguuuagcgugaacgccggggucacaacccccguuucuacauauaugcuuaccaauuccgagcugcucagccugauuaacgauaugccuaucaccaaugaccaaaagaaacuuauguccaacaacgugcagauugugagacagcagucuuacagcaucaugugcauuaucaaggaagagguccuggcuuaugugguucaacucccccuguacggagugaucgauacaccuuguuggaaacugcauacgagcccccucugcaccacaaauaccaaggaaggcagcaacauuugucugacacggaccgaccgcgggugguacugcgauaaugccggaucugucuccuucuuuccucaggcggagacguguaaggugcagagcaacagaguuuucugcgacacaaugaacucucuuacccugccgagcgaagugaaucucugcaaugucgauaucuuuaaccccaaauaugacuguaagauuaugaccuccaaaacagaugugucuagcuccgucaucaccagccugggcgccauugugucuugcuacgggaagacaaaauguacggcuuccaauaagugccggggaaucaucaagaccuucagcaacggcugugacuauguuucuaauaaaggcguggacacagucuccguggggaacacccuuuacuauguuaauaagcaagagggacagagccuguacgugaaaggcgagccuauuaucaacuuuuaugauccccucgucuucccuuccgacgaauuugaugccucuauuagccaggugaaugagaagaucaaccagucccuggcuuucauucgcaaaucugacgaacugcuccacaacgugaaugccgggaaguccacaaccaacaucaugauuacgaccaucaucauuguuaucauugucauccugcuuucccugauugccgugggacuccugcuguacugcaaggcuagaugaggacuaguggaagcauuuuccuggcugauuaaaagaaauuacucagcuauggucaucuguuccuguuagaaggcuaugcagcauauuauauacuaugcgcauguuaugaaaugcauaauaaaaaauuuuaaaaaaucuaaaagaucuaaaaaaaaaaaaaaaaaaaaaaaaaaaaaaaaaaaaaaaaaaaaaaaaaaaaaaaaaaaaaaaaugcaucccccccccccccccccccccccccccccccaaaggcucuuuucagagccaccagaauu

SEQ ID NO: 8012 - RNA, 1946 nt, Artificial Sequence
  mRNA product Design c-2 comprising derived and/or modified sequence from HRSV(A2)__F-del_DSCav1_mut8 (opt6)
gggagacuccugucgggcggaaguaggaggaguagaguuuaaaaacaguacucuuuuuccgguucgggacguaguugaagcaacgacaagccggauaaccgcucuugagacaggaagcuuaccauggaacuacucauauugaaagccaacgcaaucacaacaauacuaaccgccguaacauuuugcuucgcgucaggccaaaauauaacagaagaauuuuaccaaucaacaugcuccgccguaucaaaaggauaccuaggugcauuacgaaccgguugguacacaucaguaaucacaauagaacuuuccaacauuaaagaaauaaaaugcaauggcacagacgcaaaagucaaacuaauaaaacaagaacuagacaaauauaaaaacgccgucacagacuuacaacuauuaaugcaaagcacaccagcaacaggauccggaucagcaauagcaucaggaguagccgucuguaaaguacuacaccuagaaggcgaaguuaauaaaauuaaaucagcuuuauuaucaaccaacaaagcaguaguaucacuauccggaugcggagucuccguccuaacauucaaaguacuagaccucaagaauuacauagauaaacaacuacuaccaauacucaacaaacaaucauguucaauaccaaacaucgaaaccgucauagaauuucaacaaaaaaauaauagacucuuagaaauaacacgagaauuuagcguaaacgcaggagucacaaccccugucucaacauacaugcuaaccaauuccgaauuauuaucacucauaaaugacaugccaauaacuaaugaccaaaaaaaacuuaugucaaacaacguacaaauaguaagacaacaaucauauucaauaaugugcauaaucaaagaagaaguuuuagcauauguaguacaacuaccacuauauggcgucauagacacaccaugcuggaaauuacacacaucaccucuaugcacaacaaacacaaaagaaggaagcaacauuugccuaaccagaaccgauagaggaugguacugcgauaacgcaggcucaguaucauucuucccucaagccgaaacuugcaaaguccaaucaaauagagucuucugcgauacaaugaacuccuuaacuuuaccaucagaaguaaaucuaugcaacguagauaucuuuaauccaaaauacgauugcaaaaucaugacaucaaaaacagauguaucaucuaguguaauuaccucccuaggagcaauaguaagcugcuacggaaaaacaaaaugcaccgccucuaacaaaugucguggaauaauaaaaacauucucaaacggaugcgauuauguaucaaauaaaggugucgacaccguaucaguaggcaauacacuauacuauguaaauaaacaagaaggacaaucacucuacgucaaaggugaaccaauaauaaacuucuacgacccacuuguauucccaagcgacgaauuugacgcaucaauaagccaaguaaacgaaaaaauaaaccaaucacuagcauucaucagaaaaucagacgaacuacuccacaauguaaaugcaggaaaaucaacaaccaauaucaugauaacaaccauaauaauagucauaauaguaauacuauuaucccucauagccguuggacuacuccuauauuguaaagcacgauaaggacuaguggaagcauuuuccuggcugauuaaaagaaauuacucagcuauggucaucuguuccuguuagaaggcuaugcagcauauuauauacuaugcgcauguuaugaaaugcauaauaaaaaauuuuaaaaaaucuaaaagaucuaaaaaaaaaaaaaaaaaaaaaaaaaaaaaaaaaaaaaaaaaaaaaaaaaaaaaaaaaaaaaaaaugcaucccccccccccccccccccccccccccccccaaaggcucuuuucagagccaccagaauu

SEQ ID NO: 8013 - RNA, 1946 nt, Artificial Sequence
  mRNA product Design c-2 comprising derived and/or modified sequence from HRSV(A2)__F-del_DSCav1_mut8 (opt11)
gggagacuccugucgggcggaaguaggaggaguagaguuuaaaaacaguacucuuuuuccgguucgggacguaguugaagcaacgacaagccggauaaccgcucuugagacaggaagcuuaccauggaacuccucauccucaaagccaacgccaucaccaccauacucaccgcaguaaccuucugcuucgcauccggccaaaacaucacagaagaguucuaccagaguaccugcuccgccgucuccaaaggcuaccuuggcgcccuccguaccgggugguacacauccgucaucacaaucgaacucuccaacaucaaagaaauaaagugcaacggcacagacgccaaaguaaaacugauaaagcaagaacucgacaaauacaaaaacgccguaaccgaccuccagcuacuaaugcaauccacucccgccaccggcagcggauccgccaucgccuccggaguagccgucuguaaagucuuacaccucgaaggcgaagugaacaaaaucaaauccgcccuacucucaaccaacaaagccguaguaucacucuccgggugcggcguuucagugcuaacguucaaaguccuugaccucaaaaacuacaucgacaaacaacuccuccccauccuaaauaaacaauccugcuccauacccaacaucgagacugucaucgaguuccagcagaaaaacaaccgacuccucgaaaucacacgcgaguucucugucaacgccggcgucacaacccccgucuccacauacaugcucaccaacagcgaacuccucucccuaaucaaugacaugcccaucaccaacgaccaaaagaaacucaugucaaacaacguccaaaucguccgccaacaauccuacagcaucaugugcaucaucaaagaagaaguucucgcauacguaguacaacucccccucuacggagugaucgacacccccugcuggaaacuacacaccagcccgcuuugcaccacaaacaccaaggaaggcuccaacaucugccucacucgaaccgaccgcggcugguacugcgacaacgcaggcuccgucaguuucuuuccccaagcagaaacaugcaaaguccaauccaaccgaguauucugcgacaccaugaacucccucacccuaccauccgaaguuaaccuaugcaacguggacaucuucaaccccaaguacgacugcaaaauuaugaccuccaaaaccgacguauccuccagcgucaucaccagccucggagcaauagucuccugcuacggcaagaccaagugcaccgcuuccaacaagugucgcggaaucaucaaaaccuucucaaacggcugcgacuacgucuccaacaaaggcgucgacaccguauccguaggaaacacccuauacuacgucaacaaacaagaaggacaaucccucuaugucaaaggcgaacccaucaucaauuucuacgacccccuagucuucccuuccgacgaguucgacgcguccaucagccaagucaaugaaaagaucaaccagagccuggcauucauccgcaaauccgacgaacuccuccacaacgucaacgcgggaaaauccacgacaaacaucaugaucaccaccaucaucaucgucaucauagucauucuccuuucucucaucgccgugggacuacuucucuacugcaaagcccgauaaggacuaguggaagcauuuuccuggcugauuaaaagaaauuacucagcuauggucaucuguuccuguuagaaggcuaugcagcauauuauauacuaugcgcauguuaugaaaugcauaauaaaaaauuuuaaaaaaucuaaaagaucuaaaaaaaaaaaaaaaaaaaaaaaaaaaaaaaaaaaaaaaaaaaaaaaaaaaaaaaaaaaaaaaaugcaucccccccccccccccccccccccccccccccaaaggcucuuuucagagccaccagaauu

SEQ ID NO: 8014 - RNA, 1923 nt, Artificial Sequence
  mRNA product Design c-3 comprising derived and/or modified sequence from HRSV(A2)__F-del_DSCav1_mut8 (opt1)
gggagaguccgcucagccagguugcagaagcggcuuagcguguguccuaaucuucucucugcguguagguaggccugugccgcaaacaagcuuaccauggagcugcucauccugaaggccaacgccaucaccaccauccugacggcggugaccuucugcuucgccagcggccagaacaucaccgaggaguucuaccaguccacgugcagcgccgucuccaagggguaccucggcgcccugcggaccggcugguacaccuccgugaucaccaucgagcugagcaacaucaaggagaucaagugcaacgggaccgacgccaaggugaagcucaucaagcaggagcuggacaaguacaagaacgcggucacggaccugcagcuccugaugcaguccaccccggcaaccggcuccggcuccgccaucgcgagcggcgucgccgugugcaaggugcugcaccucgagggggaggucaacaagaucaagagcgcccugcuguccaccaacaaggccguggugagccucuccggcugcggcgucagcgugcugaccuucaaggugcuggaccucaagaacuacaucgacaagcagcugcugcccauccugaacaagcagagcugcuccauccccaacaucgagacggugaucgaguuccagcagaagaacaaccggcuccuggagaucacccgcgaguucagcgugaacgccggggucaccacccccguguccacguacaugcugaccaacagcgagcuccugucccugaucaacgacaugccgaucaccaacgaccagaagaagcucaugagcaacaacgugcagaucguccggcagcaguccuacagcaucaugugcaucaucaaggaggaggugcuggcguacgugguccagcugccccucuacggcgugaucgacacccccugcuggaagcugcacacgagcccccugugcaccaccaacaccaaggagggguccaacaucugccucacgcgcaccgaccggggcugguacugcgacaacgccggcagcgucuccuucuucccgcaggccgagaccugcaaggugcagagcaaccgcguguucugcgacaccaugaacucccugacgcugcccagcgagguaaaccucugcaacgucgacaucuucaaccccaaguacgacugcaagaucaugaccuccaagaccgacgugagcuccagcgugaucaccucccugggggccaucgucagcugcuacggcaagacgaagugcaccgccagcaacaagugccgggggaucaucaagaccuucuccaacggcugcgacuacgugagcaacaagggcguggacaccguguccgucgggaacacccuguacuacgugaacaagcaggagggccagagccucuacgugaagggggagcccaucaucaacuucuacgacccgcuggucuuccccuccgacgaguucgacgcgagcaucucccaggugaacgagaagaucaaccagagccuggccuucauccgcaaguccgacgagcugcuccacaacgugaacgccggcaagagcacgaccaacaucaugaucaccaccaucaucaucgucaucaucgugauccugcugucccucaucgccguggggcugcugcucuacugcaaggcccggugaggacuaguacuggcugcaucucccuuuccucuguccuccauccuucucccaggauggugaagggggaccugguacccagugauccccaccccaggauccuaaaucaugacuuaccugcuaauaaaaacucauuggaaaagugagaagaucuaaaaaaaaaaaaaaaaaaaaaaaaaaaaaaaaaaaaaaaaaaaaaaaaaaaaaaaaaaaaaaaaugcaucccccccccccccccccccccccccccccccaaaggcucuuuucagagccaccagaauu

SEQ ID NO: 8015 - RNA, 1923 nt, Artificial Sequence
  mRNA product Design c-3 comprising derived and/or modified sequence from HRSV(A2)__F-del_DSCav1_mut8 (opt1)
gggagaguccgcucagccagguugcagaagcggcuuagcguguguccuaaucuucucucugcguguagguaggccugugccgcaaacaagcuuaccauggagcugcucauccugaaggccaacgccaucaccaccauccugacggcggugaccuucugcuucgccagcggccagaacaucaccgaggaguucuaccaguccacgugcagcgccgucuccaagggguaccucggcgcccugcgcaccgggugguacaccagcgugaucaccaucgagcuguccaacaucaaggagaucaagugcaacggcaccgacgccaaggugaagcucaucaagcaggagcuggacaaguacaagaacgcggucacggaccugcagcuccugaugcagagcacccccgccaccggguccggcagcgccaucgccuccggcguggcggugugcaagguccugcaccucgagggggaggugaacaagaucaagagcgcccugcuguccaccaacaaggccguggucagccucuccggcugcggggugagcgugcugacguucaagguccuggaccucaagaacuacaucgacaagcagcugcugccgauccucaacaagcaguccugcagcauccccaacaucgagaccgugaucgaguuccagcagaagaacaaccggcugcuggagaucacccgcgaguucuccgugaacgccggcgucaccacgcccgugagcaccuacaugcucaccaacuccgagcugcugagccucaucaacgacaugcccaucaccaacgaccagaagaagcugaugagcaacaacgugcagaucguccggcagcaguccuacagcaucaugugcaucaucaaggaggaggugcuggccuacgugguccagcucccgcuguacggggugaucgacacgcccugcuggaagcugcacaccagcccccucugcaccaccaacacgaaggagggcuccaacaucugccugacccgcaccgaccggggcugguacugcgacaacgcgggguccgugagcuucuucccccaggccgagaccugcaagguccaguccaaccgcguguucugcgacacgaugaacagccugacccucccguccgaggucaaccugugcaacguggacaucuucaaccccaaguacgacugcaagaucaugaccagcaagaccgacguguccagcuccgucaucacgagccugggcgccaucguguccugcuacgggaagaccaagugcaccgccagcaacaagugccggggcaucaucaagaccuucuccaacggcugcgacuacgugagcaacaagggggucgacacgguguccgugggcaacacccucuacuacgucaacaagcaggaggggcagagccuguacgugaagggcgagcccaucaucaacuucuacgacccccugguguucccgagcgacgaguucgacgccuccaucagccaggucaacgagaagaucaaccagucccucgcguucauccgcaagagcgacgagcugcugcacaacgugaacgccgggaaguccaccaccaacaucaugaucaccacgaucaucaucgugaucaucgucauccuccugagccugaucgccgugggccuccugcuguacugcaaggcccggugaggacuaguacuggcugcaucucccuuuccucuguccuccauccuucucccaggauggugaagggggaccugguacccagugauccccaccccaggauccuaaaucaugacuuaccugcuaauaaaaacucauuggaaaagugagaagaucuaaaaaaaaaaaaaaaaaaaaaaaaaaaaaaaaaaaaaaaaaaaaaaaaaaaaaaaaaaaaaaaaugcaucccccccccccccccccccccccccccccccaaaggcucuuuucagagccaccagaauu

SEQ ID NO: 8016 - RNA, 1923 nt, Artificial Sequence
  mRNA product Design c-3 comprising derived and/or modified sequence from HRSV(A2)__F-del_DSCav1_mut8 (opt2)
gggagaguccgcucagccagguugcagaagcggcuuagcguguguccuaaucuucucucugcguguagguaggccugugccgcaaacaagcuuaccauggagcuccucauccucaaggccaacgccaucaccaccauccucaccgccgucaccuucugcuucgccuccggccagaacaucaccgaggaguucuaccaguccaccugcuccgccgucuccaagggcuaccucggcgcccuccgcaccggcugguacaccuccgucaucaccaucgagcucuccaacaucaaggagaucaagugcaacggcaccgacgccaaggucaagcucaucaagcaggagcucgacaaguacaagaacgccgucaccgaccuccagcuccucaugcaguccacccccgccaccggcuccggcuccgccaucgccuccggcgucgccgucugcaagguccuccaccucgagggcgaggucaacaagaucaaguccgcccuccucuccaccaacaaggccgucgucucccucuccggcugcggcgucuccguccucaccuucaagguccucgaccucaagaacuacaucgacaagcagcuccuccccauccucaacaagcaguccugcuccauccccaacaucgagaccgucaucgaguuccagcagaagaacaaccgccuccucgagaucacccgcgaguucuccgucaacgccggcgucaccacccccgucuccaccuacaugcucaccaacuccgagcuccucucccucaucaacgacaugcccaucaccaacgaccagaagaagcucauguccaacaacguccagaucguccgccagcaguccuacuccaucaugugcaucaucaaggaggagguccucgccuacgucguccagcucccccucuacggcgucaucgacacccccugcuggaagcuccacaccuccccccucugcaccaccaacaccaaggagggcuccaacaucugccucacccgcaccgaccgcggcugguacugcgacaacgccggcuccgucuccuucuucccccaggccgagaccugcaagguccaguccaaccgcgucuucugcgacaccaugaacucccucacccuccccuccgaggucaaccucugcaacgucgacaucuucaaccccaaguacgacugcaagaucaugaccuccaagaccgacgucuccuccuccgucaucaccucccucggcgccaucgucuccugcuacggcaagaccaagugcaccgccuccaacaagugccgcggcaucaucaagaccuucuccaacggcugcgacuacgucuccaacaagggcgucgacaccgucuccgucggcaacacccucuacuacgucaacaagcaggagggccagucccucuacgucaagggcgagcccaucaucaacuucuacgacccccucgucuuccccuccgacgaguucgacgccuccaucucccaggucaacgagaagaucaaccagucccucgccuucauccgcaaguccgacgagcuccuccacaacgucaacgccggcaaguccaccaccaacaucaugaucaccaccaucaucaucgucaucaucgucauccuccucucccucaucgccgucggccuccuccucuacugcaaggcccgcugaggacuaguacuggcugcaucucccuuuccucuguccuccauccuucucccaggauggugaagggggaccugguacccagugauccccaccccaggauccuaaaucaugacuuaccugcuaauaaaaacucauuggaaaagugagaagaucuaaaaaaaaaaaaaaaaaaaaaaaaaaaaaaaaaaaaaaaaaaaaaaaaaaaaaaaaaaaaaaaaugcaucccccccccccccccccccccccccccccccaaaggcucuuuucagagccaccagaauu

SEQ ID NO: 8017 - RNA, 1923 nt, Artificial Sequence
  mRNA product Design c-3 comprising derived and/or modified sequence from HRSV(A2)__F-del_DSCav1_mut8 (opt3)
gggagaguccgcucagccagguugcagaagcggcuuagcguguguccuaaucuucucucugcguguagguaggccugugccgcaaacaagcuuaccauggagcugcucauccuuaaggccaacgcuauuaccacaauacugacugcagugacguucugcuuugccagcggccagaauaucaccgaagaguucuaccaauccacauguucugcggucucaaaaggguauuugggagcuuuaagaacugguugguacaccaguguuauuacaaucgaacugagcaacauuaaggagaucaaaugcaauggcaccgacgccaaggugaaacuaauaaagcaggaacucgauaaguauaaaaacgcaguaacugaccugcagcuucugaugcaguccacacccgccaccgggucuggaucggcuaucgcaucaggcguggccgucuguaagguguugcaccucgagggugagguuaauaaaauuaagagcgcucugcugaguacgaacaaagccguggucucccucucugggugcggagugagcguauuaacuuuuaagguucuggaucuuaagaauuacaucgacaaacaauugcugccuauucuaaacaagcaguccuguucaaucccaaauauagaaaccgugauugaguuccagcagaaaaacaauaggcuccuggaaaucacacgggaguuuagugucaacgcgggcgugacuaccccggugagcacauauaugcuuaccaauucugagcuguugucccucauuaacgauaugcccaucacgaaugaccaaaagaaacugaugucaaacaacguccagaucguucgccagcagagcuacaguauuaugugcauaaucaaggaagagguguuagcauauguagugcaacugccucucuacggcgucauugauacuccauguuggaaacuucauacaucuccccugugcaccacuaauacaaaggaaggguccaacaucuguuugacccgaacggaccguggaugguacugcgauaaugccgguagcgugucguucuuuccucaggcugagaccuguaagguucagucuaacagaguguucugcgacacaaugaacucccuaacucugccaucagaagucaaucucugcaauguggauauauuuaaccccaaauaugacuguaagauuaugaccaguaaaacagauguaagcuccucuguuaucacuagccugggcgccaucgugucaugcuacgggaagaccaaauguacagcaaguaauaagugcaggggaauuaucaagaccuucuccaacggcugugacuaugucagcaauaaagguguggacacugucucuguggggaacacgcuuuacuauguuaauaagcaagagggacagucacuguacgugaaaggcgagccuauuauaaacuuuuaugauccauugguauucccgagugacgaauuugaugcuagcaucucccaggucaaugagaagauuaaccagucucucgccuucauccggaaaucggacgaacuguuacacaacgugaaugcgggcaagagcacaaccaacaucaugauuacuaccauaaucauuguuaucauugugauccugcuaucccucauagccgucgggcugcuuuuguacugcaaggcacgcugaggacuaguacuggcugcaucucccuuuccucuguccuccauccuucucccaggauggugaagggggaccugguacccagugauccccaccccaggauccuaaaucaugacuuaccugcuaauaaaaacucauuggaaaagugagaagaucuaaaaaaaaaaaaaaaaaaaaaaaaaaaaaaaaaaaaaaaaaaaaaaaaaaaaaaaaaaaaaaaaugcaucccccccccccccccccccccccccccccccaaaggcucuuuucagagccaccagaauu

SEQ ID NO: 8018 - RNA, 1923 nt, Artificial Sequence
  mRNA product Design c-3 comprising derived and/or modified sequence from HRSV(A2)__F-del_DSCav1_mut8 (opt4)
gggagaguccgcucagccagguugcagaagcggcuuagcguguguccuaaucuucucucugcguguagguaggccugugccgcaaacaagcuuaccauggagcugcugauccugaaggccaacgccaucaccaccauccugaccgccgugaccuucugcuucgccagcggccagaacaucaccgaggaguucuaccagagcaccugcagcgccgugagcaagggcuaccugggcgcccugagaaccggcugguacaccagcgugaucaccaucgagcugagcaacaucaaggagaucaagugcaacggcaccgacgccaaggugaagcugaucaagcaggagcuggacaaguacaagaacgccgugaccgaccugcagcugcugaugcagagcacccccgccaccggcagcggcagcgccaucgccagcggcguggccgugugcaaggugcugcaccuggagggcgaggugaacaagaucaagagcgcccugcugagcaccaacaaggccguggugagccugagcggcugcggcgugagcgugcugaccuucaaggugcuggaccugaagaacuacaucgacaagcagcugcugcccauccugaacaagcagagcugcagcauccccaacaucgagaccgugaucgaguuccagcagaagaacaacagacugcuggagaucaccagagaguucagcgugaacgccggcgugaccacccccgugagcaccuacaugcugaccaacagcgagcugcugagccugaucaacgacaugcccaucaccaacgaccagaagaagcugaugagcaacaacgugcagaucgugagacagcagagcuacagcaucaugugcaucaucaaggaggaggugcuggccuacguggugcagcugccccuguacggcgugaucgacacccccugcuggaagcugcacaccagcccccugugcaccaccaacaccaaggagggcagcaacaucugccugaccagaaccgacagaggcugguacugcgacaacgccggcagcgugagcuucuucccccaggccgagaccugcaaggugcagagcaacagaguguucugcgacaccaugaacagccugacccugcccagcgaggugaaccugugcaacguggacaucuucaaccccaaguacgacugcaagaucaugaccagcaagaccgacgugagcagcagcgugaucaccagccugggcgccaucgugagcugcuacggcaagaccaagugcaccgccagcaacaagugcagaggcaucaucaagaccuucagcaacggcugcgacuacgugagcaacaagggcguggacaccgugagcgugggcaacacccuguacuacgugaacaagcaggagggccagagccuguacgugaagggcgagcccaucaucaacuucuacgacccccugguguuccccagcgacgaguucgacgccagcaucagccaggugaacgagaagaucaaccagagccuggccuucaucagaaagagcgacgagcugcugcacaacgugaacgccggcaagagcaccaccaacaucaugaucaccaccaucaucaucgugaucaucgugauccugcugagccugaucgccgugggccugcugcuguacugcaaggccagaugaggacuaguacuggcugcaucucccuuuccucuguccuccauccuucucccaggauggugaagggggaccugguacccagugauccccaccccaggauccuaaaucaugacuuaccugcuaauaaaaacucauuggaaaagugagaagaucuaaaaaaaaaaaaaaaaaaaaaaaaaaaaaaaaaaaaaaaaaaaaaaaaaaaaaaaaaaaaaaaaugcaucccccccccccccccccccccccccccccccaaaggcucuuuucagagccaccagaauu

SEQ ID NO: 8019 - RNA, 1923 nt, Artificial Sequence
  mRNA product Design c-3 comprising derived and/or modified sequence from HRSV(A2)__F-del_DSCav1_mut8 (opt5)
gggagaguccgcucagccagguugcagaagcggcuuagcguguguccuaaucuucucucugcguguagguaggccugugccgcaaacaagcuuaccauggagcugcucauccugaaggccaacgcuauuaccacaauccuuacggccgugaccuucugcuuugcgagcggccagaauauuacagaagaguucuaccaauccaccuguucugcugucagcaaaggguaucugggagcccucagaacaggcugguacaccuccguuaucacaauugaacugucuaacaucaaggagaucaaaugcaaugggaccgacgccaaggugaaacuuauuaagcaggaacuggauaaguauaaaaacgcugugacggaccuccagcugcugaugcagagcacccccgccacaggauccggcucugcuaucgccagcggggucgcgguguguaagguucuccaccuggagggagaggugaauaaaauuaaguccgcccuucugagcaccaacaaagcugucgugucucucuccggcugcggcguuagcgugcugacauuuaagguccuugaucugaagaauuacaucgacaaacaacuccugccuauucugaacaagcagucuuguuccaucccgaauauugaaaccgugaucgaguuccagcagaaaaacaaucggcuccuggaaaucacgcgcgaguuuagcgugaacgccggggucacaacccccguuucuacauauaugcuuaccaauuccgagcugcucagccugauuaacgauaugccuaucaccaaugaccaaaagaaacuuauguccaacaacgugcagauugugagacagcagucuuacagcaucaugugcauuaucaaggaagagguccuggcuuaugugguucaacucccccuguacggagugaucgauacaccuuguuggaaacugcauacgagcccccucugcaccacaaauaccaaggaaggcagcaacauuugucugacacggaccgaccgcgggugguacugcgauaaugccggaucugucuccuucuuuccucaggcggagacguguaaggugcagagcaacagaguuuucugcgacacaaugaacucucuuacccugccgagcgaagugaaucucugcaaugucgauaucuuuaaccccaaauaugacuguaagauuaugaccuccaaaacagaugugucuagcuccgucaucaccagccugggcgccauugugucuugcuacgggaagacaaaauguacggcuuccaauaagugccggggaaucaucaagaccuucagcaacggcugugacuauguuucuaauaaaggcguggacacagucuccguggggaacacccuuuacuauguuaauaagcaagagggacagagccuguacgugaaaggcgagccuauuaucaacuuuuaugauccccucgucuucccuuccgacgaauuugaugccucuauuagccaggugaaugagaagaucaaccagucccuggcuuucauucgcaaaucugacgaacugcuccacaacgugaaugccgggaaguccacaaccaacaucaugauuacgaccaucaucauuguuaucauugucauccugcuuucccugauugccgugggacuccugcuguacugcaaggcuagaugaggacuaguacuggcugcaucucccuuuccucuguccuccauccuucucccaggauggugaagggggaccugguacccagugauccccaccccaggauccuaaaucaugacuuaccugcuaauaaaaacucauuggaaaagugagaagaucuaaaaaaaaaaaaaaaaaaaaaaaaaaaaaaaaaaaaaaaaaaaaaaaaaaaaaaaaaaaaaaaaugcaucccccccccccccccccccccccccccccccaaaggcucuuuucagagccaccagaauu

SEQ ID NO: 8020 - RNA, 1923 nt, Artificial Sequence
  mRNA product Design c-3 comprising derived and/or modified sequence from HRSV(A2)__F-del_DSCav1_mut8 (opt6)
gggagaguccgcucagccagguugcagaagcggcuuagcguguguccuaaucuucucucugcguguagguaggccugugccgcaaacaagcuuaccauggaacuacucauauugaaagccaacgcaaucacaacaauacuaaccgccguaacauuuugcuucgcgucaggccaaaauauaacagaagaauuuuaccaaucaacaugcuccgccguaucaaaaggauaccuaggugcauuacgaaccgguugguacacaucaguaaucacaauagaacuuuccaacauuaaagaaauaaaaugcaauggcacagacgcaaaagucaaacuaauaaaacaagaacuagacaaauauaaaaacgccgucacagacuuacaacuauuaaugcaaagcacaccagcaacaggauccggaucagcaauagcaucaggaguagccgucuguaaaguacuacaccuagaaggcgaaguuaauaaaauuaaaucagcuuuauuaucaaccaacaaagcaguaguaucacuauccggaugcggagucuccguccuaacauucaaaguacuagaccucaagaauuacauagauaaacaacuacuaccaauacucaacaaacaaucauguucaauaccaaacaucgaaaccgucauagaauuucaacaaaaaaauaauagacucuuagaaauaacacgagaauuuagcguaaacgcaggagucacaaccccugucucaacauacaugcuaaccaauuccgaauuauuaucacucauaaaugacaugccaauaacuaaugaccaaaaaaaacuuaugucaaacaacguacaaauaguaagacaacaaucauauucaauaaugugcauaaucaaagaagaaguuuuagcauauguaguacaacuaccacuauauggcgucauagacacaccaugcuggaaauuacacacaucaccucuaugcacaacaaacacaaaagaaggaagcaacauuugccuaaccagaaccgauagaggaugguacugcgauaacgcaggcucaguaucauucuucccucaagccgaaacuugcaaaguccaaucaaauagagucuucugcgauacaaugaacuccuuaacuuuaccaucagaaguaaaucuaugcaacguagauaucuuuaauccaaaauacgauugcaaaaucaugacaucaaaaacagauguaucaucuaguguaauuaccucccuaggagcaauaguaagcugcuacggaaaaacaaaaugcaccgccucuaacaaaugucguggaauaauaaaaacauucucaaacggaugcgauuauguaucaaauaaaggugucgacaccguaucaguaggcaauacacuauacuauguaaauaaacaagaaggacaaucacucuacgucaaaggugaaccaauaauaaacuucuacgacccacuuguauucccaagcgacgaauuugacgcaucaauaagccaaguaaacgaaaaaauaaaccaaucacuagcauucaucagaaaaucagacgaacuacuccacaauguaaaugcaggaaaaucaacaaccaauaucaugauaacaaccauaauaauagucauaauaguaauacuauuaucccucauagccguuggacuacuccuauauuguaaagcacgauaaggacuaguacuggcugcaucucccuuuccucuguccuccauccuucucccaggauggugaagggggaccugguacccagugauccccaccccaggauccuaaaucaugacuuaccugcuaauaaaaacucauuggaaaagugagaagaucuaaaaaaaaaaaaaaaaaaaaaaaaaaaaaaaaaaaaaaaaaaaaaaaaaaaaaaaaaaaaaaaaugcaucccccccccccccccccccccccccccccccaaaggcucuuuucagagccaccagaauu

SEQ ID NO: 8021 - RNA, 1923 nt, Artificial Sequence
  mRNA product Design c-3 comprising derived and/or modified sequence from HRSV(A2)__F-del_DSCav1_mut8 (opt11)
gggagaguccgcucagccagguugcagaagcggcuuagcguguguccuaaucuucucucugcguguagguaggccugugccgcaaacaagcuuaccauggaacuccucauccucaaagccaacgccaucaccaccauacucaccgcaguaaccuucugcuucgcauccggccaaaacaucacagaagaguucuaccagaguaccugcuccgccgucuccaaaggcuaccuuggcgcccuccguaccgggugguacacauccgucaucacaaucgaacucuccaacaucaaagaaauaaagugcaacggcacagacgccaaaguaaaacugauaaagcaagaacucgacaaauacaaaaacgccguaaccgaccuccagcuacuaaugcaauccacucccgccaccggcagcggauccgccaucgccuccggaguagccgucuguaaagucuuacaccucgaaggcgaagugaacaaaaucaaauccgcccuacucucaaccaacaaagccguaguaucacucuccgggugcggcguuucagugcuaacguucaaaguccuugaccucaaaaacuacaucgacaaacaacuccuccccauccuaaauaaacaauccugcuccauacccaacaucgagacugucaucgaguuccagcagaaaaacaaccgacuccucgaaaucacacgcgaguucucugucaacgccggcgucacaacccccgucuccacauacaugcucaccaacagcgaacuccucucccuaaucaaugacaugcccaucaccaacgaccaaaagaaacucaugucaaacaacguccaaaucguccgccaacaauccuacagcaucaugugcaucaucaaagaagaaguucucgcauacguaguacaacucccccucuacggagugaucgacacccccugcuggaaacuacacaccagcccgcuuugcaccacaaacaccaaggaaggcuccaacaucugccucacucgaaccgaccgcggcugguacugcgacaacgcaggcuccgucaguuucuuuccccaagcagaaacaugcaaaguccaauccaaccgaguauucugcgacaccaugaacucccucacccuaccauccgaaguuaaccuaugcaacguggacaucuucaaccccaaguacgacugcaaaauuaugaccuccaaaaccgacguauccuccagcgucaucaccagccucggagcaauagucuccugcuacggcaagaccaagugcaccgcuuccaacaagugucgcggaaucaucaaaaccuucucaaacggcugcgacuacgucuccaacaaaggcgucgacaccguauccguaggaaacacccuauacuacgucaacaaacaagaaggacaaucccucuaugucaaaggcgaacccaucaucaauuucuacgacccccuagucuucccuuccgacgaguucgacgcguccaucagccaagucaaugaaaagaucaaccagagccuggcauucauccgcaaauccgacgaacuccuccacaacgucaacgcgggaaaauccacgacaaacaucaugaucaccaccaucaucaucgucaucauagucauucuccuuucucucaucgccgugggacuacuucucuacugcaaagcccgauaaggacuaguacuggcugcaucucccuuuccucuguccuccauccuucucccaggauggugaagggggaccugguacccagugauccccaccccaggauccuaaaucaugacuuaccugcuaauaaaaacucauuggaaaagugagaagaucuaaaaaaaaaaaaaaaaaaaaaaaaaaaaaaaaaaaaaaaaaaaaaaaaaaaaaaaaaaaaaaaaugcaucccccccccccccccccccccccccccccccaaaggcucuuuucagagccaccagaauu

SEQ ID NO: 8022 - RNA, 1919 nt, Artificial Sequence
  mRNA product Design c-4 comprising derived and/or modified sequence from HRSV(A2)__F-del_DSCav1_mut8 (opt1)
gggagaguccgcucagccagguugcagaagcggcuuagcguguguccuaaucuucucucugcguguagguaggccugugccgcaaacaagcuuaccauggagcugcucauccugaaggccaacgccaucaccaccauccugacggcggugaccuucugcuucgccagcggccagaacaucaccgaggaguucuaccaguccacgugcagcgccgucuccaagggguaccucggcgcccugcggaccggcugguacaccuccgugaucaccaucgagcugagcaacaucaaggagaucaagugcaacgggaccgacgccaaggugaagcucaucaagcaggagcuggacaaguacaagaacgcggucacggaccugcagcuccugaugcaguccaccccggcaaccggcuccggcuccgccaucgcgagcggcgucgccgugugcaaggugcugcaccucgagggggaggucaacaagaucaagagcgcccugcuguccaccaacaaggccguggugagccucuccggcugcggcgucagcgugcugaccuucaaggugcuggaccucaagaacuacaucgacaagcagcugcugcccauccugaacaagcagagcugcuccauccccaacaucgagacggugaucgaguuccagcagaagaacaaccggcuccuggagaucacccgcgaguucagcgugaacgccggggucaccacccccguguccacguacaugcugaccaacagcgagcuccugucccugaucaacgacaugccgaucaccaacgaccagaagaagcucaugagcaacaacgugcagaucguccggcagcaguccuacagcaucaugugcaucaucaaggaggaggugcuggcguacgugguccagcugccccucuacggcgugaucgacacccccugcuggaagcugcacacgagcccccugugcaccaccaacaccaaggagggguccaacaucugccucacgcgcaccgaccggggcugguacugcgacaacgccggcagcgucuccuucuucccgcaggccgagaccugcaaggugcagagcaaccgcguguucugcgacaccaugaacucccugacgcugcccagcgagguaaaccucugcaacgucgacaucuucaaccccaaguacgacugcaagaucaugaccuccaagaccgacgugagcuccagcgugaucaccucccugggggccaucgucagcugcuacggcaagacgaagugcaccgccagcaacaagugccgggggaucaucaagaccuucuccaacggcugcgacuacgugagcaacaagggcguggacaccguguccgucgggaacacccuguacuacgugaacaagcaggagggccagagccucuacgugaagggggagcccaucaucaacuucuacgacccgcuggucuuccccuccgacgaguucgacgcgagcaucucccaggugaacgagaagaucaaccagagccuggccuucauccgcaaguccgacgagcugcuccacaacgugaacgccggcaagagcacgaccaacaucaugaucaccaccaucaucaucgucaucaucgugauccugcugucccucaucgccguggggcugcugcucuacugcaaggcccggugaggacuaguggaagcauuuuccuggcugauuaaaagaaauuacucagcuauggucaucuguuccuguuagaaggcuaugcagcauauuauauacuaugcgcauguuaugaaaugcauaauaaaaaauuuuaaaaaaucuaaaagaucuaaaaaaaaaaaaaaaaaaaaaaaaaaaaaaaaaaaaaaaaaaaaaaaaaaaaaaaaaaaaaaaaugcaucccccccccccccccccccccccccccccccaaaggcucuuuucagagccaccagaauu

SEQ ID NO: 8023 - RNA, 1919 nt, Artificial Sequence
  mRNA product Design c-4 comprising derived and/or modified sequence from HRSV(A2)__F-del_DSCav1_mut8 (opt1)
gggagaguccgcucagccagguugcagaagcggcuuagcguguguccuaaucuucucucugcguguagguaggccugugccgcaaacaagcuuaccauggagcugcucauccugaaggccaacgccaucaccaccauccugacggcggugaccuucugcuucgccagcggccagaacaucaccgaggaguucuaccaguccacgugcagcgccgucuccaagggguaccucggcgcccugcgcaccgggugguacaccagcgugaucaccaucgagcuguccaacaucaaggagaucaagugcaacggcaccgacgccaaggugaagcucaucaagcaggagcuggacaaguacaagaacgcggucacggaccugcagcuccugaugcagagcacccccgccaccggguccggcagcgccaucgccuccggcguggcggugugcaagguccugcaccucgagggggaggugaacaagaucaagagcgcccugcuguccaccaacaaggccguggucagccucuccggcugcggggugagcgugcugacguucaagguccuggaccucaagaacuacaucgacaagcagcugcugccgauccucaacaagcaguccugcagcauccccaacaucgagaccgugaucgaguuccagcagaagaacaaccggcugcuggagaucacccgcgaguucuccgugaacgccggcgucaccacgcccgugagcaccuacaugcucaccaacuccgagcugcugagccucaucaacgacaugcccaucaccaacgaccagaagaagcugaugagcaacaacgugcagaucguccggcagcaguccuacagcaucaugugcaucaucaaggaggaggugcuggccuacgugguccagcucccgcuguacggggugaucgacacgcccugcuggaagcugcacaccagcccccucugcaccaccaacacgaaggagggcuccaacaucugccugacccgcaccgaccggggcugguacugcgacaacgcgggguccgugagcuucuucccccaggccgagaccugcaagguccaguccaaccgcguguucugcgacacgaugaacagccugacccucccguccgaggucaaccugugcaacguggacaucuucaaccccaaguacgacugcaagaucaugaccagcaagaccgacguguccagcuccgucaucacgagccugggcgccaucguguccugcuacgggaagaccaagugcaccgccagcaacaagugccggggcaucaucaagaccuucuccaacggcugcgacuacgugagcaacaagggggucgacacgguguccgugggcaacacccucuacuacgucaacaagcaggaggggcagagccuguacgugaagggcgagcccaucaucaacuucuacgacccccugguguucccgagcgacgaguucgacgccuccaucagccaggucaacgagaagaucaaccagucccucgcguucauccgcaagagcgacgagcugcugcacaacgugaacgccgggaaguccaccaccaacaucaugaucaccacgaucaucaucgugaucaucgucauccuccugagccugaucgccgugggccuccugcuguacugcaaggcccggugaggacuaguggaagcauuuuccuggcugauuaaaagaaauuacucagcuauggucaucuguuccuguuagaaggcuaugcagcauauuauauacuaugcgcauguuaugaaaugcauaauaaaaaauuuuaaaaaaucuaaaagaucuaaaaaaaaaaaaaaaaaaaaaaaaaaaaaaaaaaaaaaaaaaaaaaaaaaaaaaaaaaaaaaaaugcaucccccccccccccccccccccccccccccccaaaggcucuuuucagagccaccagaauu

SEQ ID NO: 8024 - RNA, 1919 nt, Artificial Sequence
  mRNA product Design c-4 comprising derived and/or modified sequence from HRSV(A2)__F-del_DSCav1_mut8 (opt2)
gggagaguccgcucagccagguugcagaagcggcuuagcguguguccuaaucuucucucugcguguagguaggccugugccgcaaacaagcuuaccauggagcuccucauccucaaggccaacgccaucaccaccauccucaccgccgucaccuucugcuucgccuccggccagaacaucaccgaggaguucuaccaguccaccugcuccgccgucuccaagggcuaccucggcgcccuccgcaccggcugguacaccuccgucaucaccaucgagcucuccaacaucaaggagaucaagugcaacggcaccgacgccaaggucaagcucaucaagcaggagcucgacaaguacaagaacgccgucaccgaccuccagcuccucaugcaguccacccccgccaccggcuccggcuccgccaucgccuccggcgucgccgucugcaagguccuccaccucgagggcgaggucaacaagaucaaguccgcccuccucuccaccaacaaggccgucgucucccucuccggcugcggcgucuccguccucaccuucaagguccucgaccucaagaacuacaucgacaagcagcuccuccccauccucaacaagcaguccugcuccauccccaacaucgagaccgucaucgaguuccagcagaagaacaaccgccuccucgagaucacccgcgaguucuccgucaacgccggcgucaccacccccgucuccaccuacaugcucaccaacuccgagcuccucucccucaucaacgacaugcccaucaccaacgaccagaagaagcucauguccaacaacguccagaucguccgccagcaguccuacuccaucaugugcaucaucaaggaggagguccucgccuacgucguccagcucccccucuacggcgucaucgacacccccugcuggaagcuccacaccuccccccucugcaccaccaacaccaaggagggcuccaacaucugccucacccgcaccgaccgcggcugguacugcgacaacgccggcuccgucuccuucuucccccaggccgagaccugcaagguccaguccaaccgcgucuucugcgacaccaugaacucccucacccuccccuccgaggucaaccucugcaacgucgacaucuucaaccccaaguacgacugcaagaucaugaccuccaagaccgacgucuccuccuccgucaucaccucccucggcgccaucgucuccugcuacggcaagaccaagugcaccgccuccaacaagugccgcggcaucaucaagaccuucuccaacggcugcgacuacgucuccaacaagggcgucgacaccgucuccgucggcaacacccucuacuacgucaacaagcaggagggccagucccucuacgucaagggcgagcccaucaucaacuucuacgacccccucgucuuccccuccgacgaguucgacgccuccaucucccaggucaacgagaagaucaaccagucccucgccuucauccgcaaguccgacgagcuccuccacaacgucaacgccggcaaguccaccaccaacaucaugaucaccaccaucaucaucgucaucaucgucauccuccucucccucaucgccgucggccuccuccucuacugcaaggcccgcugaggacuaguggaagcauuuuccuggcugauuaaaagaaauuacucagcuauggucaucuguuccuguuagaaggcuaugcagcauauuauauacuaugcgcauguuaugaaaugcauaauaaaaaauuuuaaaaaaucuaaaagaucuaaaaaaaaaaaaaaaaaaaaaaaaaaaaaaaaaaaaaaaaaaaaaaaaaaaaaaaaaaaaaaaaugcaucccccccccccccccccccccccccccccccaaaggcucuuuucagagccaccagaauu

SEQ ID NO: 8025 - RNA, 1919 nt, Artificial Sequence
  mRNA product Design c-4 comprising derived and/or modified sequence from HRSV(A2)__F-del_DSCav1_mut8 (opt3)
gggagaguccgcucagccagguugcagaagcggcuuagcguguguccuaaucuucucucugcguguagguaggccugugccgcaaacaagcuuaccauggagcugcucauccuuaaggccaacgcuauuaccacaauacugacugcagugacguucugcuuugccagcggccagaauaucaccgaagaguucuaccaauccacauguucugcggucucaaaaggguauuugggagcuuuaagaacugguugguacaccaguguuauuacaaucgaacugagcaacauuaaggagaucaaaugcaauggcaccgacgccaaggugaaacuaauaaagcaggaacucgauaaguauaaaaacgcaguaacugaccugcagcuucugaugcaguccacacccgccaccgggucuggaucggcuaucgcaucaggcguggccgucuguaagguguugcaccucgagggugagguuaauaaaauuaagagcgcucugcugaguacgaacaaagccguggucucccucucugggugcggagugagcguauuaacuuuuaagguucuggaucuuaagaauuacaucgacaaacaauugcugccuauucuaaacaagcaguccuguucaaucccaaauauagaaaccgugauugaguuccagcagaaaaacaauaggcuccuggaaaucacacgggaguuuagugucaacgcgggcgugacuaccccggugagcacauauaugcuuaccaauucugagcuguugucccucauuaacgauaugcccaucacgaaugaccaaaagaaacugaugucaaacaacguccagaucguucgccagcagagcuacaguauuaugugcauaaucaaggaagagguguuagcauauguagugcaacugccucucuacggcgucauugauacuccauguuggaaacuucauacaucuccccugugcaccacuaauacaaaggaaggguccaacaucuguuugacccgaacggaccguggaugguacugcgauaaugccgguagcgugucguucuuuccucaggcugagaccuguaagguucagucuaacagaguguucugcgacacaaugaacucccuaacucugccaucagaagucaaucucugcaauguggauauauuuaaccccaaauaugacuguaagauuaugaccaguaaaacagauguaagcuccucuguuaucacuagccugggcgccaucgugucaugcuacgggaagaccaaauguacagcaaguaauaagugcaggggaauuaucaagaccuucuccaacggcugugacuaugucagcaauaaagguguggacacugucucuguggggaacacgcuuuacuauguuaauaagcaagagggacagucacuguacgugaaaggcgagccuauuauaaacuuuuaugauccauugguauucccgagugacgaauuugaugcuagcaucucccaggucaaugagaagauuaaccagucucucgccuucauccggaaaucggacgaacuguuacacaacgugaaugcgggcaagagcacaaccaacaucaugauuacuaccauaaucauuguuaucauugugauccugcuaucccucauagccgucgggcugcuuuuguacugcaaggcacgcugaggacuaguggaagcauuuuccuggcugauuaaaagaaauuacucagcuauggucaucuguuccuguuagaaggcuaugcagcauauuauauacuaugcgcauguuaugaaaugcauaauaaaaaauuuuaaaaaaucuaaaagaucuaaaaaaaaaaaaaaaaaaaaaaaaaaaaaaaaaaaaaaaaaaaaaaaaaaaaaaaaaaaaaaaaugcaucccccccccccccccccccccccccccccccaaaggcucuuuucagagccaccagaauu

SEQ ID NO: 8026 - RNA, 1919 nt, Artificial Sequence
  mRNA product Design c-4 comprising derived and/or modified sequence from HRSV(A2)__F-del_DSCav1_mut8 (opt4)
gggagaguccgcucagccagguugcagaagcggcuuagcguguguccuaaucuucucucugcguguagguaggccugugccgcaaacaagcuuaccauggagcugcugauccugaaggccaacgccaucaccaccauccugaccgccgugaccuucugcuucgccagcggccagaacaucaccgaggaguucuaccagagcaccugcagcgccgugagcaagggcuaccugggcgcccugagaaccggcugguacaccagcgugaucaccaucgagcugagcaacaucaaggagaucaagugcaacggcaccgacgccaaggugaagcugaucaagcaggagcuggacaaguacaagaacgccgugaccgaccugcagcugcugaugcagagcacccccgccaccggcagcggcagcgccaucgccagcggcguggccgugugcaaggugcugcaccuggagggcgaggugaacaagaucaagagcgcccugcugagcaccaacaaggccguggugagccugagcggcugcggcgugagcgugcugaccuucaaggugcuggaccugaagaacuacaucgacaagcagcugcugcccauccugaacaagcagagcugcagcauccccaacaucgagaccgugaucgaguuccagcagaagaacaacagacugcuggagaucaccagagaguucagcgugaacgccggcgugaccacccccgugagcaccuacaugcugaccaacagcgagcugcugagccugaucaacgacaugcccaucaccaacgaccagaagaagcugaugagcaacaacgugcagaucgugagacagcagagcuacagcaucaugugcaucaucaaggaggaggugcuggccuacguggugcagcugccccuguacggcgugaucgacacccccugcuggaagcugcacaccagcccccugugcaccaccaacaccaaggagggcagcaacaucugccugaccagaaccgacagaggcugguacugcgacaacgccggcagcgugagcuucuucccccaggccgagaccugcaaggugcagagcaacagaguguucugcgacaccaugaacagccugacccugcccagcgaggugaaccugugcaacguggacaucuucaaccccaaguacgacugcaagaucaugaccagcaagaccgacgugagcagcagcgugaucaccagccugggcgccaucgugagcugcuacggcaagaccaagugcaccgccagcaacaagugcagaggcaucaucaagaccuucagcaacggcugcgacuacgugagcaacaagggcguggacaccgugagcgugggcaacacccuguacuacgugaacaagcaggagggccagagccuguacgugaagggcgagcccaucaucaacuucuacgacccccugguguuccccagcgacgaguucgacgccagcaucagccaggugaacgagaagaucaaccagagccuggccuucaucagaaagagcgacgagcugcugcacaacgugaacgccggcaagagcaccaccaacaucaugaucaccaccaucaucaucgugaucaucgugauccugcugagccugaucgccgugggccugcugcuguacugcaaggccagaugaggacuaguggaagcauuuuccuggcugauuaaaagaaauuacucagcuauggucaucuguuccuguuagaaggcuaugcagcauauuauauacuaugcgcauguuaugaaaugcauaauaaaaaauuuuaaaaaaucuaaaagaucuaaaaaaaaaaaaaaaaaaaaaaaaaaaaaaaaaaaaaaaaaaaaaaaaaaaaaaaaaaaaaaaaugcaucccccccccccccccccccccccccccccccaaaggcucuuuucagagccaccagaauu

SEQ ID NO: 8027 - RNA, 1919 nt, Artificial Sequence
  mRNA product Design c-4 comprising derived and/or modified sequence from HRSV(A2)__F-del_DSCav1_mut8 (opt5)
gggagaguccgcucagccagguugcagaagcggcuuagcguguguccuaaucuucucucugcguguagguaggccugugccgcaaacaagcuuaccauggagcugcucauccugaaggccaacgcuauuaccacaauccuuacggccgugaccuucugcuuugcgagcggccagaauauuacagaagaguucuaccaauccaccuguucugcugucagcaaaggguaucugggagcccucagaacaggcugguacaccuccguuaucacaauugaacugucuaacaucaaggagaucaaaugcaaugggaccgacgccaaggugaaacuuauuaagcaggaacuggauaaguauaaaaacgcugugacggaccuccagcugcugaugcagagcacccccgccacaggauccggcucugcuaucgccagcggggucgcgguguguaagguucuccaccuggagggagaggugaauaaaauuaaguccgcccuucugagcaccaacaaagcugucgugucucucuccggcugcggcguuagcgugcugacauuuaagguccuugaucugaagaauuacaucgacaaacaacuccugccuauucugaacaagcagucuuguuccaucccgaauauugaaaccgugaucgaguuccagcagaaaaacaaucggcuccuggaaaucacgcgcgaguuuagcgugaacgccggggucacaacccccguuucuacauauaugcuuaccaauuccgagcugcucagccugauuaacgauaugccuaucaccaaugaccaaaagaaacuuauguccaacaacgugcagauugugagacagcagucuuacagcaucaugugcauuaucaaggaagagguccuggcuuaugugguucaacucccccuguacggagugaucgauacaccuuguuggaaacugcauacgagcccccucugcaccacaaauaccaaggaaggcagcaacauuugucugacacggaccgaccgcgggugguacugcgauaaugccggaucugucuccuucuuuccucaggcggagacguguaaggugcagagcaacagaguuuucugcgacacaaugaacucucuuacccugccgagcgaagugaaucucugcaaugucgauaucuuuaaccccaaauaugacuguaagauuaugaccuccaaaacagaugugucuagcuccgucaucaccagccugggcgccauugugucuugcuacgggaagacaaaauguacggcuuccaauaagugccggggaaucaucaagaccuucagcaacggcugugacuauguuucuaauaaaggcguggacacagucuccguggggaacacccuuuacuauguuaauaagcaagagggacagagccuguacgugaaaggcgagccuauuaucaacuuuuaugauccccucgucuucccuuccgacgaauuugaugccucuauuagccaggugaaugagaagaucaaccagucccuggcuuucauucgcaaaucugacgaacugcuccacaacgugaaugccgggaaguccacaaccaacaucaugauuacgaccaucaucauuguuaucauugucauccugcuuucccugauugccgugggacuccugcuguacugcaaggcuagaugaggacuaguggaagcauuuuccuggcugauuaaaagaaauuacucagcuauggucaucuguuccuguuagaaggcuaugcagcauauuauauacuaugcgcauguuaugaaaugcauaauaaaaaauuuuaaaaaaucuaaaagaucuaaaaaaaaaaaaaaaaaaaaaaaaaaaaaaaaaaaaaaaaaaaaaaaaaaaaaaaaaaaaaaaaugcaucccccccccccccccccccccccccccccccaaaggcucuuuucagagccaccagaauu

SEQ ID NO: 8028 - RNA, 1919 nt, Artificial Sequence
  mRNA product Design c-4 comprising derived and/or modified sequence from HRSV(A2)__F-del_DSCav1_mut8 (opt6)
gggagaguccgcucagccagguugcagaagcggcuuagcguguguccuaaucuucucucugcguguagguaggccugugccgcaaacaagcuuaccauggaacuacucauauugaaagccaacgcaaucacaacaauacuaaccgccguaacauuuugcuucgcgucaggccaaaauauaacagaagaauuuuaccaaucaacaugcuccgccguaucaaaaggauaccuaggugcauuacgaaccgguugguacacaucaguaaucacaauagaacuuuccaacauuaaagaaauaaaaugcaauggcacagacgcaaaagucaaacuaauaaaacaagaacuagacaaauauaaaaacgccgucacagacuuacaacuauuaaugcaaagcacaccagcaacaggauccggaucagcaauagcaucaggaguagccgucuguaaaguacuacaccuagaaggcgaaguuaauaaaauuaaaucagcuuuauuaucaaccaacaaagcaguaguaucacuauccggaugcggagucuccguccuaacauucaaaguacuagaccucaagaauuacauagauaaacaacuacuaccaauacucaacaaacaaucauguucaauaccaaacaucgaaaccgucauagaauuucaacaaaaaaauaauagacucuuagaaauaacacgagaauuuagcguaaacgcaggagucacaaccccugucucaacauacaugcuaaccaauuccgaauuauuaucacucauaaaugacaugccaauaacuaaugaccaaaaaaaacuuaugucaaacaacguacaaauaguaagacaacaaucauauucaauaaugugcauaaucaaagaagaaguuuuagcauauguaguacaacuaccacuauauggcgucauagacacaccaugcuggaaauuacacacaucaccucuaugcacaacaaacacaaaagaaggaagcaacauuugccuaaccagaaccgauagaggaugguacugcgauaacgcaggcucaguaucauucuucccucaagccgaaacuugcaaaguccaaucaaauagagucuucugcgauacaaugaacuccuuaacuuuaccaucagaaguaaaucuaugcaacguagauaucuuuaauccaaaauacgauugcaaaaucaugacaucaaaaacagauguaucaucuaguguaauuaccucccuaggagcaauaguaagcugcuacggaaaaacaaaaugcaccgccucuaacaaaugucguggaauaauaaaaacauucucaaacggaugcgauuauguaucaaauaaaggugucgacaccguaucaguaggcaauacacuauacuauguaaauaaacaagaaggacaaucacucuacgucaaaggugaaccaauaauaaacuucuacgacccacuuguauucccaagcgacgaauuugacgcaucaauaagccaaguaaacgaaaaaauaaaccaaucacuagcauucaucagaaaaucagacgaacuacuccacaauguaaaugcaggaaaaucaacaaccaauaucaugauaacaaccauaauaauagucauaauaguaauacuauuaucccucauagccguuggacuacuccuauauuguaaagcacgauaaggacuaguggaagcauuuuccuggcugauuaaaagaaauuacucagcuauggucaucuguuccuguuagaaggcuaugcagcauauuauauacuaugcgcauguuaugaaaugcauaauaaaaaauuuuaaaaaaucuaaaagaucuaaaaaaaaaaaaaaaaaaaaaaaaaaaaaaaaaaaaaaaaaaaaaaaaaaaaaaaaaaaaaaaaugcaucccccccccccccccccccccccccccccccaaaggcucuuuucagagccaccagaauu

SEQ ID NO: 8029 - RNA, 1919 nt, Artificial Sequence
  mRNA product Design c-4 comprising derived and/or modified sequence from HRSV(A2)__F-del_DSCav1_mut8 (opt11)
gggagaguccgcucagccagguugcagaagcggcuuagcguguguccuaaucuucucucugcguguagguaggccugugccgcaaacaagcuuaccauggaacuccucauccucaaagccaacgccaucaccaccauacucaccgcaguaaccuucugcuucgcauccggccaaaacaucacagaagaguucuaccagaguaccugcuccgccgucuccaaaggcuaccuuggcgcccuccguaccgggugguacacauccgucaucacaaucgaacucuccaacaucaaagaaauaaagugcaacggcacagacgccaaaguaaaacugauaaagcaagaacucgacaaauacaaaaacgccguaaccgaccuccagcuacuaaugcaauccacucccgccaccggcagcggauccgccaucgccuccggaguagccgucuguaaagucuuacaccucgaaggcgaagugaacaaaaucaaauccgcccuacucucaaccaacaaagccguaguaucacucuccgggugcggcguuucagugcuaacguucaaaguccuugaccucaaaaacuacaucgacaaacaacuccuccccauccuaaauaaacaauccugcuccauacccaacaucgagacugucaucgaguuccagcagaaaaacaaccgacuccucgaaaucacacgcgaguucucugucaacgccggcgucacaacccccgucuccacauacaugcucaccaacagcgaacuccucucccuaaucaaugacaugcccaucaccaacgaccaaaagaaacucaugucaaacaacguccaaaucguccgccaacaauccuacagcaucaugugcaucaucaaagaagaaguucucgcauacguaguacaacucccccucuacggagugaucgacacccccugcuggaaacuacacaccagcccgcuuugcaccacaaacaccaaggaaggcuccaacaucugccucacucgaaccgaccgcggcugguacugcgacaacgcaggcuccgucaguuucuuuccccaagcagaaacaugcaaaguccaauccaaccgaguauucugcgacaccaugaacucccucacccuaccauccgaaguuaaccuaugcaacguggacaucuucaaccccaaguacgacugcaaaauuaugaccuccaaaaccgacguauccuccagcgucaucaccagccucggagcaauagucuccugcuacggcaagaccaagugcaccgcuuccaacaagugucgcggaaucaucaaaaccuucucaaacggcugcgacuacgucuccaacaaaggcgucgacaccguauccguaggaaacacccuauacuacgucaacaaacaagaaggacaaucccucuaugucaaaggcgaacccaucaucaauuucuacgacccccuagucuucccuuccgacgaguucgacgcguccaucagccaagucaaugaaaagaucaaccagagccuggcauucauccgcaaauccgacgaacuccuccacaacgucaacgcgggaaaauccacgacaaacaucaugaucaccaccaucaucaucgucaucauagucauucuccuuucucucaucgccgugggacuacuucucuacugcaaagcccgauaaggacuaguggaagcauuuuccuggcugauuaaaagaaauuacucagcuauggucaucuguuccuguuagaaggcuaugcagcauauuauauacuaugcgcauguuaugaaaugcauaauaaaaaauuuuaaaaaaucuaaaagaucuaaaaaaaaaaaaaaaaaaaaaaaaaaaaaaaaaaaaaaaaaaaaaaaaaaaaaaaaaaaaaaaaugcaucccccccccccccccccccccccccccccccaaaggcucuuuucagagccaccagaauu

SEQ ID NO: 8030 - RNA, 1837 nt, Artificial Sequence
  mRNA product Design c-5 comprising derived and/or modified sequence from HRSV(A2)__F-del_DSCav1_mut8 (opt1)
gggagagcggcucggccauuuugucccagucaguccggaggcugcggcugcagaaguaccgccugcggaguaacugcaaagaagcuuaccauggagcugcucauccugaaggccaacgccaucaccaccauccugacggcggugaccuucugcuucgccagcggccagaacaucaccgaggaguucuaccaguccacgugcagcgccgucuccaagggguaccucggcgcccugcggaccggcugguacaccuccgugaucaccaucgagcugagcaacaucaaggagaucaagugcaacgggaccgacgccaaggugaagcucaucaagcaggagcuggacaaguacaagaacgcggucacggaccugcagcuccugaugcaguccaccccggcaaccggcuccggcuccgccaucgcgagcggcgucgccgugugcaaggugcugcaccucgagggggaggucaacaagaucaagagcgcccugcuguccaccaacaaggccguggugagccucuccggcugcggcgucagcgugcugaccuucaaggugcuggaccucaagaacuacaucgacaagcagcugcugcccauccugaacaagcagagcugcuccauccccaacaucgagacggugaucgaguuccagcagaagaacaaccggcuccuggagaucacccgcgaguucagcgugaacgccggggucaccacccccguguccacguacaugcugaccaacagcgagcuccugucccugaucaacgacaugccgaucaccaacgaccagaagaagcucaugagcaacaacgugcagaucguccggcagcaguccuacagcaucaugugcaucaucaaggaggaggugcuggcguacgugguccagcugccccucuacggcgugaucgacacccccugcuggaagcugcacacgagcccccugugcaccaccaacaccaaggagggguccaacaucugccucacgcgcaccgaccggggcugguacugcgacaacgccggcagcgucuccuucuucccgcaggccgagaccugcaaggugcagagcaaccgcguguucugcgacaccaugaacucccugacgcugcccagcgagguaaaccucugcaacgucgacaucuucaaccccaaguacgacugcaagaucaugaccuccaagaccgacgugagcuccagcgugaucaccucccugggggccaucgucagcugcuacggcaagacgaagugcaccgccagcaacaagugccgggggaucaucaagaccuucuccaacggcugcgacuacgugagcaacaagggcguggacaccguguccgucgggaacacccuguacuacgugaacaagcaggagggccagagccucuacgugaagggggagcccaucaucaacuucuacgacccgcuggucuuccccuccgacgaguucgacgcgagcaucucccaggugaacgagaagaucaaccagagccuggccuucauccgcaaguccgacgagcugcuccacaacgugaacgccggcaagagcacgaccaacaucaugaucaccaccaucaucaucgucaucaucgugauccugcugucccucaucgccguggggcugcugcucuacugcaaggcccggugaggacuagucccuguucccagagcccacuuuuuuuucuuuuuuugaaauaaaauagccugucuuucagaucuaaaaaaaaaaaaaaaaaaaaaaaaaaaaaaaaaaaaaaaaaaaaaaaaaaaaaaaaaaaaaaaaugcaucccccccccccccccccccccccccccccccaaaggcucuuuucagagccaccagaauu

SEQ ID NO: 8031 - RNA, 1837 nt, Artificial Sequence
  mRNA product Design c-5 comprising derived and/or modified sequence from HRSV(A2)__F-del_DSCav1_mut8 (opt1)
gggagagcggcucggccauuuugucccagucaguccggaggcugcggcugcagaaguaccgccugcggaguaacugcaaagaagcuuaccauggagcugcucauccugaaggccaacgccaucaccaccauccugacggcggugaccuucugcuucgccagcggccagaacaucaccgaggaguucuaccaguccacgugcagcgccgucuccaagggguaccucggcgcccugcgcaccgggugguacaccagcgugaucaccaucgagcuguccaacaucaaggagaucaagugcaacggcaccgacgccaaggugaagcucaucaagcaggagcuggacaaguacaagaacgcggucacggaccugcagcuccugaugcagagcacccccgccaccggguccggcagcgccaucgccuccggcguggcggugugcaagguccugcaccucgagggggaggugaacaagaucaagagcgcccugcuguccaccaacaaggccguggucagccucuccggcugcggggugagcgugcugacguucaagguccuggaccucaagaacuacaucgacaagcagcugcugccgauccucaacaagcaguccugcagcauccccaacaucgagaccgugaucgaguuccagcagaagaacaaccggcugcuggagaucacccgcgaguucuccgugaacgccggcgucaccacgcccgugagcaccuacaugcucaccaacuccgagcugcugagccucaucaacgacaugcccaucaccaacgaccagaagaagcugaugagcaacaacgugcagaucguccggcagcaguccuacagcaucaugugcaucaucaaggaggaggugcuggccuacgugguccagcucccgcuguacggggugaucgacacgcccugcuggaagcugcacaccagcccccucugcaccaccaacacgaaggagggcuccaacaucugccugacccgcaccgaccggggcugguacugcgacaacgcgggguccgugagcuucuucccccaggccgagaccugcaagguccaguccaaccgcguguucugcgacacgaugaacagccugacccucccguccgaggucaaccugugcaacguggacaucuucaaccccaaguacgacugcaagaucaugaccagcaagaccgacguguccagcuccgucaucacgagccugggcgccaucguguccugcuacgggaagaccaagugcaccgccagcaacaagugccggggcaucaucaagaccuucuccaacggcugcgacuacgugagcaacaagggggucgacacgguguccgugggcaacacccucuacuacgucaacaagcaggaggggcagagccuguacgugaagggcgagcccaucaucaacuucuacgacccccugguguucccgagcgacgaguucgacgccuccaucagccaggucaacgagaagaucaaccagucccucgcguucauccgcaagagcgacgagcugcugcacaacgugaacgccgggaaguccaccaccaacaucaugaucaccacgaucaucaucgugaucaucgucauccuccugagccugaucgccgugggccuccugcuguacugcaaggcccggugaggacuagucccuguucccagagcccacuuuuuuuucuuuuuuugaaauaaaauagccugucuuucagaucuaaaaaaaaaaaaaaaaaaaaaaaaaaaaaaaaaaaaaaaaaaaaaaaaaaaaaaaaaaaaaaaaugcaucccccccccccccccccccccccccccccccaaaggcucuuuucagagccaccagaauu

SEQ ID NO: 8032 - RNA, 1837 nt, Artificial Sequence
  mRNA product Design c-5 comprising derived and/or modified sequence from HRSV(A2)__F-del_DSCav1_mut8 (opt2)
gggagagcggcucggccauuuugucccagucaguccggaggcugcggcugcagaaguaccgccugcggaguaacugcaaagaagcuuaccauggagcuccucauccucaaggccaacgccaucaccaccauccucaccgccgucaccuucugcuucgccuccggccagaacaucaccgaggaguucuaccaguccaccugcuccgccgucuccaagggcuaccucggcgcccuccgcaccggcugguacaccuccgucaucaccaucgagcucuccaacaucaaggagaucaagugcaacggcaccgacgccaaggucaagcucaucaagcaggagcucgacaaguacaagaacgccgucaccgaccuccagcuccucaugcaguccacccccgccaccggcuccggcuccgccaucgccuccggcgucgccgucugcaagguccuccaccucgagggcgaggucaacaagaucaaguccgcccuccucuccaccaacaaggccgucgucucccucuccggcugcggcgucuccguccucaccuucaagguccucgaccucaagaacuacaucgacaagcagcuccuccccauccucaacaagcaguccugcuccauccccaacaucgagaccgucaucgaguuccagcagaagaacaaccgccuccucgagaucacccgcgaguucuccgucaacgccggcgucaccacccccgucuccaccuacaugcucaccaacuccgagcuccucucccucaucaacgacaugcccaucaccaacgaccagaagaagcucauguccaacaacguccagaucguccgccagcaguccuacuccaucaugugcaucaucaaggaggagguccucgccuacgucguccagcucccccucuacggcgucaucgacacccccugcuggaagcuccacaccuccccccucugcaccaccaacaccaaggagggcuccaacaucugccucacccgcaccgaccgcggcugguacugcgacaacgccggcuccgucuccuucuucccccaggccgagaccugcaagguccaguccaaccgcgucuucugcgacaccaugaacucccucacccuccccuccgaggucaaccucugcaacgucgacaucuucaaccccaaguacgacugcaagaucaugaccuccaagaccgacgucuccuccuccgucaucaccucccucggcgccaucgucuccugcuacggcaagaccaagugcaccgccuccaacaagugccgcggcaucaucaagaccuucuccaacggcugcgacuacgucuccaacaagggcgucgacaccgucuccgucggcaacacccucuacuacgucaacaagcaggagggccagucccucuacgucaagggcgagcccaucaucaacuucuacgacccccucgucuuccccuccgacgaguucgacgccuccaucucccaggucaacgagaagaucaaccagucccucgccuucauccgcaaguccgacgagcuccuccacaacgucaacgccggcaaguccaccaccaacaucaugaucaccaccaucaucaucgucaucaucgucauccuccucucccucaucgccgucggccuccuccucuacugcaaggcccgcugaggacuagucccuguucccagagcccacuuuuuuuucuuuuuuugaaauaaaauagccugucuuucagaucuaaaaaaaaaaaaaaaaaaaaaaaaaaaaaaaaaaaaaaaaaaaaaaaaaaaaaaaaaaaaaaaaugcaucccccccccccccccccccccccccccccccaaaggcucuuuucagagccaccagaauu

SEQ ID NO: 8033 - RNA, 1837 nt, Artificial Sequence
  mRNA product Design c-5 comprising derived and/or modified sequence from HRSV(A2)__F-del_DSCav1_mut8 (opt3)
gggagagcggcucggccauuuugucccagucaguccggaggcugcggcugcagaaguaccgccugcggaguaacugcaaagaagcuuaccauggagcugcucauccuuaaggccaacgcuauuaccacaauacugacugcagugacguucugcuuugccagcggccagaauaucaccgaagaguucuaccaauccacauguucugcggucucaaaaggguauuugggagcuuuaagaacugguugguacaccaguguuauuacaaucgaacugagcaacauuaaggagaucaaaugcaauggcaccgacgccaaggugaaacuaauaaagcaggaacucgauaaguauaaaaacgcaguaacugaccugcagcuucugaugcaguccacacccgccaccgggucuggaucggcuaucgcaucaggcguggccgucuguaagguguugcaccucgagggugagguuaauaaaauuaagagcgcucugcugaguacgaacaaagccguggucucccucucugggugcggagugagcguauuaacuuuuaagguucuggaucuuaagaauuacaucgacaaacaauugcugccuauucuaaacaagcaguccuguucaaucccaaauauagaaaccgugauugaguuccagcagaaaaacaauaggcuccuggaaaucacacgggaguuuagugucaacgcgggcgugacuaccccggugagcacauauaugcuuaccaauucugagcuguugucccucauuaacgauaugcccaucacgaaugaccaaaagaaacugaugucaaacaacguccagaucguucgccagcagagcuacaguauuaugugcauaaucaaggaagagguguuagcauauguagugcaacugccucucuacggcgucauugauacuccauguuggaaacuucauacaucuccccugugcaccacuaauacaaaggaaggguccaacaucuguuugacccgaacggaccguggaugguacugcgauaaugccgguagcgugucguucuuuccucaggcugagaccuguaagguucagucuaacagaguguucugcgacacaaugaacucccuaacucugccaucagaagucaaucucugcaauguggauauauuuaaccccaaauaugacuguaagauuaugaccaguaaaacagauguaagcuccucuguuaucacuagccugggcgccaucgugucaugcuacgggaagaccaaauguacagcaaguaauaagugcaggggaauuaucaagaccuucuccaacggcugugacuaugucagcaauaaagguguggacacugucucuguggggaacacgcuuuacuauguuaauaagcaagagggacagucacuguacgugaaaggcgagccuauuauaaacuuuuaugauccauugguauucccgagugacgaauuugaugcuagcaucucccaggucaaugagaagauuaaccagucucucgccuucauccggaaaucggacgaacuguuacacaacgugaaugcgggcaagagcacaaccaacaucaugauuacuaccauaaucauuguuaucauugugauccugcuaucccucauagccgucgggcugcuuuuguacugcaaggcacgcugaggacuagucccuguucccagagcccacuuuuuuuucuuuuuuugaaauaaaauagccugucuuucagaucuaaaaaaaaaaaaaaaaaaaaaaaaaaaaaaaaaaaaaaaaaaaaaaaaaaaaaaaaaaaaaaaaugcaucccccccccccccccccccccccccccccccaaaggcucuuuucagagccaccagaauu

SEQ ID NO: 8034 - RNA, 1837 nt, Artificial Sequence
  mRNA product Design c-5 comprising derived and/or modified sequence from HRSV(A2)__F-del_DSCav1_mut8 (opt4)
gggagagcggcucggccauuuugucccagucaguccggaggcugcggcugcagaaguaccgccugcggaguaacugcaaagaagcuuaccauggagcugcugauccugaaggccaacgccaucaccaccauccugaccgccgugaccuucugcuucgccagcggccagaacaucaccgaggaguucuaccagagcaccugcagcgccgugagcaagggcuaccugggcgcccugagaaccggcugguacaccagcgugaucaccaucgagcugagcaacaucaaggagaucaagugcaacggcaccgacgccaaggugaagcugaucaagcaggagcuggacaaguacaagaacgccgugaccgaccugcagcugcugaugcagagcacccccgccaccggcagcggcagcgccaucgccagcggcguggccgugugcaaggugcugcaccuggagggcgaggugaacaagaucaagagcgcccugcugagcaccaacaaggccguggugagccugagcggcugcggcgugagcgugcugaccuucaaggugcuggaccugaagaacuacaucgacaagcagcugcugcccauccugaacaagcagagcugcagcauccccaacaucgagaccgugaucgaguuccagcagaagaacaacagacugcuggagaucaccagagaguucagcgugaacgccggcgugaccacccccgugagcaccuacaugcugaccaacagcgagcugcugagccugaucaacgacaugcccaucaccaacgaccagaagaagcugaugagcaacaacgugcagaucgugagacagcagagcuacagcaucaugugcaucaucaaggaggaggugcuggccuacguggugcagcugccccuguacggcgugaucgacacccccugcuggaagcugcacaccagcccccugugcaccaccaacaccaaggagggcagcaacaucugccugaccagaaccgacagaggcugguacugcgacaacgccggcagcgugagcuucuucccccaggccgagaccugcaaggugcagagcaacagaguguucugcgacaccaugaacagccugacccugcccagcgaggugaaccugugcaacguggacaucuucaaccccaaguacgacugcaagaucaugaccagcaagaccgacgugagcagcagcgugaucaccagccugggcgccaucgugagcugcuacggcaagaccaagugcaccgccagcaacaagugcagaggcaucaucaagaccuucagcaacggcugcgacuacgugagcaacaagggcguggacaccgugagcgugggcaacacccuguacuacgugaacaagcaggagggccagagccuguacgugaagggcgagcccaucaucaacuucuacgacccccugguguuccccagcgacgaguucgacgccagcaucagccaggugaacgagaagaucaaccagagccuggccuucaucagaaagagcgacgagcugcugcacaacgugaacgccggcaagagcaccaccaacaucaugaucaccaccaucaucaucgugaucaucgugauccugcugagccugaucgccgugggccugcugcuguacugcaaggccagaugaggacuagucccuguucccagagcccacuuuuuuuucuuuuuuugaaauaaaauagccugucuuucagaucuaaaaaaaaaaaaaaaaaaaaaaaaaaaaaaaaaaaaaaaaaaaaaaaaaaaaaaaaaaaaaaaaugcaucccccccccccccccccccccccccccccccaaaggcucuuuucagagccaccagaauu

SEQ ID NO: 8035 - RNA, 1837 nt, Artificial Sequence
  mRNA product Design c-5 comprising derived and/or modified sequence from HRSV(A2)__F-del_DSCav1_mut8 (opt5)
gggagagcggcucggccauuuugucccagucaguccggaggcugcggcugcagaaguaccgccugcggaguaacugcaaagaagcuuaccauggagcugcucauccugaaggccaacgcuauuaccacaauccuuacggccgugaccuucugcuuugcgagcggccagaauauuacagaagaguucuaccaauccaccuguucugcugucagcaaaggguaucugggagcccucagaacaggcugguacaccuccguuaucacaauugaacugucuaacaucaaggagaucaaaugcaaugggaccgacgccaaggugaaacuuauuaagcaggaacuggauaaguauaaaaacgcugugacggaccuccagcugcugaugcagagcacccccgccacaggauccggcucugcuaucgccagcggggucgcgguguguaagguucuccaccuggagggagaggugaauaaaauuaaguccgcccuucugagcaccaacaaagcugucgugucucucuccggcugcggcguuagcgugcugacauuuaagguccuugaucugaagaauuacaucgacaaacaacuccugccuauucugaacaagcagucuuguuccaucccgaauauugaaaccgugaucgaguuccagcagaaaaacaaucggcuccuggaaaucacgcgcgaguuuagcgugaacgccggggucacaacccccguuucuacauauaugcuuaccaauuccgagcugcucagccugauuaacgauaugccuaucaccaaugaccaaaagaaacuuauguccaacaacgugcagauugugagacagcagucuuacagcaucaugugcauuaucaaggaagagguccuggcuuaugugguucaacucccccuguacggagugaucgauacaccuuguuggaaacugcauacgagcccccucugcaccacaaauaccaaggaaggcagcaacauuugucugacacggaccgaccgcgggugguacugcgauaaugccggaucugucuccuucuuuccucaggcggagacguguaaggugcagagcaacagaguuuucugcgacacaaugaacucucuuacccugccgagcgaagugaaucucugcaaugucgauaucuuuaaccccaaauaugacuguaagauuaugaccuccaaaacagaugugucuagcuccgucaucaccagccugggcgccauugugucuugcuacgggaagacaaaauguacggcuuccaauaagugccggggaaucaucaagaccuucagcaacggcugugacuauguuucuaauaaaggcguggacacagucuccguggggaacacccuuuacuauguuaauaagcaagagggacagagccuguacgugaaaggcgagccuauuaucaacuuuuaugauccccucgucuucccuuccgacgaauuugaugccucuauuagccaggugaaugagaagaucaaccagucccuggcuuucauucgcaaaucugacgaacugcuccacaacgugaaugccgggaaguccacaaccaacaucaugauuacgaccaucaucauuguuaucauugucauccugcuuucccugauugccgugggacuccugcuguacugcaaggcuagaugaggacuagucccuguucccagagcccacuuuuuuuucuuuuuuugaaauaaaauagccugucuuucagaucuaaaaaaaaaaaaaaaaaaaaaaaaaaaaaaaaaaaaaaaaaaaaaaaaaaaaaaaaaaaaaaaaugcaucccccccccccccccccccccccccccccccaaaggcucuuuucagagccaccagaauu

SEQ ID NO: 8036 - RNA, 1837 nt, Artificial Sequence
  mRNA product Design c-5 comprising derived and/or modified sequence from HRSV(A2)__F-del_DSCav1_mut8 (opt6)
gggagagcggcucggccauuuugucccagucaguccggaggcugcggcugcagaaguaccgccugcggaguaacugcaaagaagcuuaccauggaacuacucauauugaaagccaacgcaaucacaacaauacuaaccgccguaacauuuugcuucgcgucaggccaaaauauaacagaagaauuuuaccaaucaacaugcuccgccguaucaaaaggauaccuaggugcauuacgaaccgguugguacacaucaguaaucacaauagaacuuuccaacauuaaagaaauaaaaugcaauggcacagacgcaaaagucaaacuaauaaaacaagaacuagacaaauauaaaaacgccgucacagacuuacaacuauuaaugcaaagcacaccagcaacaggauccggaucagcaauagcaucaggaguagccgucuguaaaguacuacaccuagaaggcgaaguuaauaaaauuaaaucagcuuuauuaucaaccaacaaagcaguaguaucacuauccggaugcggagucuccguccuaacauucaaaguacuagaccucaagaauuacauagauaaacaacuacuaccaauacucaacaaacaaucauguucaauaccaaacaucgaaaccgucauagaauuucaacaaaaaaauaauagacucuuagaaauaacacgagaauuuagcguaaacgcaggagucacaaccccugucucaacauacaugcuaaccaauuccgaauuauuaucacucauaaaugacaugccaauaacuaaugaccaaaaaaaacuuaugucaaacaacguacaaauaguaagacaacaaucauauucaauaaugugcauaaucaaagaagaaguuuuagcauauguaguacaacuaccacuauauggcgucauagacacaccaugcuggaaauuacacacaucaccucuaugcacaacaaacacaaaagaaggaagcaacauuugccuaaccagaaccgauagaggaugguacugcgauaacgcaggcucaguaucauucuucccucaagccgaaacuugcaaaguccaaucaaauagagucuucugcgauacaaugaacuccuuaacuuuaccaucagaaguaaaucuaugcaacguagauaucuuuaauccaaaauacgauugcaaaaucaugacaucaaaaacagauguaucaucuaguguaauuaccucccuaggagcaauaguaagcugcuacggaaaaacaaaaugcaccgccucuaacaaaugucguggaauaauaaaaacauucucaaacggaugcgauuauguaucaaauaaaggugucgacaccguaucaguaggcaauacacuauacuauguaaauaaacaagaaggacaaucacucuacgucaaaggugaaccaauaauaaacuucuacgacccacuuguauucccaagcgacgaauuugacgcaucaauaagccaaguaaacgaaaaaauaaaccaaucacuagcauucaucagaaaaucagacgaacuacuccacaauguaaaugcaggaaaaucaacaaccaauaucaugauaacaaccauaauaauagucauaauaguaauacuauuaucccucauagccguuggacuacuccuauauuguaaagcacgauaaggacuagucccuguucccagagcccacuuuuuuuucuuuuuuugaaauaaaauagccugucuuucagaucuaaaaaaaaaaaaaaaaaaaaaaaaaaaaaaaaaaaaaaaaaaaaaaaaaaaaaaaaaaaaaaaaugcaucccccccccccccccccccccccccccccccaaaggcucuuuucagagccaccagaauu

SEQ ID NO: 8037 - RNA, 1837 nt, Artificial Sequence
  mRNA product Design c-5 comprising derived and/or modified sequence from HRSV(A2)__F-del_DSCav1_mut8 (opt11)
gggagagcggcucggccauuuugucccagucaguccggaggcugcggcugcagaaguaccgccugcggaguaacugcaaagaagcuuaccauggaacuccucauccucaaagccaacgccaucaccaccauacucaccgcaguaaccuucugcuucgcauccggccaaaacaucacagaagaguucuaccagaguaccugcuccgccgucuccaaaggcuaccuuggcgcccuccguaccgggugguacacauccgucaucacaaucgaacucuccaacaucaaagaaauaaagugcaacggcacagacgccaaaguaaaacugauaaagcaagaacucgacaaauacaaaaacgccguaaccgaccuccagcuacuaaugcaauccacucccgccaccggcagcggauccgccaucgccuccggaguagccgucuguaaagucuuacaccucgaaggcgaagugaacaaaaucaaauccgcccuacucucaaccaacaaagccguaguaucacucuccgggugcggcguuucagugcuaacguucaaaguccuugaccucaaaaacuacaucgacaaacaacuccuccccauccuaaauaaacaauccugcuccauacccaacaucgagacugucaucgaguuccagcagaaaaacaaccgacuccucgaaaucacacgcgaguucucugucaacgccggcgucacaacccccgucuccacauacaugcucaccaacagcgaacuccucucccuaaucaaugacaugcccaucaccaacgaccaaaagaaacucaugucaaacaacguccaaaucguccgccaacaauccuacagcaucaugugcaucaucaaagaagaaguucucgcauacguaguacaacucccccucuacggagugaucgacacccccugcuggaaacuacacaccagcccgcuuugcaccacaaacaccaaggaaggcuccaacaucugccucacucgaaccgaccgcggcugguacugcgacaacgcaggcuccgucaguuucuuuccccaagcagaaacaugcaaaguccaauccaaccgaguauucugcgacaccaugaacucccucacccuaccauccgaaguuaaccuaugcaacguggacaucuucaaccccaaguacgacugcaaaauuaugaccuccaaaaccgacguauccuccagcgucaucaccagccucggagcaauagucuccugcuacggcaagaccaagugcaccgcuuccaacaagugucgcggaaucaucaaaaccuucucaaacggcugcgacuacgucuccaacaaaggcgucgacaccguauccguaggaaacacccuauacuacgucaacaaacaagaaggacaaucccucuaugucaaaggcgaacccaucaucaauuucuacgacccccuagucuucccuuccgacgaguucgacgcguccaucagccaagucaaugaaaagaucaaccagagccuggcauucauccgcaaauccgacgaacuccuccacaacgucaacgcgggaaaauccacgacaaacaucaugaucaccaccaucaucaucgucaucauagucauucuccuuucucucaucgccgugggacuacuucucuacugcaaagcccgauaaggacuagucccuguucccagagcccacuuuuuuuucuuuuuuugaaauaaaauagccugucuuucagaucuaaaaaaaaaaaaaaaaaaaaaaaaaaaaaaaaaaaaaaaaaaaaaaaaaaaaaaaaaaaaaaaaugcaucccccccccccccccccccccccccccccccaaaggcucuuuucagagccaccagaauu

SEQ ID NO: 8038 - RNA, 1846 nt, Artificial Sequence
  mRNA product Design d-1 comprising derived and/or modified sequence from HRSV(A2)__F-del_DSCav1_mut8 (opt1)
gggagacccgugacccggaaguuguacggcuacgcgacuuucccucccacaaacccucgcgcccuuccuuuccuacuugggcccggcagaaagcuuaccauggagcugcucauccugaaggccaacgccaucaccaccauccugacggcggugaccuucugcuucgccagcggccagaacaucaccgaggaguucuaccaguccacgugcagcgccgucuccaagggguaccucggcgcccugcggaccggcugguacaccuccgugaucaccaucgagcugagcaacaucaaggagaucaagugcaacgggaccgacgccaaggugaagcucaucaagcaggagcuggacaaguacaagaacgcggucacggaccugcagcuccugaugcaguccaccccggcaaccggcuccggcuccgccaucgcgagcggcgucgccgugugcaaggugcugcaccucgagggggaggucaacaagaucaagagcgcccugcuguccaccaacaaggccguggugagccucuccggcugcggcgucagcgugcugaccuucaaggugcuggaccucaagaacuacaucgacaagcagcugcugcccauccugaacaagcagagcugcuccauccccaacaucgagacggugaucgaguuccagcagaagaacaaccggcuccuggagaucacccgcgaguucagcgugaacgccggggucaccacccccguguccacguacaugcugaccaacagcgagcuccugucccugaucaacgacaugccgaucaccaacgaccagaagaagcucaugagcaacaacgugcagaucguccggcagcaguccuacagcaucaugugcaucaucaaggaggaggugcuggcguacgugguccagcugccccucuacggcgugaucgacacccccugcuggaagcugcacacgagcccccugugcaccaccaacaccaaggagggguccaacaucugccucacgcgcaccgaccggggcugguacugcgacaacgccggcagcgucuccuucuucccgcaggccgagaccugcaaggugcagagcaaccgcguguucugcgacaccaugaacucccugacgcugcccagcgagguaaaccucugcaacgucgacaucuucaaccccaaguacgacugcaagaucaugaccuccaagaccgacgugagcuccagcgugaucaccucccugggggccaucgucagcugcuacggcaagacgaagugcaccgccagcaacaagugccgggggaucaucaagaccuucuccaacggcugcgacuacgugagcaacaagggcguggacaccguguccgucgggaacacccuguacuacgugaacaagcaggagggccagagccucuacgugaagggggagcccaucaucaacuucuacgacccgcuggucuuccccuccgacgaguucgacgcgagcaucucccaggugaacgagaagaucaaccagagccuggccuucauccgcaaguccgacgagcugcuccacaacgugaacgccggcaagagcacgaccaacaucaugaucaccaccaucaucaucgucaucaucgugauccugcugucccucaucgccguggggcugcugcucuacugcaaggcccggugaggacuagucccuguucccagagcccacuuuuuuuucuuuuuuugaaauaaaauagccugucuuucagaucuaaaaaaaaaaaaaaaaaaaaaaaaaaaaaaaaaaaaaaaaaaaaaaaaaaaaaaaaaaaaaaaaugcaucccccccccccccccccccccccccccccccaaaggcucuuuucagagccaccagaauu

SEQ ID NO: 8039 - RNA, 1846 nt, Artificial Sequence
  mRNA product Design d-1 comprising derived and/or modified sequence from HRSV(A2)__F-del_DSCav1_mut8 (opt1)
gggagacccgugacccggaaguuguacggcuacgcgacuuucccucccacaaacccucgcgcccuuccuuuccuacuugggcccggcagaaagcuuaccauggagcugcucauccugaaggccaacgccaucaccaccauccugacggcggugaccuucugcuucgccagcggccagaacaucaccgaggaguucuaccaguccacgugcagcgccgucuccaagggguaccucggcgcccugcgcaccgggugguacaccagcgugaucaccaucgagcuguccaacaucaaggagaucaagugcaacggcaccgacgccaaggugaagcucaucaagcaggagcuggacaaguacaagaacgcggucacggaccugcagcuccugaugcagagcacccccgccaccggguccggcagcgccaucgccuccggcguggcggugugcaagguccugcaccucgagggggaggugaacaagaucaagagcgcccugcuguccaccaacaaggccguggucagccucuccggcugcggggugagcgugcugacguucaagguccuggaccucaagaacuacaucgacaagcagcugcugccgauccucaacaagcaguccugcagcauccccaacaucgagaccgugaucgaguuccagcagaagaacaaccggcugcuggagaucacccgcgaguucuccgugaacgccggcgucaccacgcccgugagcaccuacaugcucaccaacuccgagcugcugagccucaucaacgacaugcccaucaccaacgaccagaagaagcugaugagcaacaacgugcagaucguccggcagcaguccuacagcaucaugugcaucaucaaggaggaggugcuggccuacgugguccagcucccgcuguacggggugaucgacacgcccugcuggaagcugcacaccagcccccucugcaccaccaacacgaaggagggcuccaacaucugccugacccgcaccgaccggggcugguacugcgacaacgcgggguccgugagcuucuucccccaggccgagaccugcaagguccaguccaaccgcguguucugcgacacgaugaacagccugacccucccguccgaggucaaccugugcaacguggacaucuucaaccccaaguacgacugcaagaucaugaccagcaagaccgacguguccagcuccgucaucacgagccugggcgccaucguguccugcuacgggaagaccaagugcaccgccagcaacaagugccggggcaucaucaagaccuucuccaacggcugcgacuacgugagcaacaagggggucgacacgguguccgugggcaacacccucuacuacgucaacaagcaggaggggcagagccuguacgugaagggcgagcccaucaucaacuucuacgacccccugguguucccgagcgacgaguucgacgccuccaucagccaggucaacgagaagaucaaccagucccucgcguucauccgcaagagcgacgagcugcugcacaacgugaacgccgggaaguccaccaccaacaucaugaucaccacgaucaucaucgugaucaucgucauccuccugagccugaucgccgugggccuccugcuguacugcaaggcccggugaggacuagucccuguucccagagcccacuuuuuuuucuuuuuuugaaauaaaauagccugucuuucagaucuaaaaaaaaaaaaaaaaaaaaaaaaaaaaaaaaaaaaaaaaaaaaaaaaaaaaaaaaaaaaaaaaugcaucccccccccccccccccccccccccccccccaaaggcucuuuucagagccaccagaauu

SEQ ID NO: 8040 - RNA, 1846 nt, Artificial Sequence
  mRNA product Design d-1 comprising derived and/or modified sequence from HRSV(A2)__F-del_DSCav1_mut8 (opt2)
gggagacccgugacccggaaguuguacggcuacgcgacuuucccucccacaaacccucgcgcccuuccuuuccuacuugggcccggcagaaagcuuaccauggagcuccucauccucaaggccaacgccaucaccaccauccucaccgccgucaccuucugcuucgccuccggccagaacaucaccgaggaguucuaccaguccaccugcuccgccgucuccaagggcuaccucggcgcccuccgcaccggcugguacaccuccgucaucaccaucgagcucuccaacaucaaggagaucaagugcaacggcaccgacgccaaggucaagcucaucaagcaggagcucgacaaguacaagaacgccgucaccgaccuccagcuccucaugcaguccacccccgccaccggcuccggcuccgccaucgccuccggcgucgccgucugcaagguccuccaccucgagggcgaggucaacaagaucaaguccgcccuccucuccaccaacaaggccgucgucucccucuccggcugcggcgucuccguccucaccuucaagguccucgaccucaagaacuacaucgacaagcagcuccuccccauccucaacaagcaguccugcuccauccccaacaucgagaccgucaucgaguuccagcagaagaacaaccgccuccucgagaucacccgcgaguucuccgucaacgccggcgucaccacccccgucuccaccuacaugcucaccaacuccgagcuccucucccucaucaacgacaugcccaucaccaacgaccagaagaagcucauguccaacaacguccagaucguccgccagcaguccuacuccaucaugugcaucaucaaggaggagguccucgccuacgucguccagcucccccucuacggcgucaucgacacccccugcuggaagcuccacaccuccccccucugcaccaccaacaccaaggagggcuccaacaucugccucacccgcaccgaccgcggcugguacugcgacaacgccggcuccgucuccuucuucccccaggccgagaccugcaagguccaguccaaccgcgucuucugcgacaccaugaacucccucacccuccccuccgaggucaaccucugcaacgucgacaucuucaaccccaaguacgacugcaagaucaugaccuccaagaccgacgucuccuccuccgucaucaccucccucggcgccaucgucuccugcuacggcaagaccaagugcaccgccuccaacaagugccgcggcaucaucaagaccuucuccaacggcugcgacuacgucuccaacaagggcgucgacaccgucuccgucggcaacacccucuacuacgucaacaagcaggagggccagucccucuacgucaagggcgagcccaucaucaacuucuacgacccccucgucuuccccuccgacgaguucgacgccuccaucucccaggucaacgagaagaucaaccagucccucgccuucauccgcaaguccgacgagcuccuccacaacgucaacgccggcaaguccaccaccaacaucaugaucaccaccaucaucaucgucaucaucgucauccuccucucccucaucgccgucggccuccuccucuacugcaaggcccgcugaggacuagucccuguucccagagcccacuuuuuuuucuuuuuuugaaauaaaauagccugucuuucagaucuaaaaaaaaaaaaaaaaaaaaaaaaaaaaaaaaaaaaaaaaaaaaaaaaaaaaaaaaaaaaaaaaugcaucccccccccccccccccccccccccccccccaaaggcucuuuucagagccaccagaauu

SEQ ID NO: 8041 - RNA, 1846 nt, Artificial Sequence
  mRNA product Design d-1 comprising derived and/or modified sequence from HRSV(A2)__F-del_DSCav1_mut8 (opt3)
gggagacccgugacccggaaguuguacggcuacgcgacuuucccucccacaaacccucgcgcccuuccuuuccuacuugggcccggcagaaagcuuaccauggagcugcucauccuuaaggccaacgcuauuaccacaauacugacugcagugacguucugcuuugccagcggccagaauaucaccgaagaguucuaccaauccacauguucugcggucucaaaaggguauuugggagcuuuaagaacugguugguacaccaguguuauuacaaucgaacugagcaacauuaaggagaucaaaugcaauggcaccgacgccaaggugaaacuaauaaagcaggaacucgauaaguauaaaaacgcaguaacugaccugcagcuucugaugcaguccacacccgccaccgggucuggaucggcuaucgcaucaggcguggccgucuguaagguguugcaccucgagggugagguuaauaaaauuaagagcgcucugcugaguacgaacaaagccguggucucccucucugggugcggagugagcguauuaacuuuuaagguucuggaucuuaagaauuacaucgacaaacaauugcugccuauucuaaacaagcaguccuguucaaucccaaauauagaaaccgugauugaguuccagcagaaaaacaauaggcuccuggaaaucacacgggaguuuagugucaacgcgggcgugacuaccccggugagcacauauaugcuuaccaauucugagcuguugucccucauuaacgauaugcccaucacgaaugaccaaaagaaacugaugucaaacaacguccagaucguucgccagcagagcuacaguauuaugugcauaaucaaggaagagguguuagcauauguagugcaacugccucucuacggcgucauugauacuccauguuggaaacuucauacaucuccccugugcaccacuaauacaaaggaaggguccaacaucuguuugacccgaacggaccguggaugguacugcgauaaugccgguagcgugucguucuuuccucaggcugagaccuguaagguucagucuaacagaguguucugcgacacaaugaacucccuaacucugccaucagaagucaaucucugcaauguggauauauuuaaccccaaauaugacuguaagauuaugaccaguaaaacagauguaagcuccucuguuaucacuagccugggcgccaucgugucaugcuacgggaagaccaaauguacagcaaguaauaagugcaggggaauuaucaagaccuucuccaacggcugugacuaugucagcaauaaagguguggacacugucucuguggggaacacgcuuuacuauguuaauaagcaagagggacagucacuguacgugaaaggcgagccuauuauaaacuuuuaugauccauugguauucccgagugacgaauuugaugcuagcaucucccaggucaaugagaagauuaaccagucucucgccuucauccggaaaucggacgaacuguuacacaacgugaaugcgggcaagagcacaaccaacaucaugauuacuaccauaaucauuguuaucauugugauccugcuaucccucauagccgucgggcugcuuuuguacugcaaggcacgcugaggacuagucccuguucccagagcccacuuuuuuuucuuuuuuugaaauaaaauagccugucuuucagaucuaaaaaaaaaaaaaaaaaaaaaaaaaaaaaaaaaaaaaaaaaaaaaaaaaaaaaaaaaaaaaaaaugcaucccccccccccccccccccccccccccccccaaaggcucuuuucagagccaccagaauu

SEQ ID NO: 8042 - RNA, 1846 nt, Artificial Sequence
  mRNA product Design d-1 comprising derived and/or modified sequence from HRSV(A2)__F-del_DSCav1_mut8 (opt4)
gggagacccgugacccggaaguuguacggcuacgcgacuuucccucccacaaacccucgcgcccuuccuuuccuacuugggcccggcagaaagcuuaccauggagcugcugauccugaaggccaacgccaucaccaccauccugaccgccgugaccuucugcuucgccagcggccagaacaucaccgaggaguucuaccagagcaccugcagcgccgugagcaagggcuaccugggcgcccugagaaccggcugguacaccagcgugaucaccaucgagcugagcaacaucaaggagaucaagugcaacggcaccgacgccaaggugaagcugaucaagcaggagcuggacaaguacaagaacgccgugaccgaccugcagcugcugaugcagagcacccccgccaccggcagcggcagcgccaucgccagcggcguggccgugugcaaggugcugcaccuggagggcgaggugaacaagaucaagagcgcccugcugagcaccaacaaggccguggugagccugagcggcugcggcgugagcgugcugaccuucaaggugcuggaccugaagaacuacaucgacaagcagcugcugcccauccugaacaagcagagcugcagcauccccaacaucgagaccgugaucgaguuccagcagaagaacaacagacugcuggagaucaccagagaguucagcgugaacgccggcgugaccacccccgugagcaccuacaugcugaccaacagcgagcugcugagccugaucaacgacaugcccaucaccaacgaccagaagaagcugaugagcaacaacgugcagaucgugagacagcagagcuacagcaucaugugcaucaucaaggaggaggugcuggccuacguggugcagcugccccuguacggcgugaucgacacccccugcuggaagcugcacaccagcccccugugcaccaccaacaccaaggagggcagcaacaucugccugaccagaaccgacagaggcugguacugcgacaacgccggcagcgugagcuucuucccccaggccgagaccugcaaggugcagagcaacagaguguucugcgacaccaugaacagccugacccugcccagcgaggugaaccugugcaacguggacaucuucaaccccaaguacgacugcaagaucaugaccagcaagaccgacgugagcagcagcgugaucaccagccugggcgccaucgugagcugcuacggcaagaccaagugcaccgccagcaacaagugcagaggcaucaucaagaccuucagcaacggcugcgacuacgugagcaacaagggcguggacaccgugagcgugggcaacacccuguacuacgugaacaagcaggagggccagagccuguacgugaagggcgagcccaucaucaacuucuacgacccccugguguuccccagcgacgaguucgacgccagcaucagccaggugaacgagaagaucaaccagagccuggccuucaucagaaagagcgacgagcugcugcacaacgugaacgccggcaagagcaccaccaacaucaugaucaccaccaucaucaucgugaucaucgugauccugcugagccugaucgccgugggccugcugcuguacugcaaggccagaugaggacuagucccuguucccagagcccacuuuuuuuucuuuuuuugaaauaaaauagccugucuuucagaucuaaaaaaaaaaaaaaaaaaaaaaaaaaaaaaaaaaaaaaaaaaaaaaaaaaaaaaaaaaaaaaaaugcaucccccccccccccccccccccccccccccccaaaggcucuuuucagagccaccagaauu

SEQ ID NO: 8043 - RNA, 1846 nt, Artificial Sequence
  mRNA product Design d-1 comprising derived and/or modified sequence from HRSV(A2)__F-del_DSCav1_mut8 (opt5)
gggagacccgugacccggaaguuguacggcuacgcgacuuucccucccacaaacccucgcgcccuuccuuuccuacuugggcccggcagaaagcuuaccauggagcugcucauccugaaggccaacgcuauuaccacaauccuuacggccgugaccuucugcuuugcgagcggccagaauauuacagaagaguucuaccaauccaccuguucugcugucagcaaaggguaucugggagcccucagaacaggcugguacaccuccguuaucacaauugaacugucuaacaucaaggagaucaaaugcaaugggaccgacgccaaggugaaacuuauuaagcaggaacuggauaaguauaaaaacgcugugacggaccuccagcugcugaugcagagcacccccgccacaggauccggcucugcuaucgccagcggggucgcgguguguaagguucuccaccuggagggagaggugaauaaaauuaaguccgcccuucugagcaccaacaaagcugucgugucucucuccggcugcggcguuagcgugcugacauuuaagguccuugaucugaagaauuacaucgacaaacaacuccugccuauucugaacaagcagucuuguuccaucccgaauauugaaaccgugaucgaguuccagcagaaaaacaaucggcuccuggaaaucacgcgcgaguuuagcgugaacgccggggucacaacccccguuucuacauauaugcuuaccaauuccgagcugcucagccugauuaacgauaugccuaucaccaaugaccaaaagaaacuuauguccaacaacgugcagauugugagacagcagucuuacagcaucaugugcauuaucaaggaagagguccuggcuuaugugguucaacucccccuguacggagugaucgauacaccuuguuggaaacugcauacgagcccccucugcaccacaaauaccaaggaaggcagcaacauuugucugacacggaccgaccgcgggugguacugcgauaaugccggaucugucuccuucuuuccucaggcggagacguguaaggugcagagcaacagaguuuucugcgacacaaugaacucucuuacccugccgagcgaagugaaucucugcaaugucgauaucuuuaaccccaaauaugacuguaagauuaugaccuccaaaacagaugugucuagcuccgucaucaccagccugggcgccauugugucuugcuacgggaagacaaaauguacggcuuccaauaagugccggggaaucaucaagaccuucagcaacggcugugacuauguuucuaauaaaggcguggacacagucuccguggggaacacccuuuacuauguuaauaagcaagagggacagagccuguacgugaaaggcgagccuauuaucaacuuuuaugauccccucgucuucccuuccgacgaauuugaugccucuauuagccaggugaaugagaagaucaaccagucccuggcuuucauucgcaaaucugacgaacugcuccacaacgugaaugccgggaaguccacaaccaacaucaugauuacgaccaucaucauuguuaucauugucauccugcuuucccugauugccgugggacuccugcuguacugcaaggcuagaugaggacuagucccuguucccagagcccacuuuuuuuucuuuuuuugaaauaaaauagccugucuuucagaucuaaaaaaaaaaaaaaaaaaaaaaaaaaaaaaaaaaaaaaaaaaaaaaaaaaaaaaaaaaaaaaaaugcaucccccccccccccccccccccccccccccccaaaggcucuuuucagagccaccagaauu

SEQ ID NO: 8044 - RNA, 1846 nt, Artificial Sequence
  mRNA product Design d-1 comprising derived and/or modified sequence from HRSV(A2)__F-del_DSCav1_mut8 (opt6)
gggagacccgugacccggaaguuguacggcuacgcgacuuucccucccacaaacccucgcgcccuuccuuuccuacuugggcccggcagaaagcuuaccauggaacuacucauauugaaagccaacgcaaucacaacaauacuaaccgccguaacauuuugcuucgcgucaggccaaaauauaacagaagaauuuuaccaaucaacaugcuccgccguaucaaaaggauaccuaggugcauuacgaaccgguugguacacaucaguaaucacaauagaacuuuccaacauuaaagaaauaaaaugcaauggcacagacgcaaaagucaaacuaauaaaacaagaacuagacaaauauaaaaacgccgucacagacuuacaacuauuaaugcaaagcacaccagcaacaggauccggaucagcaauagcaucaggaguagccgucuguaaaguacuacaccuagaaggcgaaguuaauaaaauuaaaucagcuuuauuaucaaccaacaaagcaguaguaucacuauccggaugcggagucuccguccuaacauucaaaguacuagaccucaagaauuacauagauaaacaacuacuaccaauacucaacaaacaaucauguucaauaccaaacaucgaaaccgucauagaauuucaacaaaaaaauaauagacucuuagaaauaacacgagaauuuagcguaaacgcaggagucacaaccccugucucaacauacaugcuaaccaauuccgaauuauuaucacucauaaaugacaugccaauaacuaaugaccaaaaaaaacuuaugucaaacaacguacaaauaguaagacaacaaucauauucaauaaugugcauaaucaaagaagaaguuuuagcauauguaguacaacuaccacuauauggcgucauagacacaccaugcuggaaauuacacacaucaccucuaugcacaacaaacacaaaagaaggaagcaacauuugccuaaccagaaccgauagaggaugguacugcgauaacgcaggcucaguaucauucuucccucaagccgaaacuugcaaaguccaaucaaauagagucuucugcgauacaaugaacuccuuaacuuuaccaucagaaguaaaucuaugcaacguagauaucuuuaauccaaaauacgauugcaaaaucaugacaucaaaaacagauguaucaucuaguguaauuaccucccuaggagcaauaguaagcugcuacggaaaaacaaaaugcaccgccucuaacaaaugucguggaauaauaaaaacauucucaaacggaugcgauuauguaucaaauaaaggugucgacaccguaucaguaggcaauacacuauacuauguaaauaaacaagaaggacaaucacucuacgucaaaggugaaccaauaauaaacuucuacgacccacuuguauucccaagcgacgaauuugacgcaucaauaagccaaguaaacgaaaaaauaaaccaaucacuagcauucaucagaaaaucagacgaacuacuccacaauguaaaugcaggaaaaucaacaaccaauaucaugauaacaaccauaauaauagucauaauaguaauacuauuaucccucauagccguuggacuacuccuauauuguaaagcacgauaaggacuagucccuguucccagagcccacuuuuuuuucuuuuuuugaaauaaaauagccugucuuucagaucuaaaaaaaaaaaaaaaaaaaaaaaaaaaaaaaaaaaaaaaaaaaaaaaaaaaaaaaaaaaaaaaaugcaucccccccccccccccccccccccccccccccaaaggcucuuuucagagccaccagaauu

SEQ ID NO: 8045 - RNA, 1846 nt, Artificial Sequence
  mRNA product Design d-1 comprising derived and/or modified sequence from HRSV(A2)__F-del_DSCav1_mut8 (opt11)
gggagacccgugacccggaaguuguacggcuacgcgacuuucccucccacaaacccucgcgcccuuccuuuccuacuugggcccggcagaaagcuuaccauggaacuccucauccucaaagccaacgccaucaccaccauacucaccgcaguaaccuucugcuucgcauccggccaaaacaucacagaagaguucuaccagaguaccugcuccgccgucuccaaaggcuaccuuggcgcccuccguaccgggugguacacauccgucaucacaaucgaacucuccaacaucaaagaaauaaagugcaacggcacagacgccaaaguaaaacugauaaagcaagaacucgacaaauacaaaaacgccguaaccgaccuccagcuacuaaugcaauccacucccgccaccggcagcggauccgccaucgccuccggaguagccgucuguaaagucuuacaccucgaaggcgaagugaacaaaaucaaauccgcccuacucucaaccaacaaagccguaguaucacucuccgggugcggcguuucagugcuaacguucaaaguccuugaccucaaaaacuacaucgacaaacaacuccuccccauccuaaauaaacaauccugcuccauacccaacaucgagacugucaucgaguuccagcagaaaaacaaccgacuccucgaaaucacacgcgaguucucugucaacgccggcgucacaacccccgucuccacauacaugcucaccaacagcgaacuccucucccuaaucaaugacaugcccaucaccaacgaccaaaagaaacucaugucaaacaacguccaaaucguccgccaacaauccuacagcaucaugugcaucaucaaagaagaaguucucgcauacguaguacaacucccccucuacggagugaucgacacccccugcuggaaacuacacaccagcccgcuuugcaccacaaacaccaaggaaggcuccaacaucugccucacucgaaccgaccgcggcugguacugcgacaacgcaggcuccgucaguuucuuuccccaagcagaaacaugcaaaguccaauccaaccgaguauucugcgacaccaugaacucccucacccuaccauccgaaguuaaccuaugcaacguggacaucuucaaccccaaguacgacugcaaaauuaugaccuccaaaaccgacguauccuccagcgucaucaccagccucggagcaauagucuccugcuacggcaagaccaagugcaccgcuuccaacaagugucgcggaaucaucaaaaccuucucaaacggcugcgacuacgucuccaacaaaggcgucgacaccguauccguaggaaacacccuauacuacgucaacaaacaagaaggacaaucccucuaugucaaaggcgaacccaucaucaauuucuacgacccccuagucuucccuuccgacgaguucgacgcguccaucagccaagucaaugaaaagaucaaccagagccuggcauucauccgcaaauccgacgaacuccuccacaacgucaacgcgggaaaauccacgacaaacaucaugaucaccaccaucaucaucgucaucauagucauucuccuuucucucaucgccgugggacuacuucucuacugcaaagcccgauaaggacuagucccuguucccagagcccacuuuuuuuucuuuuuuugaaauaaaauagccugucuuucagaucuaaaaaaaaaaaaaaaaaaaaaaaaaaaaaaaaaaaaaaaaaaaaaaaaaaaaaaaaaaaaaaaaugcaucccccccccccccccccccccccccccccccaaaggcucuuuucagagccaccagaauu

SEQ ID NO: 8046 - RNA, 1901 nt, Artificial Sequence
  mRNA product Design d-2 comprising derived and/or modified sequence from HRSV(A2)__F-del_DSCav1_mut8 (opt1)
gggagagcggcucggccauuuugucccagucaguccggaggcugcggcugcagaaguaccgccugcggaguaacugcaaagaagcuuaccauggagcugcucauccugaaggccaacgccaucaccaccauccugacggcggugaccuucugcuucgccagcggccagaacaucaccgaggaguucuaccaguccacgugcagcgccgucuccaagggguaccucggcgcccugcggaccggcugguacaccuccgugaucaccaucgagcugagcaacaucaaggagaucaagugcaacgggaccgacgccaaggugaagcucaucaagcaggagcuggacaaguacaagaacgcggucacggaccugcagcuccugaugcaguccaccccggcaaccggcuccggcuccgccaucgcgagcggcgucgccgugugcaaggugcugcaccucgagggggaggucaacaagaucaagagcgcccugcuguccaccaacaaggccguggugagccucuccggcugcggcgucagcgugcugaccuucaaggugcuggaccucaagaacuacaucgacaagcagcugcugcccauccugaacaagcagagcugcuccauccccaacaucgagacggugaucgaguuccagcagaagaacaaccggcuccuggagaucacccgcgaguucagcgugaacgccggggucaccacccccguguccacguacaugcugaccaacagcgagcuccugucccugaucaacgacaugccgaucaccaacgaccagaagaagcucaugagcaacaacgugcagaucguccggcagcaguccuacagcaucaugugcaucaucaaggaggaggugcuggcguacgugguccagcugccccucuacggcgugaucgacacccccugcuggaagcugcacacgagcccccugugcaccaccaacaccaaggagggguccaacaucugccucacgcgcaccgaccggggcugguacugcgacaacgccggcagcgucuccuucuucccgcaggccgagaccugcaaggugcagagcaaccgcguguucugcgacaccaugaacucccugacgcugcccagcgagguaaaccucugcaacgucgacaucuucaaccccaaguacgacugcaagaucaugaccuccaagaccgacgugagcuccagcgugaucaccucccugggggccaucgucagcugcuacggcaagacgaagugcaccgccagcaacaagugccgggggaucaucaagaccuucuccaacggcugcgacuacgugagcaacaagggcguggacaccguguccgucgggaacacccuguacuacgugaacaagcaggagggccagagccucuacgugaagggggagcccaucaucaacuucuacgacccgcuggucuuccccuccgacgaguucgacgcgagcaucucccaggugaacgagaagaucaaccagagccuggccuucauccgcaaguccgacgagcugcuccacaacgugaacgccggcaagagcacgaccaacaucaugaucaccaccaucaucaucgucaucaucgugauccugcugucccucaucgccguggggcugcugcucuacugcaaggcccggugaggacuaguaauaaggaaacuguaugaaugucugugggcaggaagugaagagauccuucuguaaagguuuuuggaauuaugucugcugaauaauaaacuuuuuugaaauaauaaaucugguagaaaaaugagaucuaaaaaaaaaaaaaaaaaaaaaaaaaaaaaaaaaaaaaaaaaaaaaaaaaaaaaaaaaaaaaaaaugcaucccccccccccccccccccccccccccccccaaaggcucuuuucagagccaccagaauu

SEQ ID NO: 8047 - RNA, 1901 nt, Artificial Sequence
  mRNA product Design d-2 comprising derived and/or modified sequence from HRSV(A2)__F-del_DSCav1_mut8 (opt1)
gggagagcggcucggccauuuugucccagucaguccggaggcugcggcugcagaaguaccgccugcggaguaacugcaaagaagcuuaccauggagcugcucauccugaaggccaacgccaucaccaccauccugacggcggugaccuucugcuucgccagcggccagaacaucaccgaggaguucuaccaguccacgugcagcgccgucuccaagggguaccucggcgcccugcgcaccgggugguacaccagcgugaucaccaucgagcuguccaacaucaaggagaucaagugcaacggcaccgacgccaaggugaagcucaucaagcaggagcuggacaaguacaagaacgcggucacggaccugcagcuccugaugcagagcacccccgccaccggguccggcagcgccaucgccuccggcguggcggugugcaagguccugcaccucgagggggaggugaacaagaucaagagcgcccugcuguccaccaacaaggccguggucagccucuccggcugcggggugagcgugcugacguucaagguccuggaccucaagaacuacaucgacaagcagcugcugccgauccucaacaagcaguccugcagcauccccaacaucgagaccgugaucgaguuccagcagaagaacaaccggcugcuggagaucacccgcgaguucuccgugaacgccggcgucaccacgcccgugagcaccuacaugcucaccaacuccgagcugcugagccucaucaacgacaugcccaucaccaacgaccagaagaagcugaugagcaacaacgugcagaucguccggcagcaguccuacagcaucaugugcaucaucaaggaggaggugcuggccuacgugguccagcucccgcuguacggggugaucgacacgcccugcuggaagcugcacaccagcccccucugcaccaccaacacgaaggagggcuccaacaucugccugacccgcaccgaccggggcugguacugcgacaacgcgggguccgugagcuucuucccccaggccgagaccugcaagguccaguccaaccgcguguucugcgacacgaugaacagccugacccucccguccgaggucaaccugugcaacguggacaucuucaaccccaaguacgacugcaagaucaugaccagcaagaccgacguguccagcuccgucaucacgagccugggcgccaucguguccugcuacgggaagaccaagugcaccgccagcaacaagugccggggcaucaucaagaccuucuccaacggcugcgacuacgugagcaacaagggggucgacacgguguccgugggcaacacccucuacuacgucaacaagcaggaggggcagagccuguacgugaagggcgagcccaucaucaacuucuacgacccccugguguucccgagcgacgaguucgacgccuccaucagccaggucaacgagaagaucaaccagucccucgcguucauccgcaagagcgacgagcugcugcacaacgugaacgccgggaaguccaccaccaacaucaugaucaccacgaucaucaucgugaucaucgucauccuccugagccugaucgccgugggccuccugcuguacugcaaggcccggugaggacuaguaauaaggaaacuguaugaaugucugugggcaggaagugaagagauccuucuguaaagguuuuuggaauuaugucugcugaauaauaaacuuuuuugaaauaauaaaucugguagaaaaaugagaucuaaaaaaaaaaaaaaaaaaaaaaaaaaaaaaaaaaaaaaaaaaaaaaaaaaaaaaaaaaaaaaaaugcaucccccccccccccccccccccccccccccccaaaggcucuuuucagagccaccagaauu

SEQ ID NO: 8048 - RNA, 1901 nt, Artificial Sequence
  mRNA product Design d-2 comprising derived and/or modified sequence from HRSV(A2)__F-del_DSCav1_mut8 (opt2)
gggagagcggcucggccauuuugucccagucaguccggaggcugcggcugcagaaguaccgccugcggaguaacugcaaagaagcuuaccauggagcuccucauccucaaggccaacgccaucaccaccauccucaccgccgucaccuucugcuucgccuccggccagaacaucaccgaggaguucuaccaguccaccugcuccgccgucuccaagggcuaccucggcgcccuccgcaccggcugguacaccuccgucaucaccaucgagcucuccaacaucaaggagaucaagugcaacggcaccgacgccaaggucaagcucaucaagcaggagcucgacaaguacaagaacgccgucaccgaccuccagcuccucaugcaguccacccccgccaccggcuccggcuccgccaucgccuccggcgucgccgucugcaagguccuccaccucgagggcgaggucaacaagaucaaguccgcccuccucuccaccaacaaggccgucgucucccucuccggcugcggcgucuccguccucaccuucaagguccucgaccucaagaacuacaucgacaagcagcuccuccccauccucaacaagcaguccugcuccauccccaacaucgagaccgucaucgaguuccagcagaagaacaaccgccuccucgagaucacccgcgaguucuccgucaacgccggcgucaccacccccgucuccaccuacaugcucaccaacuccgagcuccucucccucaucaacgacaugcccaucaccaacgaccagaagaagcucauguccaacaacguccagaucguccgccagcaguccuacuccaucaugugcaucaucaaggaggagguccucgccuacgucguccagcucccccucuacggcgucaucgacacccccugcuggaagcuccacaccuccccccucugcaccaccaacaccaaggagggcuccaacaucugccucacccgcaccgaccgcggcugguacugcgacaacgccggcuccgucuccuucuucccccaggccgagaccugcaagguccaguccaaccgcgucuucugcgacaccaugaacucccucacccuccccuccgaggucaaccucugcaacgucgacaucuucaaccccaaguacgacugcaagaucaugaccuccaagaccgacgucuccuccuccgucaucaccucccucggcgccaucgucuccugcuacggcaagaccaagugcaccgccuccaacaagugccgcggcaucaucaagaccuucuccaacggcugcgacuacgucuccaacaagggcgucgacaccgucuccgucggcaacacccucuacuacgucaacaagcaggagggccagucccucuacgucaagggcgagcccaucaucaacuucuacgacccccucgucuuccccuccgacgaguucgacgccuccaucucccaggucaacgagaagaucaaccagucccucgccuucauccgcaaguccgacgagcuccuccacaacgucaacgccggcaaguccaccaccaacaucaugaucaccaccaucaucaucgucaucaucgucauccuccucucccucaucgccgucggccuccuccucuacugcaaggcccgcugaggacuaguaauaaggaaacuguaugaaugucugugggcaggaagugaagagauccuucuguaaagguuuuuggaauuaugucugcugaauaauaaacuuuuuugaaauaauaaaucugguagaaaaaugagaucuaaaaaaaaaaaaaaaaaaaaaaaaaaaaaaaaaaaaaaaaaaaaaaaaaaaaaaaaaaaaaaaaugcaucccccccccccccccccccccccccccccccaaaggcucuuuucagagccaccagaauu

SEQ ID NO: 8049 - RNA, 1901 nt, Artificial Sequence
  mRNA product Design d-2 comprising derived and/or modified sequence from HRSV(A2)__F-del_DSCav1_mut8 (opt3)
gggagagcggcucggccauuuugucccagucaguccggaggcugcggcugcagaaguaccgccugcggaguaacugcaaagaagcuuaccauggagcugcucauccuuaaggccaacgcuauuaccacaauacugacugcagugacguucugcuuugccagcggccagaauaucaccgaagaguucuaccaauccacauguucugcggucucaaaaggguauuugggagcuuuaagaacugguugguacaccaguguuauuacaaucgaacugagcaacauuaaggagaucaaaugcaauggcaccgacgccaaggugaaacuaauaaagcaggaacucgauaaguauaaaaacgcaguaacugaccugcagcuucugaugcaguccacacccgccaccgggucuggaucggcuaucgcaucaggcguggccgucuguaagguguugcaccucgagggugagguuaauaaaauuaagagcgcucugcugaguacgaacaaagccguggucucccucucugggugcggagugagcguauuaacuuuuaagguucuggaucuuaagaauuacaucgacaaacaauugcugccuauucuaaacaagcaguccuguucaaucccaaauauagaaaccgugauugaguuccagcagaaaaacaauaggcuccuggaaaucacacgggaguuuagugucaacgcgggcgugacuaccccggugagcacauauaugcuuaccaauucugagcuguugucccucauuaacgauaugcccaucacgaaugaccaaaagaaacugaugucaaacaacguccagaucguucgccagcagagcuacaguauuaugugcauaaucaaggaagagguguuagcauauguagugcaacugccucucuacggcgucauugauacuccauguuggaaacuucauacaucuccccugugcaccacuaauacaaaggaaggguccaacaucuguuugacccgaacggaccguggaugguacugcgauaaugccgguagcgugucguucuuuccucaggcugagaccuguaagguucagucuaacagaguguucugcgacacaaugaacucccuaacucugccaucagaagucaaucucugcaauguggauauauuuaaccccaaauaugacuguaagauuaugaccaguaaaacagauguaagcuccucuguuaucacuagccugggcgccaucgugucaugcuacgggaagaccaaauguacagcaaguaauaagugcaggggaauuaucaagaccuucuccaacggcugugacuaugucagcaauaaagguguggacacugucucuguggggaacacgcuuuacuauguuaauaagcaagagggacagucacuguacgugaaaggcgagccuauuauaaacuuuuaugauccauugguauucccgagugacgaauuugaugcuagcaucucccaggucaaugagaagauuaaccagucucucgccuucauccggaaaucggacgaacuguuacacaacgugaaugcgggcaagagcacaaccaacaucaugauuacuaccauaaucauuguuaucauugugauccugcuaucccucauagccgucgggcugcuuuuguacugcaaggcacgcugaggacuaguaauaaggaaacuguaugaaugucugugggcaggaagugaagagauccuucuguaaagguuuuuggaauuaugucugcugaauaauaaacuuuuuugaaauaauaaaucugguagaaaaaugagaucuaaaaaaaaaaaaaaaaaaaaaaaaaaaaaaaaaaaaaaaaaaaaaaaaaaaaaaaaaaaaaaaaugcaucccccccccccccccccccccccccccccccaaaggcucuuuucagagccaccagaauu

SEQ ID NO: 8050 - RNA, 1901 nt, Artificial Sequence
  mRNA product Design d-2 comprising derived and/or modified sequence from HRSV(A2)__F-del_DSCav1_mut8 (opt4)
gggagagcggcucggccauuuugucccagucaguccggaggcugcggcugcagaaguaccgccugcggaguaacugcaaagaagcuuaccauggagcugcugauccugaaggccaacgccaucaccaccauccugaccgccgugaccuucugcuucgccagcggccagaacaucaccgaggaguucuaccagagcaccugcagcgccgugagcaagggcuaccugggcgcccugagaaccggcugguacaccagcgugaucaccaucgagcugagcaacaucaaggagaucaagugcaacggcaccgacgccaaggugaagcugaucaagcaggagcuggacaaguacaagaacgccgugaccgaccugcagcugcugaugcagagcacccccgccaccggcagcggcagcgccaucgccagcggcguggccgugugcaaggugcugcaccuggagggcgaggugaacaagaucaagagcgcccugcugagcaccaacaaggccguggugagccugagcggcugcggcgugagcgugcugaccuucaaggugcuggaccugaagaacuacaucgacaagcagcugcugcccauccugaacaagcagagcugcagcauccccaacaucgagaccgugaucgaguuccagcagaagaacaacagacugcuggagaucaccagagaguucagcgugaacgccggcgugaccacccccgugagcaccuacaugcugaccaacagcgagcugcugagccugaucaacgacaugcccaucaccaacgaccagaagaagcugaugagcaacaacgugcagaucgugagacagcagagcuacagcaucaugugcaucaucaaggaggaggugcuggccuacguggugcagcugccccuguacggcgugaucgacacccccugcuggaagcugcacaccagcccccugugcaccaccaacaccaaggagggcagcaacaucugccugaccagaaccgacagaggcugguacugcgacaacgccggcagcgugagcuucuucccccaggccgagaccugcaaggugcagagcaacagaguguucugcgacaccaugaacagccugacccugcccagcgaggugaaccugugcaacguggacaucuucaaccccaaguacgacugcaagaucaugaccagcaagaccgacgugagcagcagcgugaucaccagccugggcgccaucgugagcugcuacggcaagaccaagugcaccgccagcaacaagugcagaggcaucaucaagaccuucagcaacggcugcgacuacgugagcaacaagggcguggacaccgugagcgugggcaacacccuguacuacgugaacaagcaggagggccagagccuguacgugaagggcgagcccaucaucaacuucuacgacccccugguguuccccagcgacgaguucgacgccagcaucagccaggugaacgagaagaucaaccagagccuggccuucaucagaaagagcgacgagcugcugcacaacgugaacgccggcaagagcaccaccaacaucaugaucaccaccaucaucaucgugaucaucgugauccugcugagccugaucgccgugggccugcugcuguacugcaaggccagaugaggacuaguaauaaggaaacuguaugaaugucugugggcaggaagugaagagauccuucuguaaagguuuuuggaauuaugucugcugaauaauaaacuuuuuugaaauaauaaaucugguagaaaaaugagaucuaaaaaaaaaaaaaaaaaaaaaaaaaaaaaaaaaaaaaaaaaaaaaaaaaaaaaaaaaaaaaaaaugcaucccccccccccccccccccccccccccccccaaaggcucuuuucagagccaccagaauu

SEQ ID NO: 8051 - RNA, 1901 nt, Artificial Sequence
  mRNA product Design d-2 comprising derived and/or modified sequence from HRSV(A2)__F-del_DSCav1_mut8 (opt5)
gggagagcggcucggccauuuugucccagucaguccggaggcugcggcugcagaaguaccgccugcggaguaacugcaaagaagcuuaccauggagcugcucauccugaaggccaacgcuauuaccacaauccuuacggccgugaccuucugcuuugcgagcggccagaauauuacagaagaguucuaccaauccaccuguucugcugucagcaaaggguaucugggagcccucagaacaggcugguacaccuccguuaucacaauugaacugucuaacaucaaggagaucaaaugcaaugggaccgacgccaaggugaaacuuauuaagcaggaacuggauaaguauaaaaacgcugugacggaccuccagcugcugaugcagagcacccccgccacaggauccggcucugcuaucgccagcggggucgcgguguguaagguucuccaccuggagggagaggugaauaaaauuaaguccgcccuucugagcaccaacaaagcugucgugucucucuccggcugcggcguuagcgugcugacauuuaagguccuugaucugaagaauuacaucgacaaacaacuccugccuauucugaacaagcagucuuguuccaucccgaauauugaaaccgugaucgaguuccagcagaaaaacaaucggcuccuggaaaucacgcgcgaguuuagcgugaacgccggggucacaacccccguuucuacauauaugcuuaccaauuccgagcugcucagccugauuaacgauaugccuaucaccaaugaccaaaagaaacuuauguccaacaacgugcagauugugagacagcagucuuacagcaucaugugcauuaucaaggaagagguccuggcuuaugugguucaacucccccuguacggagugaucgauacaccuuguuggaaacugcauacgagcccccucugcaccacaaauaccaaggaaggcagcaacauuugucugacacggaccgaccgcgggugguacugcgauaaugccggaucugucuccuucuuuccucaggcggagacguguaaggugcagagcaacagaguuuucugcgacacaaugaacucucuuacccugccgagcgaagugaaucucugcaaugucgauaucuuuaaccccaaauaugacuguaagauuaugaccuccaaaacagaugugucuagcuccgucaucaccagccugggcgccauugugucuugcuacgggaagacaaaauguacggcuuccaauaagugccggggaaucaucaagaccuucagcaacggcugugacuauguuucuaauaaaggcguggacacagucuccguggggaacacccuuuacuauguuaauaagcaagagggacagagccuguacgugaaaggcgagccuauuaucaacuuuuaugauccccucgucuucccuuccgacgaauuugaugccucuauuagccaggugaaugagaagaucaaccagucccuggcuuucauucgcaaaucugacgaacugcuccacaacgugaaugccgggaaguccacaaccaacaucaugauuacgaccaucaucauuguuaucauugucauccugcuuucccugauugccgugggacuccugcuguacugcaaggcuagaugaggacuaguaauaaggaaacuguaugaaugucugugggcaggaagugaagagauccuucuguaaagguuuuuggaauuaugucugcugaauaauaaacuuuuuugaaauaauaaaucugguagaaaaaugagaucuaaaaaaaaaaaaaaaaaaaaaaaaaaaaaaaaaaaaaaaaaaaaaaaaaaaaaaaaaaaaaaaaugcaucccccccccccccccccccccccccccccccaaaggcucuuuucagagccaccagaauu

SEQ ID NO: 8052 - RNA, 1901 nt, Artificial Sequence
  mRNA product Design d-2 comprising derived and/or modified sequence from HRSV(A2)__F-del_DSCav1_mut8 (opt6)
gggagagcggcucggccauuuugucccagucaguccggaggcugcggcugcagaaguaccgccugcggaguaacugcaaagaagcuuaccauggaacuacucauauugaaagccaacgcaaucacaacaauacuaaccgccguaacauuuugcuucgcgucaggccaaaauauaacagaagaauuuuaccaaucaacaugcuccgccguaucaaaaggauaccuaggugcauuacgaaccgguugguacacaucaguaaucacaauagaacuuuccaacauuaaagaaauaaaaugcaauggcacagacgcaaaagucaaacuaauaaaacaagaacuagacaaauauaaaaacgccgucacagacuuacaacuauuaaugcaaagcacaccagcaacaggauccggaucagcaauagcaucaggaguagccgucuguaaaguacuacaccuagaaggcgaaguuaauaaaauuaaaucagcuuuauuaucaaccaacaaagcaguaguaucacuauccggaugcggagucuccguccuaacauucaaaguacuagaccucaagaauuacauagauaaacaacuacuaccaauacucaacaaacaaucauguucaauaccaaacaucgaaaccgucauagaauuucaacaaaaaaauaauagacucuuagaaauaacacgagaauuuagcguaaacgcaggagucacaaccccugucucaacauacaugcuaaccaauuccgaauuauuaucacucauaaaugacaugccaauaacuaaugaccaaaaaaaacuuaugucaaacaacguacaaauaguaagacaacaaucauauucaauaaugugcauaaucaaagaagaaguuuuagcauauguaguacaacuaccacuauauggcgucauagacacaccaugcuggaaauuacacacaucaccucuaugcacaacaaacacaaaagaaggaagcaacauuugccuaaccagaaccgauagaggaugguacugcgauaacgcaggcucaguaucauucuucccucaagccgaaacuugcaaaguccaaucaaauagagucuucugcgauacaaugaacuccuuaacuuuaccaucagaaguaaaucuaugcaacguagauaucuuuaauccaaaauacgauugcaaaaucaugacaucaaaaacagauguaucaucuaguguaauuaccucccuaggagcaauaguaagcugcuacggaaaaacaaaaugcaccgccucuaacaaaugucguggaauaauaaaaacauucucaaacggaugcgauuauguaucaaauaaaggugucgacaccguaucaguaggcaauacacuauacuauguaaauaaacaagaaggacaaucacucuacgucaaaggugaaccaauaauaaacuucuacgacccacuuguauucccaagcgacgaauuugacgcaucaauaagccaaguaaacgaaaaaauaaaccaaucacuagcauucaucagaaaaucagacgaacuacuccacaauguaaaugcaggaaaaucaacaaccaauaucaugauaacaaccauaauaauagucauaauaguaauacuauuaucccucauagccguuggacuacuccuauauuguaaagcacgauaaggacuaguaauaaggaaacuguaugaaugucugugggcaggaagugaagagauccuucuguaaagguuuuuggaauuaugucugcugaauaauaaacuuuuuugaaauaauaaaucugguagaaaaaugagaucuaaaaaaaaaaaaaaaaaaaaaaaaaaaaaaaaaaaaaaaaaaaaaaaaaaaaaaaaaaaaaaaaugcaucccccccccccccccccccccccccccccccaaaggcucuuuucagagccaccagaauu

SEQ ID NO: 8053 - RNA, 1901 nt, Artificial Sequence
  mRNA product Design d-2 comprising derived and/or modified sequence from HRSV(A2)__F-del_DSCav1_mut8 (opt11)
gggagagcggcucggccauuuugucccagucaguccggaggcugcggcugcagaaguaccgccugcggaguaacugcaaagaagcuuaccauggaacuccucauccucaaagccaacgccaucaccaccauacucaccgcaguaaccuucugcuucgcauccggccaaaacaucacagaagaguucuaccagaguaccugcuccgccgucuccaaaggcuaccuuggcgcccuccguaccgggugguacacauccgucaucacaaucgaacucuccaacaucaaagaaauaaagugcaacggcacagacgccaaaguaaaacugauaaagcaagaacucgacaaauacaaaaacgccguaaccgaccuccagcuacuaaugcaauccacucccgccaccggcagcggauccgccaucgccuccggaguagccgucuguaaagucuuacaccucgaaggcgaagugaacaaaaucaaauccgcccuacucucaaccaacaaagccguaguaucacucuccgggugcggcguuucagugcuaacguucaaaguccuugaccucaaaaacuacaucgacaaacaacuccuccccauccuaaauaaacaauccugcuccauacccaacaucgagacugucaucgaguuccagcagaaaaacaaccgacuccucgaaaucacacgcgaguucucugucaacgccggcgucacaacccccgucuccacauacaugcucaccaacagcgaacuccucucccuaaucaaugacaugcccaucaccaacgaccaaaagaaacucaugucaaacaacguccaaaucguccgccaacaauccuacagcaucaugugcaucaucaaagaagaaguucucgcauacguaguacaacucccccucuacggagugaucgacacccccugcuggaaacuacacaccagcccgcuuugcaccacaaacaccaaggaaggcuccaacaucugccucacucgaaccgaccgcggcugguacugcgacaacgcaggcuccgucaguuucuuuccccaagcagaaacaugcaaaguccaauccaaccgaguauucugcgacaccaugaacucccucacccuaccauccgaaguuaaccuaugcaacguggacaucuucaaccccaaguacgacugcaaaauuaugaccuccaaaaccgacguauccuccagcgucaucaccagccucggagcaauagucuccugcuacggcaagaccaagugcaccgcuuccaacaagugucgcggaaucaucaaaaccuucucaaacggcugcgacuacgucuccaacaaaggcgucgacaccguauccguaggaaacacccuauacuacgucaacaaacaagaaggacaaucccucuaugucaaaggcgaacccaucaucaauuucuacgacccccuagucuucccuuccgacgaguucgacgcguccaucagccaagucaaugaaaagaucaaccagagccuggcauucauccgcaaauccgacgaacuccuccacaacgucaacgcgggaaaauccacgacaaacaucaugaucaccaccaucaucaucgucaucauagucauucuccuuucucucaucgccgugggacuacuucucuacugcaaagcccgauaaggacuaguaauaaggaaacuguaugaaugucugugggcaggaagugaagagauccuucuguaaagguuuuuggaauuaugucugcugaauaauaaacuuuuuugaaauaauaaaucugguagaaaaaugagaucuaaaaaaaaaaaaaaaaaaaaaaaaaaaaaaaaaaaaaaaaaaaaaaaaaaaaaaaaaaaaaaaaugcaucccccccccccccccccccccccccccccccaaaggcucuuuucagagccaccagaauu

SEQ ID NO: 8054 - RNA, 2217 nt, Artificial Sequence
  mRNA product Design d-3 comprising derived and/or modified sequence from HRSV(A2)__F-del_DSCav1_mut8 (opt1)
gggagagggcgcuuggcuugcaaggacccugagcugcggcauugaagcacacccaacccaacucgacugaagucagccucacugaaccggaucugagaaucuucucucucugggcuugccagggcucuccgaaccuagcuagcauccucuucaauuccaacuagaaagcuuaccauggagcugcucauccugaaggccaacgccaucaccaccauccugacggcggugaccuucugcuucgccagcggccagaacaucaccgaggaguucuaccaguccacgugcagcgccgucuccaagggguaccucggcgcccugcggaccggcugguacaccuccgugaucaccaucgagcugagcaacaucaaggagaucaagugcaacgggaccgacgccaaggugaagcucaucaagcaggagcuggacaaguacaagaacgcggucacggaccugcagcuccugaugcaguccaccccggcaaccggcuccggcuccgccaucgcgagcggcgucgccgugugcaaggugcugcaccucgagggggaggucaacaagaucaagagcgcccugcuguccaccaacaaggccguggugagccucuccggcugcggcgucagcgugcugaccuucaaggugcuggaccucaagaacuacaucgacaagcagcugcugcccauccugaacaagcagagcugcuccauccccaacaucgagacggugaucgaguuccagcagaagaacaaccggcuccuggagaucacccgcgaguucagcgugaacgccggggucaccacccccguguccacguacaugcugaccaacagcgagcuccugucccugaucaacgacaugccgaucaccaacgaccagaagaagcucaugagcaacaacgugcagaucguccggcagcaguccuacagcaucaugugcaucaucaaggaggaggugcuggcguacgugguccagcugccccucuacggcgugaucgacacccccugcuggaagcugcacacgagcccccugugcaccaccaacaccaaggagggguccaacaucugccucacgcgcaccgaccggggcugguacugcgacaacgccggcagcgucuccuucuucccgcaggccgagaccugcaaggugcagagcaaccgcguguucugcgacaccaugaacucccugacgcugcccagcgagguaaaccucugcaacgucgacaucuucaaccccaaguacgacugcaagaucaugaccuccaagaccgacgugagcuccagcgugaucaccucccugggggccaucgucagcugcuacggcaagacgaagugcaccgccagcaacaagugccgggggaucaucaagaccuucuccaacggcugcgacuacgugagcaacaagggcguggacaccguguccgucgggaacacccuguacuacgugaacaagcaggagggccagagccucuacgugaagggggagcccaucaucaacuucuacgacccgcuggucuuccccuccgacgaguucgacgcgagcaucucccaggugaacgagaagaucaaccagagccuggccuucauccgcaaguccgacgagcugcuccacaacgugaacgccggcaagagcacgaccaacaucaugaucaccaccaucaucaucgucaucaucgugauccugcugucccucaucgccguggggcugcugcucuacugcaaggcccggugaggacuagugaagggaacacccaaauuuaauucagccuuaagcacaauuaauuaagagugaaacguaauuguacaagcaguuggucacccaccauagggcaugaucaacaccgcaaccuuuccuuuuucccccagugauucugaaaaaccccucuucccuucagcuugcuuagauguuccaaauuuaguaagcuuaaggcggccuacagaagaaaaagaaaaaaaaggccacaaaaguucccucucacuuucaguaaauaaaauaaaagcagcaacagaaauaaagaaauaaaugaaauucaaaaugaaauaaauauuguguugugcagcauuaaaaaaucaauaaaaauuaaaaaugagcaagaucuaaaaaaaaaaaaaaaaaaaaaaaaaaaaaaaaaaaaaaaaaaaaaaaaaaaaaaaaaaaaaaaaugcaucccccccccccccccccccccccccccccccaaaggcucuuuucagagccaccagaauu

SEQ ID NO: 8055 - RNA, 2217 nt, Artificial Sequence
  mRNA product Design d-3 comprising derived and/or modified sequence from HRSV(A2)__F-del_DSCav1_mut8 (opt1)
gggagagggcgcuuggcuugcaaggacccugagcugcggcauugaagcacacccaacccaacucgacugaagucagccucacugaaccggaucugagaaucuucucucucugggcuugccagggcucuccgaaccuagcuagcauccucuucaauuccaacuagaaagcuuaccauggagcugcucauccugaaggccaacgccaucaccaccauccugacggcggugaccuucugcuucgccagcggccagaacaucaccgaggaguucuaccaguccacgugcagcgccgucuccaagggguaccucggcgcccugcgcaccgggugguacaccagcgugaucaccaucgagcuguccaacaucaaggagaucaagugcaacggcaccgacgccaaggugaagcucaucaagcaggagcuggacaaguacaagaacgcggucacggaccugcagcuccugaugcagagcacccccgccaccggguccggcagcgccaucgccuccggcguggcggugugcaagguccugcaccucgagggggaggugaacaagaucaagagcgcccugcuguccaccaacaaggccguggucagccucuccggcugcggggugagcgugcugacguucaagguccuggaccucaagaacuacaucgacaagcagcugcugccgauccucaacaagcaguccugcagcauccccaacaucgagaccgugaucgaguuccagcagaagaacaaccggcugcuggagaucacccgcgaguucuccgugaacgccggcgucaccacgcccgugagcaccuacaugcucaccaacuccgagcugcugagccucaucaacgacaugcccaucaccaacgaccagaagaagcugaugagcaacaacgugcagaucguccggcagcaguccuacagcaucaugugcaucaucaaggaggaggugcuggccuacgugguccagcucccgcuguacggggugaucgacacgcccugcuggaagcugcacaccagcccccucugcaccaccaacacgaaggagggcuccaacaucugccugacccgcaccgaccggggcugguacugcgacaacgcgggguccgugagcuucuucccccaggccgagaccugcaagguccaguccaaccgcguguucugcgacacgaugaacagccugacccucccguccgaggucaaccugugcaacguggacaucuucaaccccaaguacgacugcaagaucaugaccagcaagaccgacguguccagcuccgucaucacgagccugggcgccaucguguccugcuacgggaagaccaagugcaccgccagcaacaagugccggggcaucaucaagaccuucuccaacggcugcgacuacgugagcaacaagggggucgacacgguguccgugggcaacacccucuacuacgucaacaagcaggaggggcagagccuguacgugaagggcgagcccaucaucaacuucuacgacccccugguguucccgagcgacgaguucgacgccuccaucagccaggucaacgagaagaucaaccagucccucgcguucauccgcaagagcgacgagcugcugcacaacgugaacgccgggaaguccaccaccaacaucaugaucaccacgaucaucaucgugaucaucgucauccuccugagccugaucgccgugggccuccugcuguacugcaaggcccggugaggacuagugaagggaacacccaaauuuaauucagccuuaagcacaauuaauuaagagugaaacguaauuguacaagcaguuggucacccaccauagggcaugaucaacaccgcaaccuuuccuuuuucccccagugauucugaaaaaccccucuucccuucagcuugcuuagauguuccaaauuuaguaagcuuaaggcggccuacagaagaaaaagaaaaaaaaggccacaaaaguucccucucacuuucaguaaauaaaauaaaagcagcaacagaaauaaagaaauaaaugaaauucaaaaugaaauaaauauuguguugugcagcauuaaaaaaucaauaaaaauuaaaaaugagcaagaucuaaaaaaaaaaaaaaaaaaaaaaaaaaaaaaaaaaaaaaaaaaaaaaaaaaaaaaaaaaaaaaaaugcaucccccccccccccccccccccccccccccccaaaggcucuuuucagagccaccagaauu

SEQ ID NO: 8056 - RNA, 2217 nt, Artificial Sequence
  mRNA product Design d-3 comprising derived and/or modified sequence from HRSV(A2)__F-del_DSCav1_mut8 (opt2)
gggagagggcgcuuggcuugcaaggacccugagcugcggcauugaagcacacccaacccaacucgacugaagucagccucacugaaccggaucugagaaucuucucucucugggcuugccagggcucuccgaaccuagcuagcauccucuucaauuccaacuagaaagcuuaccauggagcuccucauccucaaggccaacgccaucaccaccauccucaccgccgucaccuucugcuucgccuccggccagaacaucaccgaggaguucuaccaguccaccugcuccgccgucuccaagggcuaccucggcgcccuccgcaccggcugguacaccuccgucaucaccaucgagcucuccaacaucaaggagaucaagugcaacggcaccgacgccaaggucaagcucaucaagcaggagcucgacaaguacaagaacgccgucaccgaccuccagcuccucaugcaguccacccccgccaccggcuccggcuccgccaucgccuccggcgucgccgucugcaagguccuccaccucgagggcgaggucaacaagaucaaguccgcccuccucuccaccaacaaggccgucgucucccucuccggcugcggcgucuccguccucaccuucaagguccucgaccucaagaacuacaucgacaagcagcuccuccccauccucaacaagcaguccugcuccauccccaacaucgagaccgucaucgaguuccagcagaagaacaaccgccuccucgagaucacccgcgaguucuccgucaacgccggcgucaccacccccgucuccaccuacaugcucaccaacuccgagcuccucucccucaucaacgacaugcccaucaccaacgaccagaagaagcucauguccaacaacguccagaucguccgccagcaguccuacuccaucaugugcaucaucaaggaggagguccucgccuacgucguccagcucccccucuacggcgucaucgacacccccugcuggaagcuccacaccuccccccucugcaccaccaacaccaaggagggcuccaacaucugccucacccgcaccgaccgcggcugguacugcgacaacgccggcuccgucuccuucuucccccaggccgagaccugcaagguccaguccaaccgcgucuucugcgacaccaugaacucccucacccuccccuccgaggucaaccucugcaacgucgacaucuucaaccccaaguacgacugcaagaucaugaccuccaagaccgacgucuccuccuccgucaucaccucccucggcgccaucgucuccugcuacggcaagaccaagugcaccgccuccaacaagugccgcggcaucaucaagaccuucuccaacggcugcgacuacgucuccaacaagggcgucgacaccgucuccgucggcaacacccucuacuacgucaacaagcaggagggccagucccucuacgucaagggcgagcccaucaucaacuucuacgacccccucgucuuccccuccgacgaguucgacgccuccaucucccaggucaacgagaagaucaaccagucccucgccuucauccgcaaguccgacgagcuccuccacaacgucaacgccggcaaguccaccaccaacaucaugaucaccaccaucaucaucgucaucaucgucauccuccucucccucaucgccgucggccuccuccucuacugcaaggcccgcugaggacuagugaagggaacacccaaauuuaauucagccuuaagcacaauuaauuaagagugaaacguaauuguacaagcaguuggucacccaccauagggcaugaucaacaccgcaaccuuuccuuuuucccccagugauucugaaaaaccccucuucccuucagcuugcuuagauguuccaaauuuaguaagcuuaaggcggccuacagaagaaaaagaaaaaaaaggccacaaaaguucccucucacuuucaguaaauaaaauaaaagcagcaacagaaauaaagaaauaaaugaaauucaaaaugaaauaaauauuguguugugcagcauuaaaaaaucaauaaaaauuaaaaaugagcaagaucuaaaaaaaaaaaaaaaaaaaaaaaaaaaaaaaaaaaaaaaaaaaaaaaaaaaaaaaaaaaaaaaaugcaucccccccccccccccccccccccccccccccaaaggcucuuuucagagccaccagaauu

SEQ ID NO: 8057 - RNA, 2217 nt, Artificial Sequence
  mRNA product Design d-3 comprising derived and/or modified sequence from HRSV(A2)__F-del_DSCav1_mut8 (opt3)
gggagagggcgcuuggcuugcaaggacccugagcugcggcauugaagcacacccaacccaacucgacugaagucagccucacugaaccggaucugagaaucuucucucucugggcuugccagggcucuccgaaccuagcuagcauccucuucaauuccaacuagaaagcuuaccauggagcugcucauccuuaaggccaacgcuauuaccacaauacugacugcagugacguucugcuuugccagcggccagaauaucaccgaagaguucuaccaauccacauguucugcggucucaaaaggguauuugggagcuuuaagaacugguugguacaccaguguuauuacaaucgaacugagcaacauuaaggagaucaaaugcaauggcaccgacgccaaggugaaacuaauaaagcaggaacucgauaaguauaaaaacgcaguaacugaccugcagcuucugaugcaguccacacccgccaccgggucuggaucggcuaucgcaucaggcguggccgucuguaagguguugcaccucgagggugagguuaauaaaauuaagagcgcucugcugaguacgaacaaagccguggucucccucucugggugcggagugagcguauuaacuuuuaagguucuggaucuuaagaauuacaucgacaaacaauugcugccuauucuaaacaagcaguccuguucaaucccaaauauagaaaccgugauugaguuccagcagaaaaacaauaggcuccuggaaaucacacgggaguuuagugucaacgcgggcgugacuaccccggugagcacauauaugcuuaccaauucugagcuguugucccucauuaacgauaugcccaucacgaaugaccaaaagaaacugaugucaaacaacguccagaucguucgccagcagagcuacaguauuaugugcauaaucaaggaagagguguuagcauauguagugcaacugccucucuacggcgucauugauacuccauguuggaaacuucauacaucuccccugugcaccacuaauacaaaggaaggguccaacaucuguuugacccgaacggaccguggaugguacugcgauaaugccgguagcgugucguucuuuccucaggcugagaccuguaagguucagucuaacagaguguucugcgacacaaugaacucccuaacucugccaucagaagucaaucucugcaauguggauauauuuaaccccaaauaugacuguaagauuaugaccaguaaaacagauguaagcuccucuguuaucacuagccugggcgccaucgugucaugcuacgggaagaccaaauguacagcaaguaauaagugcaggggaauuaucaagaccuucuccaacggcugugacuaugucagcaauaaagguguggacacugucucuguggggaacacgcuuuacuauguuaauaagcaagagggacagucacuguacgugaaaggcgagccuauuauaaacuuuuaugauccauugguauucccgagugacgaauuugaugcuagcaucucccaggucaaugagaagauuaaccagucucucgccuucauccggaaaucggacgaacuguuacacaacgugaaugcgggcaagagcacaaccaacaucaugauuacuaccauaaucauuguuaucauugugauccugcuaucccucauagccgucgggcugcuuuuguacugcaaggcacgcugaggacuagugaagggaacacccaaauuuaauucagccuuaagcacaauuaauuaagagugaaacguaauuguacaagcaguuggucacccaccauagggcaugaucaacaccgcaaccuuuccuuuuucccccagugauucugaaaaaccccucuucccuucagcuugcuuagauguuccaaauuuaguaagcuuaaggcggccuacagaagaaaaagaaaaaaaaggccacaaaaguucccucucacuuucaguaaauaaaauaaaagcagcaacagaaauaaagaaauaaaugaaauucaaaaugaaauaaauauuguguugugcagcauuaaaaaaucaauaaaaauuaaaaaugagcaagaucuaaaaaaaaaaaaaaaaaaaaaaaaaaaaaaaaaaaaaaaaaaaaaaaaaaaaaaaaaaaaaaaaugcaucccccccccccccccccccccccccccccccaaaggcucuuuucagagccaccagaauu

SEQ ID NO: 8058 - RNA, 2217 nt, Artificial Sequence
  mRNA product Design d-3 comprising derived and/or modified sequence from HRSV(A2)__F-del_DSCav1_mut8 (opt4)
gggagagggcgcuuggcuugcaaggacccugagcugcggcauugaagcacacccaacccaacucgacugaagucagccucacugaaccggaucugagaaucuucucucucugggcuugccagggcucuccgaaccuagcuagcauccucuucaauuccaacuagaaagcuuaccauggagcugcugauccugaaggccaacgccaucaccaccauccugaccgccgugaccuucugcuucgccagcggccagaacaucaccgaggaguucuaccagagcaccugcagcgccgugagcaagggcuaccugggcgcccugagaaccggcugguacaccagcgugaucaccaucgagcugagcaacaucaaggagaucaagugcaacggcaccgacgccaaggugaagcugaucaagcaggagcuggacaaguacaagaacgccgugaccgaccugcagcugcugaugcagagcacccccgccaccggcagcggcagcgccaucgccagcggcguggccgugugcaaggugcugcaccuggagggcgaggugaacaagaucaagagcgcccugcugagcaccaacaaggccguggugagccugagcggcugcggcgugagcgugcugaccuucaaggugcuggaccugaagaacuacaucgacaagcagcugcugcccauccugaacaagcagagcugcagcauccccaacaucgagaccgugaucgaguuccagcagaagaacaacagacugcuggagaucaccagagaguucagcgugaacgccggcgugaccacccccgugagcaccuacaugcugaccaacagcgagcugcugagccugaucaacgacaugcccaucaccaacgaccagaagaagcugaugagcaacaacgugcagaucgugagacagcagagcuacagcaucaugugcaucaucaaggaggaggugcuggccuacguggugcagcugccccuguacggcgugaucgacacccccugcuggaagcugcacaccagcccccugugcaccaccaacaccaaggagggcagcaacaucugccugaccagaaccgacagaggcugguacugcgacaacgccggcagcgugagcuucuucccccaggccgagaccugcaaggugcagagcaacagaguguucugcgacaccaugaacagccugacccugcccagcgaggugaaccugugcaacguggacaucuucaaccccaaguacgacugcaagaucaugaccagcaagaccgacgugagcagcagcgugaucaccagccugggcgccaucgugagcugcuacggcaagaccaagugcaccgccagcaacaagugcagaggcaucaucaagaccuucagcaacggcugcgacuacgugagcaacaagggcguggacaccgugagcgugggcaacacccuguacuacgugaacaagcaggagggccagagccuguacgugaagggcgagcccaucaucaacuucuacgacccccugguguuccccagcgacgaguucgacgccagcaucagccaggugaacgagaagaucaaccagagccuggccuucaucagaaagagcgacgagcugcugcacaacgugaacgccggcaagagcaccaccaacaucaugaucaccaccaucaucaucgugaucaucgugauccugcugagccugaucgccgugggccugcugcuguacugcaaggccagaugaggacuagugaagggaacacccaaauuuaauucagccuuaagcacaauuaauuaagagugaaacguaauuguacaagcaguuggucacccaccauagggcaugaucaacaccgcaaccuuuccuuuuucccccagugauucugaaaaaccccucuucccuucagcuugcuuagauguuccaaauuuaguaagcuuaaggcggccuacagaagaaaaagaaaaaaaaggccacaaaaguucccucucacuuucaguaaauaaaauaaaagcagcaacagaaauaaagaaauaaaugaaauucaaaaugaaauaaauauuguguugugcagcauuaaaaaaucaauaaaaauuaaaaaugagcaagaucuaaaaaaaaaaaaaaaaaaaaaaaaaaaaaaaaaaaaaaaaaaaaaaaaaaaaaaaaaaaaaaaaugcaucccccccccccccccccccccccccccccccaaaggcucuuuucagagccaccagaauu

SEQ ID NO: 8059 - RNA, 2217 nt, Artificial Sequence
  mRNA product Design d-3 comprising derived and/or modified sequence from HRSV(A2)__F-del_DSCav1_mut8 (opt5)
gggagagggcgcuuggcuugcaaggacccugagcugcggcauugaagcacacccaacccaacucgacugaagucagccucacugaaccggaucugagaaucuucucucucugggcuugccagggcucuccgaaccuagcuagcauccucuucaauuccaacuagaaagcuuaccauggagcugcucauccugaaggccaacgcuauuaccacaauccuuacggccgugaccuucugcuuugcgagcggccagaauauuacagaagaguucuaccaauccaccuguucugcugucagcaaaggguaucugggagcccucagaacaggcugguacaccuccguuaucacaauugaacugucuaacaucaaggagaucaaaugcaaugggaccgacgccaaggugaaacuuauuaagcaggaacuggauaaguauaaaaacgcugugacggaccuccagcugcugaugcagagcacccccgccacaggauccggcucugcuaucgccagcggggucgcgguguguaagguucuccaccuggagggagaggugaauaaaauuaaguccgcccuucugagcaccaacaaagcugucgugucucucuccggcugcggcguuagcgugcugacauuuaagguccuugaucugaagaauuacaucgacaaacaacuccugccuauucugaacaagcagucuuguuccaucccgaauauugaaaccgugaucgaguuccagcagaaaaacaaucggcuccuggaaaucacgcgcgaguuuagcgugaacgccggggucacaacccccguuucuacauauaugcuuaccaauuccgagcugcucagccugauuaacgauaugccuaucaccaaugaccaaaagaaacuuauguccaacaacgugcagauugugagacagcagucuuacagcaucaugugcauuaucaaggaagagguccuggcuuaugugguucaacucccccuguacggagugaucgauacaccuuguuggaaacugcauacgagcccccucugcaccacaaauaccaaggaaggcagcaacauuugucugacacggaccgaccgcgggugguacugcgauaaugccggaucugucuccuucuuuccucaggcggagacguguaaggugcagagcaacagaguuuucugcgacacaaugaacucucuuacccugccgagcgaagugaaucucugcaaugucgauaucuuuaaccccaaauaugacuguaagauuaugaccuccaaaacagaugugucuagcuccgucaucaccagccugggcgccauugugucuugcuacgggaagacaaaauguacggcuuccaauaagugccggggaaucaucaagaccuucagcaacggcugugacuauguuucuaauaaaggcguggacacagucuccguggggaacacccuuuacuauguuaauaagcaagagggacagagccuguacgugaaaggcgagccuauuaucaacuuuuaugauccccucgucuucccuuccgacgaauuugaugccucuauuagccaggugaaugagaagaucaaccagucccuggcuuucauucgcaaaucugacgaacugcuccacaacgugaaugccgggaaguccacaaccaacaucaugauuacgaccaucaucauuguuaucauugucauccugcuuucccugauugccgugggacuccugcuguacugcaaggcuagaugaggacuagugaagggaacacccaaauuuaauucagccuuaagcacaauuaauuaagagugaaacguaauuguacaagcaguuggucacccaccauagggcaugaucaacaccgcaaccuuuccuuuuucccccagugauucugaaaaaccccucuucccuucagcuugcuuagauguuccaaauuuaguaagcuuaaggcggccuacagaagaaaaagaaaaaaaaggccacaaaaguucccucucacuuucaguaaauaaaauaaaagcagcaacagaaauaaagaaauaaaugaaauucaaaaugaaauaaauauuguguugugcagcauuaaaaaaucaauaaaaauuaaaaaugagcaagaucuaaaaaaaaaaaaaaaaaaaaaaaaaaaaaaaaaaaaaaaaaaaaaaaaaaaaaaaaaaaaaaaaugcaucccccccccccccccccccccccccccccccaaaggcucuuuucagagccaccagaauu

SEQ ID NO: 8060 - RNA, 2217 nt, Artificial Sequence
  mRNA product Design d-3 comprising derived and/or modified sequence from HRSV(A2)__F-del_DSCav1_mut8 (opt6)
gggagagggcgcuuggcuugcaaggacccugagcugcggcauugaagcacacccaacccaacucgacugaagucagccucacugaaccggaucugagaaucuucucucucugggcuugccagggcucuccgaaccuagcuagcauccucuucaauuccaacuagaaagcuuaccauggaacuacucauauugaaagccaacgcaaucacaacaauacuaaccgccguaacauuuugcuucgcgucaggccaaaauauaacagaagaauuuuaccaaucaacaugcuccgccguaucaaaaggauaccuaggugcauuacgaaccgguugguacacaucaguaaucacaauagaacuuuccaacauuaaagaaauaaaaugcaauggcacagacgcaaaagucaaacuaauaaaacaagaacuagacaaauauaaaaacgccgucacagacuuacaacuauuaaugcaaagcacaccagcaacaggauccggaucagcaauagcaucaggaguagccgucuguaaaguacuacaccuagaaggcgaaguuaauaaaauuaaaucagcuuuauuaucaaccaacaaagcaguaguaucacuauccggaugcggagucuccguccuaacauucaaaguacuagaccucaagaauuacauagauaaacaacuacuaccaauacucaacaaacaaucauguucaauaccaaacaucgaaaccgucauagaauuucaacaaaaaaauaauagacucuuagaaauaacacgagaauuuagcguaaacgcaggagucacaaccccugucucaacauacaugcuaaccaauuccgaauuauuaucacucauaaaugacaugccaauaacuaaugaccaaaaaaaacuuaugucaaacaacguacaaauaguaagacaacaaucauauucaauaaugugcauaaucaaagaagaaguuuuagcauauguaguacaacuaccacuauauggcgucauagacacaccaugcuggaaauuacacacaucaccucuaugcacaacaaacacaaaagaaggaagcaacauuugccuaaccagaaccgauagaggaugguacugcgauaacgcaggcucaguaucauucuucccucaagccgaaacuugcaaaguccaaucaaauagagucuucugcgauacaaugaacuccuuaacuuuaccaucagaaguaaaucuaugcaacguagauaucuuuaauccaaaauacgauugcaaaaucaugacaucaaaaacagauguaucaucuaguguaauuaccucccuaggagcaauaguaagcugcuacggaaaaacaaaaugcaccgccucuaacaaaugucguggaauaauaaaaacauucucaaacggaugcgauuauguaucaaauaaaggugucgacaccguaucaguaggcaauacacuauacuauguaaauaaacaagaaggacaaucacucuacgucaaaggugaaccaauaauaaacuucuacgacccacuuguauucccaagcgacgaauuugacgcaucaauaagccaaguaaacgaaaaaauaaaccaaucacuagcauucaucagaaaaucagacgaacuacuccacaauguaaaugcaggaaaaucaacaaccaauaucaugauaacaaccauaauaauagucauaauaguaauacuauuaucccucauagccguuggacuacuccuauauuguaaagcacgauaaggacuagugaagggaacacccaaauuuaauucagccuuaagcacaauuaauuaagagugaaacguaauuguacaagcaguuggucacccaccauagggcaugaucaacaccgcaaccuuuccuuuuucccccagugauucugaaaaaccccucuucccuucagcuugcuuagauguuccaaauuuaguaagcuuaaggcggccuacagaagaaaaagaaaaaaaaggccacaaaaguucccucucacuuucaguaaauaaaauaaaagcagcaacagaaauaaagaaauaaaugaaauucaaaaugaaauaaauauuguguugugcagcauuaaaaaaucaauaaaaauuaaaaaugagcaagaucuaaaaaaaaaaaaaaaaaaaaaaaaaaaaaaaaaaaaaaaaaaaaaaaaaaaaaaaaaaaaaaaaugcaucccccccccccccccccccccccccccccccaaaggcucuuuucagagccaccagaauu

SEQ ID NO: 8061 - RNA, 2217 nt, Artificial Sequence
  mRNA product Design d-3 comprising derived and/or modified sequence from HRSV(A2)__F-del_DSCav1_mut8 (opt11)
gggagagggcgcuuggcuugcaaggacccugagcugcggcauugaagcacacccaacccaacucgacugaagucagccucacugaaccggaucugagaaucuucucucucugggcuugccagggcucuccgaaccuagcuagcauccucuucaauuccaacuagaaagcuuaccauggaacuccucauccucaaagccaacgccaucaccaccauacucaccgcaguaaccuucugcuucgcauccggccaaaacaucacagaagaguucuaccagaguaccugcuccgccgucuccaaaggcuaccuuggcgcccuccguaccgggugguacacauccgucaucacaaucgaacucuccaacaucaaagaaauaaagugcaacggcacagacgccaaaguaaaacugauaaagcaagaacucgacaaauacaaaaacgccguaaccgaccuccagcuacuaaugcaauccacucccgccaccggcagcggauccgccaucgccuccggaguagccgucuguaaagucuuacaccucgaaggcgaagugaacaaaaucaaauccgcccuacucucaaccaacaaagccguaguaucacucuccgggugcggcguuucagugcuaacguucaaaguccuugaccucaaaaacuacaucgacaaacaacuccuccccauccuaaauaaacaauccugcuccauacccaacaucgagacugucaucgaguuccagcagaaaaacaaccgacuccucgaaaucacacgcgaguucucugucaacgccggcgucacaacccccgucuccacauacaugcucaccaacagcgaacuccucucccuaaucaaugacaugcccaucaccaacgaccaaaagaaacucaugucaaacaacguccaaaucguccgccaacaauccuacagcaucaugugcaucaucaaagaagaaguucucgcauacguaguacaacucccccucuacggagugaucgacacccccugcuggaaacuacacaccagcccgcuuugcaccacaaacaccaaggaaggcuccaacaucugccucacucgaaccgaccgcggcugguacugcgacaacgcaggcuccgucaguuucuuuccccaagcagaaacaugcaaaguccaauccaaccgaguauucugcgacaccaugaacucccucacccuaccauccgaaguuaaccuaugcaacguggacaucuucaaccccaaguacgacugcaaaauuaugaccuccaaaaccgacguauccuccagcgucaucaccagccucggagcaauagucuccugcuacggcaagaccaagugcaccgcuuccaacaagugucgcggaaucaucaaaaccuucucaaacggcugcgacuacgucuccaacaaaggcgucgacaccguauccguaggaaacacccuauacuacgucaacaaacaagaaggacaaucccucuaugucaaaggcgaacccaucaucaauuucuacgacccccuagucuucccuuccgacgaguucgacgcguccaucagccaagucaaugaaaagaucaaccagagccuggcauucauccgcaaauccgacgaacuccuccacaacgucaacgcgggaaaauccacgacaaacaucaugaucaccaccaucaucaucgucaucauagucauucuccuuucucucaucgccgugggacuacuucucuacugcaaagcccgauaaggacuagugaagggaacacccaaauuuaauucagccuuaagcacaauuaauuaagagugaaacguaauuguacaagcaguuggucacccaccauagggcaugaucaacaccgcaaccuuuccuuuuucccccagugauucugaaaaaccccucuucccuucagcuugcuuagauguuccaaauuuaguaagcuuaaggcggccuacagaagaaaaagaaaaaaaaggccacaaaaguucccucucacuuucaguaaauaaaauaaaagcagcaacagaaauaaagaaauaaaugaaauucaaaaugaaauaaauauuguguugugcagcauuaaaaaaucaauaaaaauuaaaaaugagcaagaucuaaaaaaaaaaaaaaaaaaaaaaaaaaaaaaaaaaaaaaaaaaaaaaaaaaaaaaaaaaaaaaaaugcaucccccccccccccccccccccccccccccccaaaggcucuuuucagagccaccagaauu

SEQ ID NO: 8062 - RNA, 1900 nt, Artificial Sequence
  mRNA product Design d-4 comprising derived and/or modified sequence from HRSV(A2)__F-del_DSCav1_mut8 (opt1)
gggagagucccgcagucggcguccagcggcucugcuuguucgugugugugucguugcaggccuuauucaagcuuaccauggagcugcucauccugaaggccaacgccaucaccaccauccugacggcggugaccuucugcuucgccagcggccagaacaucaccgaggaguucuaccaguccacgugcagcgccgucuccaagggguaccucggcgcccugcggaccggcugguacaccuccgugaucaccaucgagcugagcaacaucaaggagaucaagugcaacgggaccgacgccaaggugaagcucaucaagcaggagcuggacaaguacaagaacgcggucacggaccugcagcuccugaugcaguccaccccggcaaccggcuccggcuccgccaucgcgagcggcgucgccgugugcaaggugcugcaccucgagggggaggucaacaagaucaagagcgcccugcuguccaccaacaaggccguggugagccucuccggcugcggcgucagcgugcugaccuucaaggugcuggaccucaagaacuacaucgacaagcagcugcugcccauccugaacaagcagagcugcuccauccccaacaucgagacggugaucgaguuccagcagaagaacaaccggcuccuggagaucacccgcgaguucagcgugaacgccggggucaccacccccguguccacguacaugcugaccaacagcgagcuccugucccugaucaacgacaugccgaucaccaacgaccagaagaagcucaugagcaacaacgugcagaucguccggcagcaguccuacagcaucaugugcaucaucaaggaggaggugcuggcguacgugguccagcugccccucuacggcgugaucgacacccccugcuggaagcugcacacgagcccccugugcaccaccaacaccaaggagggguccaacaucugccucacgcgcaccgaccggggcugguacugcgacaacgccggcagcgucuccuucuucccgcaggccgagaccugcaaggugcagagcaaccgcguguucugcgacaccaugaacucccugacgcugcccagcgagguaaaccucugcaacgucgacaucuucaaccccaaguacgacugcaagaucaugaccuccaagaccgacgugagcuccagcgugaucaccucccugggggccaucgucagcugcuacggcaagacgaagugcaccgccagcaacaagugccgggggaucaucaagaccuucuccaacggcugcgacuacgugagcaacaagggcguggacaccguguccgucgggaacacccuguacuacgugaacaagcaggagggccagagccucuacgugaagggggagcccaucaucaacuucuacgacccgcuggucuuccccuccgacgaguucgacgcgagcaucucccaggugaacgagaagaucaaccagagccuggccuucauccgcaaguccgacgagcugcuccacaacgugaacgccggcaagagcacgaccaacaucaugaucaccaccaucaucaucgucaucaucgugauccugcugucccucaucgccguggggcugcugcucuacugcaaggcccggugaggacuaguggaagcauuuuccuggcugauuaaaagaaauuacucagcuauggucaucuguuccuguuagaaggcuaugcagcauauuauauacuaugcgcauguuaugaaaugcauaauaaaaaauuuuaaaaaaucuaaaagaucuaaaaaaaaaaaaaaaaaaaaaaaaaaaaaaaaaaaaaaaaaaaaaaaaaaaaaaaaaaaaaaaaugcaucccccccccccccccccccccccccccccccaaaggcucuuuucagagccaccagaauu

SEQ ID NO: 8063 - RNA, 1900 nt, Artificial Sequence
  mRNA product Design d-4 comprising derived and/or modified sequence from HRSV(A2)__F-del_DSCav1_mut8 (opt1)
gggagagucccgcagucggcguccagcggcucugcuuguucgugugugugucguugcaggccuuauucaagcuuaccauggagcugcucauccugaaggccaacgccaucaccaccauccugacggcggugaccuucugcuucgccagcggccagaacaucaccgaggaguucuaccaguccacgugcagcgccgucuccaagggguaccucggcgcccugcgcaccgggugguacaccagcgugaucaccaucgagcuguccaacaucaaggagaucaagugcaacggcaccgacgccaaggugaagcucaucaagcaggagcuggacaaguacaagaacgcggucacggaccugcagcuccugaugcagagcacccccgccaccggguccggcagcgccaucgccuccggcguggcggugugcaagguccugcaccucgagggggaggugaacaagaucaagagcgcccugcuguccaccaacaaggccguggucagccucuccggcugcggggugagcgugcugacguucaagguccuggaccucaagaacuacaucgacaagcagcugcugccgauccucaacaagcaguccugcagcauccccaacaucgagaccgugaucgaguuccagcagaagaacaaccggcugcuggagaucacccgcgaguucuccgugaacgccggcgucaccacgcccgugagcaccuacaugcucaccaacuccgagcugcugagccucaucaacgacaugcccaucaccaacgaccagaagaagcugaugagcaacaacgugcagaucguccggcagcaguccuacagcaucaugugcaucaucaaggaggaggugcuggccuacgugguccagcucccgcuguacggggugaucgacacgcccugcuggaagcugcacaccagcccccucugcaccaccaacacgaaggagggcuccaacaucugccugacccgcaccgaccggggcugguacugcgacaacgcgggguccgugagcuucuucccccaggccgagaccugcaagguccaguccaaccgcguguucugcgacacgaugaacagccugacccucccguccgaggucaaccugugcaacguggacaucuucaaccccaaguacgacugcaagaucaugaccagcaagaccgacguguccagcuccgucaucacgagccugggcgccaucguguccugcuacgggaagaccaagugcaccgccagcaacaagugccggggcaucaucaagaccuucuccaacggcugcgacuacgugagcaacaagggggucgacacgguguccgugggcaacacccucuacuacgucaacaagcaggaggggcagagccuguacgugaagggcgagcccaucaucaacuucuacgacccccugguguucccgagcgacgaguucgacgccuccaucagccaggucaacgagaagaucaaccagucccucgcguucauccgcaagagcgacgagcugcugcacaacgugaacgccgggaaguccaccaccaacaucaugaucaccacgaucaucaucgugaucaucgucauccuccugagccugaucgccgugggccuccugcuguacugcaaggcccggugaggacuaguggaagcauuuuccuggcugauuaaaagaaauuacucagcuauggucaucuguuccuguuagaaggcuaugcagcauauuauauacuaugcgcauguuaugaaaugcauaauaaaaaauuuuaaaaaaucuaaaagaucuaaaaaaaaaaaaaaaaaaaaaaaaaaaaaaaaaaaaaaaaaaaaaaaaaaaaaaaaaaaaaaaaugcaucccccccccccccccccccccccccccccccaaaggcucuuuucagagccaccagaauu

SEQ ID NO: 8064 - RNA, 1900 nt, Artificial Sequence
  mRNA product Design d-4 comprising derived and/or modified sequence from HRSV(A2)__F-del_DSCav1_mut8 (opt2)
gggagagucccgcagucggcguccagcggcucugcuuguucgugugugugucguugcaggccuuauucaagcuuaccauggagcuccucauccucaaggccaacgccaucaccaccauccucaccgccgucaccuucugcuucgccuccggccagaacaucaccgaggaguucuaccaguccaccugcuccgccgucuccaagggcuaccucggcgcccuccgcaccggcugguacaccuccgucaucaccaucgagcucuccaacaucaaggagaucaagugcaacggcaccgacgccaaggucaagcucaucaagcaggagcucgacaaguacaagaacgccgucaccgaccuccagcuccucaugcaguccacccccgccaccggcuccggcuccgccaucgccuccggcgucgccgucugcaagguccuccaccucgagggcgaggucaacaagaucaaguccgcccuccucuccaccaacaaggccgucgucucccucuccggcugcggcgucuccguccucaccuucaagguccucgaccucaagaacuacaucgacaagcagcuccuccccauccucaacaagcaguccugcuccauccccaacaucgagaccgucaucgaguuccagcagaagaacaaccgccuccucgagaucacccgcgaguucuccgucaacgccggcgucaccacccccgucuccaccuacaugcucaccaacuccgagcuccucucccucaucaacgacaugcccaucaccaacgaccagaagaagcucauguccaacaacguccagaucguccgccagcaguccuacuccaucaugugcaucaucaaggaggagguccucgccuacgucguccagcucccccucuacggcgucaucgacacccccugcuggaagcuccacaccuccccccucugcaccaccaacaccaaggagggcuccaacaucugccucacccgcaccgaccgcggcugguacugcgacaacgccggcuccgucuccuucuucccccaggccgagaccugcaagguccaguccaaccgcgucuucugcgacaccaugaacucccucacccuccccuccgaggucaaccucugcaacgucgacaucuucaaccccaaguacgacugcaagaucaugaccuccaagaccgacgucuccuccuccgucaucaccucccucggcgccaucgucuccugcuacggcaagaccaagugcaccgccuccaacaagugccgcggcaucaucaagaccuucuccaacggcugcgacuacgucuccaacaagggcgucgacaccgucuccgucggcaacacccucuacuacgucaacaagcaggagggccagucccucuacgucaagggcgagcccaucaucaacuucuacgacccccucgucuuccccuccgacgaguucgacgccuccaucucccaggucaacgagaagaucaaccagucccucgccuucauccgcaaguccgacgagcuccuccacaacgucaacgccggcaaguccaccaccaacaucaugaucaccaccaucaucaucgucaucaucgucauccuccucucccucaucgccgucggccuccuccucuacugcaaggcccgcugaggacuaguggaagcauuuuccuggcugauuaaaagaaauuacucagcuauggucaucuguuccuguuagaaggcuaugcagcauauuauauacuaugcgcauguuaugaaaugcauaauaaaaaauuuuaaaaaaucuaaaagaucuaaaaaaaaaaaaaaaaaaaaaaaaaaaaaaaaaaaaaaaaaaaaaaaaaaaaaaaaaaaaaaaaugcaucccccccccccccccccccccccccccccccaaaggcucuuuucagagccaccagaauu

SEQ ID NO: 8065 - RNA, 1900 nt, Artificial Sequence
  mRNA product Design d-4 comprising derived and/or modified sequence from HRSV(A2)__F-del_DSCav1_mut8 (opt3)
gggagagucccgcagucggcguccagcggcucugcuuguucgugugugugucguugcaggccuuauucaagcuuaccauggagcugcucauccuuaaggccaacgcuauuaccacaauacugacugcagugacguucugcuuugccagcggccagaauaucaccgaagaguucuaccaauccacauguucugcggucucaaaaggguauuugggagcuuuaagaacugguugguacaccaguguuauuacaaucgaacugagcaacauuaaggagaucaaaugcaauggcaccgacgccaaggugaaacuaauaaagcaggaacucgauaaguauaaaaacgcaguaacugaccugcagcuucugaugcaguccacacccgccaccgggucuggaucggcuaucgcaucaggcguggccgucuguaagguguugcaccucgagggugagguuaauaaaauuaagagcgcucugcugaguacgaacaaagccguggucucccucucugggugcggagugagcguauuaacuuuuaagguucuggaucuuaagaauuacaucgacaaacaauugcugccuauucuaaacaagcaguccuguucaaucccaaauauagaaaccgugauugaguuccagcagaaaaacaauaggcuccuggaaaucacacgggaguuuagugucaacgcgggcgugacuaccccggugagcacauauaugcuuaccaauucugagcuguugucccucauuaacgauaugcccaucacgaaugaccaaaagaaacugaugucaaacaacguccagaucguucgccagcagagcuacaguauuaugugcauaaucaaggaagagguguuagcauauguagugcaacugccucucuacggcgucauugauacuccauguuggaaacuucauacaucuccccugugcaccacuaauacaaaggaaggguccaacaucuguuugacccgaacggaccguggaugguacugcgauaaugccgguagcgugucguucuuuccucaggcugagaccuguaagguucagucuaacagaguguucugcgacacaaugaacucccuaacucugccaucagaagucaaucucugcaauguggauauauuuaaccccaaauaugacuguaagauuaugaccaguaaaacagauguaagcuccucuguuaucacuagccugggcgccaucgugucaugcuacgggaagaccaaauguacagcaaguaauaagugcaggggaauuaucaagaccuucuccaacggcugugacuaugucagcaauaaagguguggacacugucucuguggggaacacgcuuuacuauguuaauaagcaagagggacagucacuguacgugaaaggcgagccuauuauaaacuuuuaugauccauugguauucccgagugacgaauuugaugcuagcaucucccaggucaaugagaagauuaaccagucucucgccuucauccggaaaucggacgaacuguuacacaacgugaaugcgggcaagagcacaaccaacaucaugauuacuaccauaaucauuguuaucauugugauccugcuaucccucauagccgucgggcugcuuuuguacugcaaggcacgcugaggacuaguggaagcauuuuccuggcugauuaaaagaaauuacucagcuauggucaucuguuccuguuagaaggcuaugcagcauauuauauacuaugcgcauguuaugaaaugcauaauaaaaaauuuuaaaaaaucuaaaagaucuaaaaaaaaaaaaaaaaaaaaaaaaaaaaaaaaaaaaaaaaaaaaaaaaaaaaaaaaaaaaaaaaugcaucccccccccccccccccccccccccccccccaaaggcucuuuucagagccaccagaauu

SEQ ID NO: 8066 - RNA, 1900 nt, Artificial Sequence
  mRNA product Design d-4 comprising derived and/or modified sequence from HRSV(A2)__F-del_DSCav1_mut8 (opt4)
gggagagucccgcagucggcguccagcggcucugcuuguucgugugugugucguugcaggccuuauucaagcuuaccauggagcugcugauccugaaggccaacgccaucaccaccauccugaccgccgugaccuucugcuucgccagcggccagaacaucaccgaggaguucuaccagagcaccugcagcgccgugagcaagggcuaccugggcgcccugagaaccggcugguacaccagcgugaucaccaucgagcugagcaacaucaaggagaucaagugcaacggcaccgacgccaaggugaagcugaucaagcaggagcuggacaaguacaagaacgccgugaccgaccugcagcugcugaugcagagcacccccgccaccggcagcggcagcgccaucgccagcggcguggccgugugcaaggugcugcaccuggagggcgaggugaacaagaucaagagcgcccugcugagcaccaacaaggccguggugagccugagcggcugcggcgugagcgugcugaccuucaaggugcuggaccugaagaacuacaucgacaagcagcugcugcccauccugaacaagcagagcugcagcauccccaacaucgagaccgugaucgaguuccagcagaagaacaacagacugcuggagaucaccagagaguucagcgugaacgccggcgugaccacccccgugagcaccuacaugcugaccaacagcgagcugcugagccugaucaacgacaugcccaucaccaacgaccagaagaagcugaugagcaacaacgugcagaucgugagacagcagagcuacagcaucaugugcaucaucaaggaggaggugcuggccuacguggugcagcugccccuguacggcgugaucgacacccccugcuggaagcugcacaccagcccccugugcaccaccaacaccaaggagggcagcaacaucugccugaccagaaccgacagaggcugguacugcgacaacgccggcagcgugagcuucuucccccaggccgagaccugcaaggugcagagcaacagaguguucugcgacaccaugaacagccugacccugcccagcgaggugaaccugugcaacguggacaucuucaaccccaaguacgacugcaagaucaugaccagcaagaccgacgugagcagcagcgugaucaccagccugggcgccaucgugagcugcuacggcaagaccaagugcaccgccagcaacaagugcagaggcaucaucaagaccuucagcaacggcugcgacuacgugagcaacaagggcguggacaccgugagcgugggcaacacccuguacuacgugaacaagcaggagggccagagccuguacgugaagggcgagcccaucaucaacuucuacgacccccugguguuccccagcgacgaguucgacgccagcaucagccaggugaacgagaagaucaaccagagccuggccuucaucagaaagagcgacgagcugcugcacaacgugaacgccggcaagagcaccaccaacaucaugaucaccaccaucaucaucgugaucaucgugauccugcugagccugaucgccgugggccugcugcuguacugcaaggccagaugaggacuaguggaagcauuuuccuggcugauuaaaagaaauuacucagcuauggucaucuguuccuguuagaaggcuaugcagcauauuauauacuaugcgcauguuaugaaaugcauaauaaaaaauuuuaaaaaaucuaaaagaucuaaaaaaaaaaaaaaaaaaaaaaaaaaaaaaaaaaaaaaaaaaaaaaaaaaaaaaaaaaaaaaaaugcaucccccccccccccccccccccccccccccccaaaggcucuuuucagagccaccagaauu

SEQ ID NO: 8067 - RNA, 1900 nt, Artificial Sequence
  mRNA product Design d-4 comprising derived and/or modified sequence from HRSV(A2)__F-del_DSCav1_mut8 (opt5)
gggagagucccgcagucggcguccagcggcucugcuuguucgugugugugucguugcaggccuuauucaagcuuaccauggagcugcucauccugaaggccaacgcuauuaccacaauccuuacggccgugaccuucugcuuugcgagcggccagaauauuacagaagaguucuaccaauccaccuguucugcugucagcaaaggguaucugggagcccucagaacaggcugguacaccuccguuaucacaauugaacugucuaacaucaaggagaucaaaugcaaugggaccgacgccaaggugaaacuuauuaagcaggaacuggauaaguauaaaaacgcugugacggaccuccagcugcugaugcagagcacccccgccacaggauccggcucugcuaucgccagcggggucgcgguguguaagguucuccaccuggagggagaggugaauaaaauuaaguccgcccuucugagcaccaacaaagcugucgugucucucuccggcugcggcguuagcgugcugacauuuaagguccuugaucugaagaauuacaucgacaaacaacuccugccuauucugaacaagcagucuuguuccaucccgaauauugaaaccgugaucgaguuccagcagaaaaacaaucggcuccuggaaaucacgcgcgaguuuagcgugaacgccggggucacaacccccguuucuacauauaugcuuaccaauuccgagcugcucagccugauuaacgauaugccuaucaccaaugaccaaaagaaacuuauguccaacaacgugcagauugugagacagcagucuuacagcaucaugugcauuaucaaggaagagguccuggcuuaugugguucaacucccccuguacggagugaucgauacaccuuguuggaaacugcauacgagcccccucugcaccacaaauaccaaggaaggcagcaacauuugucugacacggaccgaccgcgggugguacugcgauaaugccggaucugucuccuucuuuccucaggcggagacguguaaggugcagagcaacagaguuuucugcgacacaaugaacucucuuacccugccgagcgaagugaaucucugcaaugucgauaucuuuaaccccaaauaugacuguaagauuaugaccuccaaaacagaugugucuagcuccgucaucaccagccugggcgccauugugucuugcuacgggaagacaaaauguacggcuuccaauaagugccggggaaucaucaagaccuucagcaacggcugugacuauguuucuaauaaaggcguggacacagucuccguggggaacacccuuuacuauguuaauaagcaagagggacagagccuguacgugaaaggcgagccuauuaucaacuuuuaugauccccucgucuucccuuccgacgaauuugaugccucuauuagccaggugaaugagaagaucaaccagucccuggcuuucauucgcaaaucugacgaacugcuccacaacgugaaugccgggaaguccacaaccaacaucaugauuacgaccaucaucauuguuaucauugucauccugcuuucccugauugccgugggacuccugcuguacugcaaggcuagaugaggacuaguggaagcauuuuccuggcugauuaaaagaaauuacucagcuauggucaucuguuccuguuagaaggcuaugcagcauauuauauacuaugcgcauguuaugaaaugcauaauaaaaaauuuuaaaaaaucuaaaagaucuaaaaaaaaaaaaaaaaaaaaaaaaaaaaaaaaaaaaaaaaaaaaaaaaaaaaaaaaaaaaaaaaugcaucccccccccccccccccccccccccccccccaaaggcucuuuucagagccaccagaauu

SEQ ID NO: 8068 - RNA, 1900 nt, Artificial Sequence
  mRNA product Design d-4 comprising derived and/or modified sequence from HRSV(A2)__F-del_DSCav1_mut8 (opt6)
gggagagucccgcagucggcguccagcggcucugcuuguucgugugugugucguugcaggccuuauucaagcuuaccauggaacuacucauauugaaagccaacgcaaucacaacaauacuaaccgccguaacauuuugcuucgcgucaggccaaaauauaacagaagaauuuuaccaaucaacaugcuccgccguaucaaaaggauaccuaggugcauuacgaaccgguugguacacaucaguaaucacaauagaacuuuccaacauuaaagaaauaaaaugcaauggcacagacgcaaaagucaaacuaauaaaacaagaacuagacaaauauaaaaacgccgucacagacuuacaacuauuaaugcaaagcacaccagcaacaggauccggaucagcaauagcaucaggaguagccgucuguaaaguacuacaccuagaaggcgaaguuaauaaaauuaaaucagcuuuauuaucaaccaacaaagcaguaguaucacuauccggaugcggagucuccguccuaacauucaaaguacuagaccucaagaauuacauagauaaacaacuacuaccaauacucaacaaacaaucauguucaauaccaaacaucgaaaccgucauagaauuucaacaaaaaaauaauagacucuuagaaauaacacgagaauuuagcguaaacgcaggagucacaaccccugucucaacauacaugcuaaccaauuccgaauuauuaucacucauaaaugacaugccaauaacuaaugaccaaaaaaaacuuaugucaaacaacguacaaauaguaagacaacaaucauauucaauaaugugcauaaucaaagaagaaguuuuagcauauguaguacaacuaccacuauauggcgucauagacacaccaugcuggaaauuacacacaucaccucuaugcacaacaaacacaaaagaaggaagcaacauuugccuaaccagaaccgauagaggaugguacugcgauaacgcaggcucaguaucauucuucccucaagccgaaacuugcaaaguccaaucaaauagagucuucugcgauacaaugaacuccuuaacuuuaccaucagaaguaaaucuaugcaacguagauaucuuuaauccaaaauacgauugcaaaaucaugacaucaaaaacagauguaucaucuaguguaauuaccucccuaggagcaauaguaagcugcuacggaaaaacaaaaugcaccgccucuaacaaaugucguggaauaauaaaaacauucucaaacggaugcgauuauguaucaaauaaaggugucgacaccguaucaguaggcaauacacuauacuauguaaauaaacaagaaggacaaucacucuacgucaaaggugaaccaauaauaaacuucuacgacccacuuguauucccaagcgacgaauuugacgcaucaauaagccaaguaaacgaaaaaauaaaccaaucacuagcauucaucagaaaaucagacgaacuacuccacaauguaaaugcaggaaaaucaacaaccaauaucaugauaacaaccauaauaauagucauaauaguaauacuauuaucccucauagccguuggacuacuccuauauuguaaagcacgauaaggacuaguggaagcauuuuccuggcugauuaaaagaaauuacucagcuauggucaucuguuccuguuagaaggcuaugcagcauauuauauacuaugcgcauguuaugaaaugcauaauaaaaaauuuuaaaaaaucuaaaagaucuaaaaaaaaaaaaaaaaaaaaaaaaaaaaaaaaaaaaaaaaaaaaaaaaaaaaaaaaaaaaaaaaugcaucccccccccccccccccccccccccccccccaaaggcucuuuucagagccaccagaauu

SEQ ID NO: 8069 - RNA, 1900 nt, Artificial Sequence
  mRNA product Design d-4 comprising derived and/or modified sequence from HRSV(A2)__F-del_DSCav1_mut8 (opt11)
gggagagucccgcagucggcguccagcggcucugcuuguucgugugugugucguugcaggccuuauucaagcuuaccauggaacuccucauccucaaagccaacgccaucaccaccauacucaccgcaguaaccuucugcuucgcauccggccaaaacaucacagaagaguucuaccagaguaccugcuccgccgucuccaaaggcuaccuuggcgcccuccguaccgggugguacacauccgucaucacaaucgaacucuccaacaucaaagaaauaaagugcaacggcacagacgccaaaguaaaacugauaaagcaagaacucgacaaauacaaaaacgccguaaccgaccuccagcuacuaaugcaauccacucccgccaccggcagcggauccgccaucgccuccggaguagccgucuguaaagucuuacaccucgaaggcgaagugaacaaaaucaaauccgcccuacucucaaccaacaaagccguaguaucacucuccgggugcggcguuucagugcuaacguucaaaguccuugaccucaaaaacuacaucgacaaacaacuccuccccauccuaaauaaacaauccugcuccauacccaacaucgagacugucaucgaguuccagcagaaaaacaaccgacuccucgaaaucacacgcgaguucucugucaacgccggcgucacaacccccgucuccacauacaugcucaccaacagcgaacuccucucccuaaucaaugacaugcccaucaccaacgaccaaaagaaacucaugucaaacaacguccaaaucguccgccaacaauccuacagcaucaugugcaucaucaaagaagaaguucucgcauacguaguacaacucccccucuacggagugaucgacacccccugcuggaaacuacacaccagcccgcuuugcaccacaaacaccaaggaaggcuccaacaucugccucacucgaaccgaccgcggcugguacugcgacaacgcaggcuccgucaguuucuuuccccaagcagaaacaugcaaaguccaauccaaccgaguauucugcgacaccaugaacucccucacccuaccauccgaaguuaaccuaugcaacguggacaucuucaaccccaaguacgacugcaaaauuaugaccuccaaaaccgacguauccuccagcgucaucaccagccucggagcaauagucuccugcuacggcaagaccaagugcaccgcuuccaacaagugucgcggaaucaucaaaaccuucucaaacggcugcgacuacgucuccaacaaaggcgucgacaccguauccguaggaaacacccuauacuacgucaacaaacaagaaggacaaucccucuaugucaaaggcgaacccaucaucaauuucuacgacccccuagucuucccuuccgacgaguucgacgcguccaucagccaagucaaugaaaagaucaaccagagccuggcauucauccgcaaauccgacgaacuccuccacaacgucaacgcgggaaaauccacgacaaacaucaugaucaccaccaucaucaucgucaucauagucauucuccuuucucucaucgccgugggacuacuucucuacugcaaagcccgauaaggacuaguggaagcauuuuccuggcugauuaaaagaaauuacucagcuauggucaucuguuccuguuagaaggcuaugcagcauauuauauacuaugcgcauguuaugaaaugcauaauaaaaaauuuuaaaaaaucuaaaagaucuaaaaaaaaaaaaaaaaaaaaaaaaaaaaaaaaaaaaaaaaaaaaaaaaaaaaaaaaaaaaaaaaugcaucccccccccccccccccccccccccccccccaaaggcucuuuucagagccaccagaauu

SEQ ID NO: 8070 - RNA, 1997 nt, Artificial Sequence
  mRNA product Design d-5 comprising derived and/or modified sequence from HRSV(A2)__F-del_DSCav1_mut8 (opt1)
gggagagggcgcuuggcuugcaaggacccugagcugcggcauugaagcacacccaacccaacucgacugaagucagccucacugaaccggaucugagaaucuucucucucugggcuugccagggcucuccgaaccuagcuagcauccucuucaauuccaacuagaaagcuuaccauggagcugcucauccugaaggccaacgccaucaccaccauccugacggcggugaccuucugcuucgccagcggccagaacaucaccgaggaguucuaccaguccacgugcagcgccgucuccaagggguaccucggcgcccugcggaccggcugguacaccuccgugaucaccaucgagcugagcaacaucaaggagaucaagugcaacgggaccgacgccaaggugaagcucaucaagcaggagcuggacaaguacaagaacgcggucacggaccugcagcuccugaugcaguccaccccggcaaccggcuccggcuccgccaucgcgagcggcgucgccgugugcaaggugcugcaccucgagggggaggucaacaagaucaagagcgcccugcuguccaccaacaaggccguggugagccucuccggcugcggcgucagcgugcugaccuucaaggugcuggaccucaagaacuacaucgacaagcagcugcugcccauccugaacaagcagagcugcuccauccccaacaucgagacggugaucgaguuccagcagaagaacaaccggcuccuggagaucacccgcgaguucagcgugaacgccggggucaccacccccguguccacguacaugcugaccaacagcgagcuccugucccugaucaacgacaugccgaucaccaacgaccagaagaagcucaugagcaacaacgugcagaucguccggcagcaguccuacagcaucaugugcaucaucaaggaggaggugcuggcguacgugguccagcugccccucuacggcgugaucgacacccccugcuggaagcugcacacgagcccccugugcaccaccaacaccaaggagggguccaacaucugccucacgcgcaccgaccggggcugguacugcgacaacgccggcagcgucuccuucuucccgcaggccgagaccugcaaggugcagagcaaccgcguguucugcgacaccaugaacucccugacgcugcccagcgagguaaaccucugcaacgucgacaucuucaaccccaaguacgacugcaagaucaugaccuccaagaccgacgugagcuccagcgugaucaccucccugggggccaucgucagcugcuacggcaagacgaagugcaccgccagcaacaagugccgggggaucaucaagaccuucuccaacggcugcgacuacgugagcaacaagggcguggacaccguguccgucgggaacacccuguacuacgugaacaagcaggagggccagagccucuacgugaagggggagcccaucaucaacuucuacgacccgcuggucuuccccuccgacgaguucgacgcgagcaucucccaggugaacgagaagaucaaccagagccuggccuucauccgcaaguccgacgagcugcuccacaacgugaacgccggcaagagcacgaccaacaucaugaucaccaccaucaucaucgucaucaucgugauccugcugucccucaucgccguggggcugcugcucuacugcaaggcccggugaggacuaguggaagcauuuuccuggcugauuaaaagaaauuacucagcuauggucaucuguuccuguuagaaggcuaugcagcauauuauauacuaugcgcauguuaugaaaugcauaauaaaaaauuuuaaaaaaucuaaaagaucuaaaaaaaaaaaaaaaaaaaaaaaaaaaaaaaaaaaaaaaaaaaaaaaaaaaaaaaaaaaaaaaaugcaucccccccccccccccccccccccccccccccaaaggcucuuuucagagccaccagaauu

SEQ ID NO: 8071 - RNA, 1997 nt, Artificial Sequence
  mRNA product Design d-5 comprising derived and/or modified sequence from HRSV(A2)__F-del_DSCav1_mut8 (opt1)
gggagagggcgcuuggcuugcaaggacccugagcugcggcauugaagcacacccaacccaacucgacugaagucagccucacugaaccggaucugagaaucuucucucucugggcuugccagggcucuccgaaccuagcuagcauccucuucaauuccaacuagaaagcuuaccauggagcugcucauccugaaggccaacgccaucaccaccauccugacggcggugaccuucugcuucgccagcggccagaacaucaccgaggaguucuaccaguccacgugcagcgccgucuccaagggguaccucggcgcccugcgcaccgggugguacaccagcgugaucaccaucgagcuguccaacaucaaggagaucaagugcaacggcaccgacgccaaggugaagcucaucaagcaggagcuggacaaguacaagaacgcggucacggaccugcagcuccugaugcagagcacccccgccaccggguccggcagcgccaucgccuccggcguggcggugugcaagguccugcaccucgagggggaggugaacaagaucaagagcgcccugcuguccaccaacaaggccguggucagccucuccggcugcggggugagcgugcugacguucaagguccuggaccucaagaacuacaucgacaagcagcugcugccgauccucaacaagcaguccugcagcauccccaacaucgagaccgugaucgaguuccagcagaagaacaaccggcugcuggagaucacccgcgaguucuccgugaacgccggcgucaccacgcccgugagcaccuacaugcucaccaacuccgagcugcugagccucaucaacgacaugcccaucaccaacgaccagaagaagcugaugagcaacaacgugcagaucguccggcagcaguccuacagcaucaugugcaucaucaaggaggaggugcuggccuacgugguccagcucccgcuguacggggugaucgacacgcccugcuggaagcugcacaccagcccccucugcaccaccaacacgaaggagggcuccaacaucugccugacccgcaccgaccggggcugguacugcgacaacgcgggguccgugagcuucuucccccaggccgagaccugcaagguccaguccaaccgcguguucugcgacacgaugaacagccugacccucccguccgaggucaaccugugcaacguggacaucuucaaccccaaguacgacugcaagaucaugaccagcaagaccgacguguccagcuccgucaucacgagccugggcgccaucguguccugcuacgggaagaccaagugcaccgccagcaacaagugccggggcaucaucaagaccuucuccaacggcugcgacuacgugagcaacaagggggucgacacgguguccgugggcaacacccucuacuacgucaacaagcaggaggggcagagccuguacgugaagggcgagcccaucaucaacuucuacgacccccugguguucccgagcgacgaguucgacgccuccaucagccaggucaacgagaagaucaaccagucccucgcguucauccgcaagagcgacgagcugcugcacaacgugaacgccgggaaguccaccaccaacaucaugaucaccacgaucaucaucgugaucaucgucauccuccugagccugaucgccgugggccuccugcuguacugcaaggcccggugaggacuaguggaagcauuuuccuggcugauuaaaagaaauuacucagcuauggucaucuguuccuguuagaaggcuaugcagcauauuauauacuaugcgcauguuaugaaaugcauaauaaaaaauuuuaaaaaaucuaaaagaucuaaaaaaaaaaaaaaaaaaaaaaaaaaaaaaaaaaaaaaaaaaaaaaaaaaaaaaaaaaaaaaaaugcaucccccccccccccccccccccccccccccccaaaggcucuuuucagagccaccagaauu

SEQ ID NO: 8072 - RNA, 1997 nt, Artificial Sequence
  mRNA product Design d-5 comprising derived and/or modified sequence from HRSV(A2)__F-del_DSCav1_mut8 (opt2)
gggagagggcgcuuggcuugcaaggacccugagcugcggcauugaagcacacccaacccaacucgacugaagucagccucacugaaccggaucugagaaucuucucucucugggcuugccagggcucuccgaaccuagcuagcauccucuucaauuccaacuagaaagcuuaccauggagcuccucauccucaaggccaacgccaucaccaccauccucaccgccgucaccuucugcuucgccuccggccagaacaucaccgaggaguucuaccaguccaccugcuccgccgucuccaagggcuaccucggcgcccuccgcaccggcugguacaccuccgucaucaccaucgagcucuccaacaucaaggagaucaagugcaacggcaccgacgccaaggucaagcucaucaagcaggagcucgacaaguacaagaacgccgucaccgaccuccagcuccucaugcaguccacccccgccaccggcuccggcuccgccaucgccuccggcgucgccgucugcaagguccuccaccucgagggcgaggucaacaagaucaaguccgcccuccucuccaccaacaaggccgucgucucccucuccggcugcggcgucuccguccucaccuucaagguccucgaccucaagaacuacaucgacaagcagcuccuccccauccucaacaagcaguccugcuccauccccaacaucgagaccgucaucgaguuccagcagaagaacaaccgccuccucgagaucacccgcgaguucuccgucaacgccggcgucaccacccccgucuccaccuacaugcucaccaacuccgagcuccucucccucaucaacgacaugcccaucaccaacgaccagaagaagcucauguccaacaacguccagaucguccgccagcaguccuacuccaucaugugcaucaucaaggaggagguccucgccuacgucguccagcucccccucuacggcgucaucgacacccccugcuggaagcuccacaccuccccccucugcaccaccaacaccaaggagggcuccaacaucugccucacccgcaccgaccgcggcugguacugcgacaacgccggcuccgucuccuucuucccccaggccgagaccugcaagguccaguccaaccgcgucuucugcgacaccaugaacucccucacccuccccuccgaggucaaccucugcaacgucgacaucuucaaccccaaguacgacugcaagaucaugaccuccaagaccgacgucuccuccuccgucaucaccucccucggcgccaucgucuccugcuacggcaagaccaagugcaccgccuccaacaagugccgcggcaucaucaagaccuucuccaacggcugcgacuacgucuccaacaagggcgucgacaccgucuccgucggcaacacccucuacuacgucaacaagcaggagggccagucccucuacgucaagggcgagcccaucaucaacuucuacgacccccucgucuuccccuccgacgaguucgacgccuccaucucccaggucaacgagaagaucaaccagucccucgccuucauccgcaaguccgacgagcuccuccacaacgucaacgccggcaaguccaccaccaacaucaugaucaccaccaucaucaucgucaucaucgucauccuccucucccucaucgccgucggccuccuccucuacugcaaggcccgcugaggacuaguggaagcauuuuccuggcugauuaaaagaaauuacucagcuauggucaucuguuccuguuagaaggcuaugcagcauauuauauacuaugcgcauguuaugaaaugcauaauaaaaaauuuuaaaaaaucuaaaagaucuaaaaaaaaaaaaaaaaaaaaaaaaaaaaaaaaaaaaaaaaaaaaaaaaaaaaaaaaaaaaaaaaugcaucccccccccccccccccccccccccccccccaaaggcucuuuucagagccaccagaauu

SEQ ID NO: 8073 - RNA, 1997 nt, Artificial Sequence
  mRNA product Design d-5 comprising derived and/or modified sequence from HRSV(A2)__F-del_DSCav1_mut8 (opt3)
gggagagggcgcuuggcuugcaaggacccugagcugcggcauugaagcacacccaacccaacucgacugaagucagccucacugaaccggaucugagaaucuucucucucugggcuugccagggcucuccgaaccuagcuagcauccucuucaauuccaacuagaaagcuuaccauggagcugcucauccuuaaggccaacgcuauuaccacaauacugacugcagugacguucugcuuugccagcggccagaauaucaccgaagaguucuaccaauccacauguucugcggucucaaaaggguauuugggagcuuuaagaacugguugguacaccaguguuauuacaaucgaacugagcaacauuaaggagaucaaaugcaauggcaccgacgccaaggugaaacuaauaaagcaggaacucgauaaguauaaaaacgcaguaacugaccugcagcuucugaugcaguccacacccgccaccgggucuggaucggcuaucgcaucaggcguggccgucuguaagguguugcaccucgagggugagguuaauaaaauuaagagcgcucugcugaguacgaacaaagccguggucucccucucugggugcggagugagcguauuaacuuuuaagguucuggaucuuaagaauuacaucgacaaacaauugcugccuauucuaaacaagcaguccuguucaaucccaaauauagaaaccgugauugaguuccagcagaaaaacaauaggcuccuggaaaucacacgggaguuuagugucaacgcgggcgugacuaccccggugagcacauauaugcuuaccaauucugagcuguugucccucauuaacgauaugcccaucacgaaugaccaaaagaaacugaugucaaacaacguccagaucguucgccagcagagcuacaguauuaugugcauaaucaaggaagagguguuagcauauguagugcaacugccucucuacggcgucauugauacuccauguuggaaacuucauacaucuccccugugcaccacuaauacaaaggaaggguccaacaucuguuugacccgaacggaccguggaugguacugcgauaaugccgguagcgugucguucuuuccucaggcugagaccuguaagguucagucuaacagaguguucugcgacacaaugaacucccuaacucugccaucagaagucaaucucugcaauguggauauauuuaaccccaaauaugacuguaagauuaugaccaguaaaacagauguaagcuccucuguuaucacuagccugggcgccaucgugucaugcuacgggaagaccaaauguacagcaaguaauaagugcaggggaauuaucaagaccuucuccaacggcugugacuaugucagcaauaaagguguggacacugucucuguggggaacacgcuuuacuauguuaauaagcaagagggacagucacuguacgugaaaggcgagccuauuauaaacuuuuaugauccauugguauucccgagugacgaauuugaugcuagcaucucccaggucaaugagaagauuaaccagucucucgccuucauccggaaaucggacgaacuguuacacaacgugaaugcgggcaagagcacaaccaacaucaugauuacuaccauaaucauuguuaucauugugauccugcuaucccucauagccgucgggcugcuuuuguacugcaaggcacgcugaggacuaguggaagcauuuuccuggcugauuaaaagaaauuacucagcuauggucaucuguuccuguuagaaggcuaugcagcauauuauauacuaugcgcauguuaugaaaugcauaauaaaaaauuuuaaaaaaucuaaaagaucuaaaaaaaaaaaaaaaaaaaaaaaaaaaaaaaaaaaaaaaaaaaaaaaaaaaaaaaaaaaaaaaaugcaucccccccccccccccccccccccccccccccaaaggcucuuuucagagccaccagaauu

SEQ ID NO: 8074 - RNA, 1997 nt, Artificial Sequence
  mRNA product Design d-5 comprising derived and/or modified sequence from HRSV(A2)__F-del_DSCav1_mut8 (opt4)
gggagagggcgcuuggcuugcaaggacccugagcugcggcauugaagcacacccaacccaacucgacugaagucagccucacugaaccggaucugagaaucuucucucucugggcuugccagggcucuccgaaccuagcuagcauccucuucaauuccaacuagaaagcuuaccauggagcugcugauccugaaggccaacgccaucaccaccauccugaccgccgugaccuucugcuucgccagcggccagaacaucaccgaggaguucuaccagagcaccugcagcgccgugagcaagggcuaccugggcgcccugagaaccggcugguacaccagcgugaucaccaucgagcugagcaacaucaaggagaucaagugcaacggcaccgacgccaaggugaagcugaucaagcaggagcuggacaaguacaagaacgccgugaccgaccugcagcugcugaugcagagcacccccgccaccggcagcggcagcgccaucgccagcggcguggccgugugcaaggugcugcaccuggagggcgaggugaacaagaucaagagcgcccugcugagcaccaacaaggccguggugagccugagcggcugcggcgugagcgugcugaccuucaaggugcuggaccugaagaacuacaucgacaagcagcugcugcccauccugaacaagcagagcugcagcauccccaacaucgagaccgugaucgaguuccagcagaagaacaacagacugcuggagaucaccagagaguucagcgugaacgccggcgugaccacccccgugagcaccuacaugcugaccaacagcgagcugcugagccugaucaacgacaugcccaucaccaacgaccagaagaagcugaugagcaacaacgugcagaucgugagacagcagagcuacagcaucaugugcaucaucaaggaggaggugcuggccuacguggugcagcugccccuguacggcgugaucgacacccccugcuggaagcugcacaccagcccccugugcaccaccaacaccaaggagggcagcaacaucugccugaccagaaccgacagaggcugguacugcgacaacgccggcagcgugagcuucuucccccaggccgagaccugcaaggugcagagcaacagaguguucugcgacaccaugaacagccugacccugcccagcgaggugaaccugugcaacguggacaucuucaaccccaaguacgacugcaagaucaugaccagcaagaccgacgugagcagcagcgugaucaccagccugggcgccaucgugagcugcuacggcaagaccaagugcaccgccagcaacaagugcagaggcaucaucaagaccuucagcaacggcugcgacuacgugagcaacaagggcguggacaccgugagcgugggcaacacccuguacuacgugaacaagcaggagggccagagccuguacgugaagggcgagcccaucaucaacuucuacgacccccugguguuccccagcgacgaguucgacgccagcaucagccaggugaacgagaagaucaaccagagccuggccuucaucagaaagagcgacgagcugcugcacaacgugaacgccggcaagagcaccaccaacaucaugaucaccaccaucaucaucgugaucaucgugauccugcugagccugaucgccgugggccugcugcuguacugcaaggccagaugaggacuaguggaagcauuuuccuggcugauuaaaagaaauuacucagcuauggucaucuguuccuguuagaaggcuaugcagcauauuauauacuaugcgcauguuaugaaaugcauaauaaaaaauuuuaaaaaaucuaaaagaucuaaaaaaaaaaaaaaaaaaaaaaaaaaaaaaaaaaaaaaaaaaaaaaaaaaaaaaaaaaaaaaaaugcaucccccccccccccccccccccccccccccccaaaggcucuuuucagagccaccagaauu

SEQ ID NO: 8075 - RNA, 1997 nt, Artificial Sequence
  mRNA product Design d-5 comprising derived and/or modified sequence from HRSV(A2)__F-del_DSCav1_mut8 (opt5)
gggagagggcgcuuggcuugcaaggacccugagcugcggcauugaagcacacccaacccaacucgacugaagucagccucacugaaccggaucugagaaucuucucucucugggcuugccagggcucuccgaaccuagcuagcauccucuucaauuccaacuagaaagcuuaccauggagcugcucauccugaaggccaacgcuauuaccacaauccuuacggccgugaccuucugcuuugcgagcggccagaauauuacagaagaguucuaccaauccaccuguucugcugucagcaaaggguaucugggagcccucagaacaggcugguacaccuccguuaucacaauugaacugucuaacaucaaggagaucaaaugcaaugggaccgacgccaaggugaaacuuauuaagcaggaacuggauaaguauaaaaacgcugugacggaccuccagcugcugaugcagagcacccccgccacaggauccggcucugcuaucgccagcggggucgcgguguguaagguucuccaccuggagggagaggugaauaaaauuaaguccgcccuucugagcaccaacaaagcugucgugucucucuccggcugcggcguuagcgugcugacauuuaagguccuugaucugaagaauuacaucgacaaacaacuccugccuauucugaacaagcagucuuguuccaucccgaauauugaaaccgugaucgaguuccagcagaaaaacaaucggcuccuggaaaucacgcgcgaguuuagcgugaacgccggggucacaacccccguuucuacauauaugcuuaccaauuccgagcugcucagccugauuaacgauaugccuaucaccaaugaccaaaagaaacuuauguccaacaacgugcagauugugagacagcagucuuacagcaucaugugcauuaucaaggaagagguccuggcuuaugugguucaacucccccuguacggagugaucgauacaccuuguuggaaacugcauacgagcccccucugcaccacaaauaccaaggaaggcagcaacauuugucugacacggaccgaccgcgggugguacugcgauaaugccggaucugucuccuucuuuccucaggcggagacguguaaggugcagagcaacagaguuuucugcgacacaaugaacucucuuacccugccgagcgaagugaaucucugcaaugucgauaucuuuaaccccaaauaugacuguaagauuaugaccuccaaaacagaugugucuagcuccgucaucaccagccugggcgccauugugucuugcuacgggaagacaaaauguacggcuuccaauaagugccggggaaucaucaagaccuucagcaacggcugugacuauguuucuaauaaaggcguggacacagucuccguggggaacacccuuuacuauguuaauaagcaagagggacagagccuguacgugaaaggcgagccuauuaucaacuuuuaugauccccucgucuucccuuccgacgaauuugaugccucuauuagccaggugaaugagaagaucaaccagucccuggcuuucauucgcaaaucugacgaacugcuccacaacgugaaugccgggaaguccacaaccaacaucaugauuacgaccaucaucauuguuaucauugucauccugcuuucccugauugccgugggacuccugcuguacugcaaggcuagaugaggacuaguggaagcauuuuccuggcugauuaaaagaaauuacucagcuauggucaucuguuccuguuagaaggcuaugcagcauauuauauacuaugcgcauguuaugaaaugcauaauaaaaaauuuuaaaaaaucuaaaagaucuaaaaaaaaaaaaaaaaaaaaaaaaaaaaaaaaaaaaaaaaaaaaaaaaaaaaaaaaaaaaaaaaugcaucccccccccccccccccccccccccccccccaaaggcucuuuucagagccaccagaauu

SEQ ID NO: 8076 - RNA, 1997 nt, Artificial Sequence
  mRNA product Design d-5 comprising derived and/or modified sequence from HRSV(A2)__F-del_DSCav1_mut8 (opt6)
gggagagggcgcuuggcuugcaaggacccugagcugcggcauugaagcacacccaacccaacucgacugaagucagccucacugaaccggaucugagaaucuucucucucugggcuugccagggcucuccgaaccuagcuagcauccucuucaauuccaacuagaaagcuuaccauggaacuacucauauugaaagccaacgcaaucacaacaauacuaaccgccguaacauuuugcuucgcgucaggccaaaauauaacagaagaauuuuaccaaucaacaugcuccgccguaucaaaaggauaccuaggugcauuacgaaccgguugguacacaucaguaaucacaauagaacuuuccaacauuaaagaaauaaaaugcaauggcacagacgcaaaagucaaacuaauaaaacaagaacuagacaaauauaaaaacgccgucacagacuuacaacuauuaaugcaaagcacaccagcaacaggauccggaucagcaauagcaucaggaguagccgucuguaaaguacuacaccuagaaggcgaaguuaauaaaauuaaaucagcuuuauuaucaaccaacaaagcaguaguaucacuauccggaugcggagucuccguccuaacauucaaaguacuagaccucaagaauuacauagauaaacaacuacuaccaauacucaacaaacaaucauguucaauaccaaacaucgaaaccgucauagaauuucaacaaaaaaauaauagacucuuagaaauaacacgagaauuuagcguaaacgcaggagucacaaccccugucucaacauacaugcuaaccaauuccgaauuauuaucacucauaaaugacaugccaauaacuaaugaccaaaaaaaacuuaugucaaacaacguacaaauaguaagacaacaaucauauucaauaaugugcauaaucaaagaagaaguuuuagcauauguaguacaacuaccacuauauggcgucauagacacaccaugcuggaaauuacacacaucaccucuaugcacaacaaacacaaaagaaggaagcaacauuugccuaaccagaaccgauagaggaugguacugcgauaacgcaggcucaguaucauucuucccucaagccgaaacuugcaaaguccaaucaaauagagucuucugcgauacaaugaacuccuuaacuuuaccaucagaaguaaaucuaugcaacguagauaucuuuaauccaaaauacgauugcaaaaucaugacaucaaaaacagauguaucaucuaguguaauuaccucccuaggagcaauaguaagcugcuacggaaaaacaaaaugcaccgccucuaacaaaugucguggaauaauaaaaacauucucaaacggaugcgauuauguaucaaauaaaggugucgacaccguaucaguaggcaauacacuauacuauguaaauaaacaagaaggacaaucacucuacgucaaaggugaaccaauaauaaacuucuacgacccacuuguauucccaagcgacgaauuugacgcaucaauaagccaaguaaacgaaaaaauaaaccaaucacuagcauucaucagaaaaucagacgaacuacuccacaauguaaaugcaggaaaaucaacaaccaauaucaugauaacaaccauaauaauagucauaauaguaauacuauuaucccucauagccguuggacuacuccuauauuguaaagcacgauaaggacuaguggaagcauuuuccuggcugauuaaaagaaauuacucagcuauggucaucuguuccuguuagaaggcuaugcagcauauuauauacuaugcgcauguuaugaaaugcauaauaaaaaauuuuaaaaaaucuaaaagaucuaaaaaaaaaaaaaaaaaaaaaaaaaaaaaaaaaaaaaaaaaaaaaaaaaaaaaaaaaaaaaaaaugcaucccccccccccccccccccccccccccccccaaaggcucuuuucagagccaccagaauu

SEQ ID NO: 8077 - RNA, 1997 nt, Artificial Sequence
  mRNA product Design d-5 comprising derived and/or modified sequence from HRSV(A2)__F-del_DSCav1_mut8 (opt11)
gggagagggcgcuuggcuugcaaggacccugagcugcggcauugaagcacacccaacccaacucgacugaagucagccucacugaaccggaucugagaaucuucucucucugggcuugccagggcucuccgaaccuagcuagcauccucuucaauuccaacuagaaagcuuaccauggaacuccucauccucaaagccaacgccaucaccaccauacucaccgcaguaaccuucugcuucgcauccggccaaaacaucacagaagaguucuaccagaguaccugcuccgccgucuccaaaggcuaccuuggcgcccuccguaccgggugguacacauccgucaucacaaucgaacucuccaacaucaaagaaauaaagugcaacggcacagacgccaaaguaaaacugauaaagcaagaacucgacaaauacaaaaacgccguaaccgaccuccagcuacuaaugcaauccacucccgccaccggcagcggauccgccaucgccuccggaguagccgucuguaaagucuuacaccucgaaggcgaagugaacaaaaucaaauccgcccuacucucaaccaacaaagccguaguaucacucuccgggugcggcguuucagugcuaacguucaaaguccuugaccucaaaaacuacaucgacaaacaacuccuccccauccuaaauaaacaauccugcuccauacccaacaucgagacugucaucgaguuccagcagaaaaacaaccgacuccucgaaaucacacgcgaguucucugucaacgccggcgucacaacccccgucuccacauacaugcucaccaacagcgaacuccucucccuaaucaaugacaugcccaucaccaacgaccaaaagaaacucaugucaaacaacguccaaaucguccgccaacaauccuacagcaucaugugcaucaucaaagaagaaguucucgcauacguaguacaacucccccucuacggagugaucgacacccccugcuggaaacuacacaccagcccgcuuugcaccacaaacaccaaggaaggcuccaacaucugccucacucgaaccgaccgcggcugguacugcgacaacgcaggcuccgucaguuucuuuccccaagcagaaacaugcaaaguccaauccaaccgaguauucugcgacaccaugaacucccucacccuaccauccgaaguuaaccuaugcaacguggacaucuucaaccccaaguacgacugcaaaauuaugaccuccaaaaccgacguauccuccagcgucaucaccagccucggagcaauagucuccugcuacggcaagaccaagugcaccgcuuccaacaagugucgcggaaucaucaaaaccuucucaaacggcugcgacuacgucuccaacaaaggcgucgacaccguauccguaggaaacacccuauacuacgucaacaaacaagaaggacaaucccucuaugucaaaggcgaacccaucaucaauuucuacgacccccuagucuucccuuccgacgaguucgacgcguccaucagccaagucaaugaaaagaucaaccagagccuggcauucauccgcaaauccgacgaacuccuccacaacgucaacgcgggaaaauccacgacaaacaucaugaucaccaccaucaucaucgucaucauagucauucuccuuucucucaucgccgugggacuacuucucuacugcaaagcccgauaaggacuaguggaagcauuuuccuggcugauuaaaagaaauuacucagcuauggucaucuguuccuguuagaaggcuaugcagcauauuauauacuaugcgcauguuaugaaaugcauaauaaaaaauuuuaaaaaaucuaaaagaucuaaaaaaaaaaaaaaaaaaaaaaaaaaaaaaaaaaaaaaaaaaaaaaaaaaaaaaaaaaaaaaaaugcaucccccccccccccccccccccccccccccccaaaggcucuuuucagagccaccagaauu

SEQ ID NO: 8078 - RNA, 1877 nt, Artificial Sequence
  mRNA product Design e-1 comprising derived and/or modified sequence from HRSV(A2)__F-del_DSCav1_mut8 (opt1)
gggagaauauaagcguuggcggagcgucgguuguagcacucugcgcgcccgcucuucugcugcuguuugucuacuuccuccugcuuccccgccgccgccgccgccaucaagcuuaccauggagcugcucauccugaaggccaacgccaucaccaccauccugacggcggugaccuucugcuucgccagcggccagaacaucaccgaggaguucuaccaguccacgugcagcgccgucuccaagggguaccucggcgcccugcggaccggcugguacaccuccgugaucaccaucgagcugagcaacaucaaggagaucaagugcaacgggaccgacgccaaggugaagcucaucaagcaggagcuggacaaguacaagaacgcggucacggaccugcagcuccugaugcaguccaccccggcaaccggcuccggcuccgccaucgcgagcggcgucgccgugugcaaggugcugcaccucgagggggaggucaacaagaucaagagcgcccugcuguccaccaacaaggccguggugagccucuccggcugcggcgucagcgugcugaccuucaaggugcuggaccucaagaacuacaucgacaagcagcugcugcccauccugaacaagcagagcugcuccauccccaacaucgagacggugaucgaguuccagcagaagaacaaccggcuccuggagaucacccgcgaguucagcgugaacgccggggucaccacccccguguccacguacaugcugaccaacagcgagcuccugucccugaucaacgacaugccgaucaccaacgaccagaagaagcucaugagcaacaacgugcagaucguccggcagcaguccuacagcaucaugugcaucaucaaggaggaggugcuggcguacgugguccagcugccccucuacggcgugaucgacacccccugcuggaagcugcacacgagcccccugugcaccaccaacaccaaggagggguccaacaucugccucacgcgcaccgaccggggcugguacugcgacaacgccggcagcgucuccuucuucccgcaggccgagaccugcaaggugcagagcaaccgcguguucugcgacaccaugaacucccugacgcugcccagcgagguaaaccucugcaacgucgacaucuucaaccccaaguacgacugcaagaucaugaccuccaagaccgacgugagcuccagcgugaucaccucccugggggccaucgucagcugcuacggcaagacgaagugcaccgccagcaacaagugccgggggaucaucaagaccuucuccaacggcugcgacuacgugagcaacaagggcguggacaccguguccgucgggaacacccuguacuacgugaacaagcaggagggccagagccucuacgugaagggggagcccaucaucaacuucuacgacccgcuggucuuccccuccgacgaguucgacgcgagcaucucccaggugaacgagaagaucaaccagagccuggccuucauccgcaaguccgacgagcugcuccacaacgugaacgccggcaagagcacgaccaacaucaugaucaccaccaucaucaucgucaucaucgugauccugcugucccucaucgccguggggcugcugcucuacugcaaggcccggugaggacuaguguccaccugucccuccugggcugcuggauugucucguuuuccugccaaauaaacaggaucagcgcuuuacagaucuaaaaaaaaaaaaaaaaaaaaaaaaaaaaaaaaaaaaaaaaaaaaaaaaaaaaaaaaaaaaaaaaugcaucccccccccccccccccccccccccccccccaaaggcucuuuucagagccaccagaauu

SEQ ID NO: 8079 - RNA, 1877 nt, Artificial Sequence
  mRNA product Design e-1 comprising derived and/or modified sequence from HRSV(A2)__F-del_DSCav1_mut8 (opt1)
gggagaauauaagcguuggcggagcgucgguuguagcacucugcgcgcccgcucuucugcugcuguuugucuacuuccuccugcuuccccgccgccgccgccgccaucaagcuuaccauggagcugcucauccugaaggccaacgccaucaccaccauccugacggcggugaccuucugcuucgccagcggccagaacaucaccgaggaguucuaccaguccacgugcagcgccgucuccaagggguaccucggcgcccugcgcaccgggugguacaccagcgugaucaccaucgagcuguccaacaucaaggagaucaagugcaacggcaccgacgccaaggugaagcucaucaagcaggagcuggacaaguacaagaacgcggucacggaccugcagcuccugaugcagagcacccccgccaccggguccggcagcgccaucgccuccggcguggcggugugcaagguccugcaccucgagggggaggugaacaagaucaagagcgcccugcuguccaccaacaaggccguggucagccucuccggcugcggggugagcgugcugacguucaagguccuggaccucaagaacuacaucgacaagcagcugcugccgauccucaacaagcaguccugcagcauccccaacaucgagaccgugaucgaguuccagcagaagaacaaccggcugcuggagaucacccgcgaguucuccgugaacgccggcgucaccacgcccgugagcaccuacaugcucaccaacuccgagcugcugagccucaucaacgacaugcccaucaccaacgaccagaagaagcugaugagcaacaacgugcagaucguccggcagcaguccuacagcaucaugugcaucaucaaggaggaggugcuggccuacgugguccagcucccgcuguacggggugaucgacacgcccugcuggaagcugcacaccagcccccucugcaccaccaacacgaaggagggcuccaacaucugccugacccgcaccgaccggggcugguacugcgacaacgcgggguccgugagcuucuucccccaggccgagaccugcaagguccaguccaaccgcguguucugcgacacgaugaacagccugacccucccguccgaggucaaccugugcaacguggacaucuucaaccccaaguacgacugcaagaucaugaccagcaagaccgacguguccagcuccgucaucacgagccugggcgccaucguguccugcuacgggaagaccaagugcaccgccagcaacaagugccggggcaucaucaagaccuucuccaacggcugcgacuacgugagcaacaagggggucgacacgguguccgugggcaacacccucuacuacgucaacaagcaggaggggcagagccuguacgugaagggcgagcccaucaucaacuucuacgacccccugguguucccgagcgacgaguucgacgccuccaucagccaggucaacgagaagaucaaccagucccucgcguucauccgcaagagcgacgagcugcugcacaacgugaacgccgggaaguccaccaccaacaucaugaucaccacgaucaucaucgugaucaucgucauccuccugagccugaucgccgugggccuccugcuguacugcaaggcccggugaggacuaguguccaccugucccuccugggcugcuggauugucucguuuuccugccaaauaaacaggaucagcgcuuuacagaucuaaaaaaaaaaaaaaaaaaaaaaaaaaaaaaaaaaaaaaaaaaaaaaaaaaaaaaaaaaaaaaaaugcaucccccccccccccccccccccccccccccccaaaggcucuuuucagagccaccagaauu

SEQ ID NO: 8080 - RNA, 1877 nt, Artificial Sequence
  mRNA product Design e-1 comprising derived and/or modified sequence from HRSV(A2)__F-del_DSCav1_mut8 (opt2)
gggagaauauaagcguuggcggagcgucgguuguagcacucugcgcgcccgcucuucugcugcuguuugucuacuuccuccugcuuccccgccgccgccgccgccaucaagcuuaccauggagcuccucauccucaaggccaacgccaucaccaccauccucaccgccgucaccuucugcuucgccuccggccagaacaucaccgaggaguucuaccaguccaccugcuccgccgucuccaagggcuaccucggcgcccuccgcaccggcugguacaccuccgucaucaccaucgagcucuccaacaucaaggagaucaagugcaacggcaccgacgccaaggucaagcucaucaagcaggagcucgacaaguacaagaacgccgucaccgaccuccagcuccucaugcaguccacccccgccaccggcuccggcuccgccaucgccuccggcgucgccgucugcaagguccuccaccucgagggcgaggucaacaagaucaaguccgcccuccucuccaccaacaaggccgucgucucccucuccggcugcggcgucuccguccucaccuucaagguccucgaccucaagaacuacaucgacaagcagcuccuccccauccucaacaagcaguccugcuccauccccaacaucgagaccgucaucgaguuccagcagaagaacaaccgccuccucgagaucacccgcgaguucuccgucaacgccggcgucaccacccccgucuccaccuacaugcucaccaacuccgagcuccucucccucaucaacgacaugcccaucaccaacgaccagaagaagcucauguccaacaacguccagaucguccgccagcaguccuacuccaucaugugcaucaucaaggaggagguccucgccuacgucguccagcucccccucuacggcgucaucgacacccccugcuggaagcuccacaccuccccccucugcaccaccaacaccaaggagggcuccaacaucugccucacccgcaccgaccgcggcugguacugcgacaacgccggcuccgucuccuucuucccccaggccgagaccugcaagguccaguccaaccgcgucuucugcgacaccaugaacucccucacccuccccuccgaggucaaccucugcaacgucgacaucuucaaccccaaguacgacugcaagaucaugaccuccaagaccgacgucuccuccuccgucaucaccucccucggcgccaucgucuccugcuacggcaagaccaagugcaccgccuccaacaagugccgcggcaucaucaagaccuucuccaacggcugcgacuacgucuccaacaagggcgucgacaccgucuccgucggcaacacccucuacuacgucaacaagcaggagggccagucccucuacgucaagggcgagcccaucaucaacuucuacgacccccucgucuuccccuccgacgaguucgacgccuccaucucccaggucaacgagaagaucaaccagucccucgccuucauccgcaaguccgacgagcuccuccacaacgucaacgccggcaaguccaccaccaacaucaugaucaccaccaucaucaucgucaucaucgucauccuccucucccucaucgccgucggccuccuccucuacugcaaggcccgcugaggacuaguguccaccugucccuccugggcugcuggauugucucguuuuccugccaaauaaacaggaucagcgcuuuacagaucuaaaaaaaaaaaaaaaaaaaaaaaaaaaaaaaaaaaaaaaaaaaaaaaaaaaaaaaaaaaaaaaaugcaucccccccccccccccccccccccccccccccaaaggcucuuuucagagccaccagaauu

SEQ ID NO: 8081 - RNA, 1877 nt, Artificial Sequence
  mRNA product Design e-1 comprising derived and/or modified sequence from HRSV(A2)__F-del_DSCav1_mut8 (opt3)
gggagaauauaagcguuggcggagcgucgguuguagcacucugcgcgcccgcucuucugcugcuguuugucuacuuccuccugcuuccccgccgccgccgccgccaucaagcuuaccauggagcugcucauccuuaaggccaacgcuauuaccacaauacugacugcagugacguucugcuuugccagcggccagaauaucaccgaagaguucuaccaauccacauguucugcggucucaaaaggguauuugggagcuuuaagaacugguugguacaccaguguuauuacaaucgaacugagcaacauuaaggagaucaaaugcaauggcaccgacgccaaggugaaacuaauaaagcaggaacucgauaaguauaaaaacgcaguaacugaccugcagcuucugaugcaguccacacccgccaccgggucuggaucggcuaucgcaucaggcguggccgucuguaagguguugcaccucgagggugagguuaauaaaauuaagagcgcucugcugaguacgaacaaagccguggucucccucucugggugcggagugagcguauuaacuuuuaagguucuggaucuuaagaauuacaucgacaaacaauugcugccuauucuaaacaagcaguccuguucaaucccaaauauagaaaccgugauugaguuccagcagaaaaacaauaggcuccuggaaaucacacgggaguuuagugucaacgcgggcgugacuaccccggugagcacauauaugcuuaccaauucugagcuguugucccucauuaacgauaugcccaucacgaaugaccaaaagaaacugaugucaaacaacguccagaucguucgccagcagagcuacaguauuaugugcauaaucaaggaagagguguuagcauauguagugcaacugccucucuacggcgucauugauacuccauguuggaaacuucauacaucuccccugugcaccacuaauacaaaggaaggguccaacaucuguuugacccgaacggaccguggaugguacugcgauaaugccgguagcgugucguucuuuccucaggcugagaccuguaagguucagucuaacagaguguucugcgacacaaugaacucccuaacucugccaucagaagucaaucucugcaauguggauauauuuaaccccaaauaugacuguaagauuaugaccaguaaaacagauguaagcuccucuguuaucacuagccugggcgccaucgugucaugcuacgggaagaccaaauguacagcaaguaauaagugcaggggaauuaucaagaccuucuccaacggcugugacuaugucagcaauaaagguguggacacugucucuguggggaacacgcuuuacuauguuaauaagcaagagggacagucacuguacgugaaaggcgagccuauuauaaacuuuuaugauccauugguauucccgagugacgaauuugaugcuagcaucucccaggucaaugagaagauuaaccagucucucgccuucauccggaaaucggacgaacuguuacacaacgugaaugcgggcaagagcacaaccaacaucaugauuacuaccauaaucauuguuaucauugugauccugcuaucccucauagccgucgggcugcuuuuguacugcaaggcacgcugaggacuaguguccaccugucccuccugggcugcuggauugucucguuuuccugccaaauaaacaggaucagcgcuuuacagaucuaaaaaaaaaaaaaaaaaaaaaaaaaaaaaaaaaaaaaaaaaaaaaaaaaaaaaaaaaaaaaaaaugcaucccccccccccccccccccccccccccccccaaaggcucuuuucagagccaccagaauu

SEQ ID NO: 8082 - RNA, 1877 nt, Artificial Sequence
  mRNA product Design e-1 comprising derived and/or modified sequence from HRSV(A2)__F-del_DSCav1_mut8 (opt4)
gggagaauauaagcguuggcggagcgucgguuguagcacucugcgcgcccgcucuucugcugcuguuugucuacuuccuccugcuuccccgccgccgccgccgccaucaagcuuaccauggagcugcugauccugaaggccaacgccaucaccaccauccugaccgccgugaccuucugcuucgccagcggccagaacaucaccgaggaguucuaccagagcaccugcagcgccgugagcaagggcuaccugggcgcccugagaaccggcugguacaccagcgugaucaccaucgagcugagcaacaucaaggagaucaagugcaacggcaccgacgccaaggugaagcugaucaagcaggagcuggacaaguacaagaacgccgugaccgaccugcagcugcugaugcagagcacccccgccaccggcagcggcagcgccaucgccagcggcguggccgugugcaaggugcugcaccuggagggcgaggugaacaagaucaagagcgcccugcugagcaccaacaaggccguggugagccugagcggcugcggcgugagcgugcugaccuucaaggugcuggaccugaagaacuacaucgacaagcagcugcugcccauccugaacaagcagagcugcagcauccccaacaucgagaccgugaucgaguuccagcagaagaacaacagacugcuggagaucaccagagaguucagcgugaacgccggcgugaccacccccgugagcaccuacaugcugaccaacagcgagcugcugagccugaucaacgacaugcccaucaccaacgaccagaagaagcugaugagcaacaacgugcagaucgugagacagcagagcuacagcaucaugugcaucaucaaggaggaggugcuggccuacguggugcagcugccccuguacggcgugaucgacacccccugcuggaagcugcacaccagcccccugugcaccaccaacaccaaggagggcagcaacaucugccugaccagaaccgacagaggcugguacugcgacaacgccggcagcgugagcuucuucccccaggccgagaccugcaaggugcagagcaacagaguguucugcgacaccaugaacagccugacccugcccagcgaggugaaccugugcaacguggacaucuucaaccccaaguacgacugcaagaucaugaccagcaagaccgacgugagcagcagcgugaucaccagccugggcgccaucgugagcugcuacggcaagaccaagugcaccgccagcaacaagugcagaggcaucaucaagaccuucagcaacggcugcgacuacgugagcaacaagggcguggacaccgugagcgugggcaacacccuguacuacgugaacaagcaggagggccagagccuguacgugaagggcgagcccaucaucaacuucuacgacccccugguguuccccagcgacgaguucgacgccagcaucagccaggugaacgagaagaucaaccagagccuggccuucaucagaaagagcgacgagcugcugcacaacgugaacgccggcaagagcaccaccaacaucaugaucaccaccaucaucaucgugaucaucgugauccugcugagccugaucgccgugggccugcugcuguacugcaaggccagaugaggacuaguguccaccugucccuccugggcugcuggauugucucguuuuccugccaaauaaacaggaucagcgcuuuacagaucuaaaaaaaaaaaaaaaaaaaaaaaaaaaaaaaaaaaaaaaaaaaaaaaaaaaaaaaaaaaaaaaaugcaucccccccccccccccccccccccccccccccaaaggcucuuuucagagccaccagaauu

SEQ ID NO: 8083 - RNA, 1877 nt, Artificial Sequence
  mRNA product Design e-1 comprising derived and/or modified sequence from HRSV(A2)__F-del_DSCav1_mut8 (opt5)
gggagaauauaagcguuggcggagcgucgguuguagcacucugcgcgcccgcucuucugcugcuguuugucuacuuccuccugcuuccccgccgccgccgccgccaucaagcuuaccauggagcugcucauccugaaggccaacgcuauuaccacaauccuuacggccgugaccuucugcuuugcgagcggccagaauauuacagaagaguucuaccaauccaccuguucugcugucagcaaaggguaucugggagcccucagaacaggcugguacaccuccguuaucacaauugaacugucuaacaucaaggagaucaaaugcaaugggaccgacgccaaggugaaacuuauuaagcaggaacuggauaaguauaaaaacgcugugacggaccuccagcugcugaugcagagcacccccgccacaggauccggcucugcuaucgccagcggggucgcgguguguaagguucuccaccuggagggagaggugaauaaaauuaaguccgcccuucugagcaccaacaaagcugucgugucucucuccggcugcggcguuagcgugcugacauuuaagguccuugaucugaagaauuacaucgacaaacaacuccugccuauucugaacaagcagucuuguuccaucccgaauauugaaaccgugaucgaguuccagcagaaaaacaaucggcuccuggaaaucacgcgcgaguuuagcgugaacgccggggucacaacccccguuucuacauauaugcuuaccaauuccgagcugcucagccugauuaacgauaugccuaucaccaaugaccaaaagaaacuuauguccaacaacgugcagauugugagacagcagucuuacagcaucaugugcauuaucaaggaagagguccuggcuuaugugguucaacucccccuguacggagugaucgauacaccuuguuggaaacugcauacgagcccccucugcaccacaaauaccaaggaaggcagcaacauuugucugacacggaccgaccgcgggugguacugcgauaaugccggaucugucuccuucuuuccucaggcggagacguguaaggugcagagcaacagaguuuucugcgacacaaugaacucucuuacccugccgagcgaagugaaucucugcaaugucgauaucuuuaaccccaaauaugacuguaagauuaugaccuccaaaacagaugugucuagcuccgucaucaccagccugggcgccauugugucuugcuacgggaagacaaaauguacggcuuccaauaagugccggggaaucaucaagaccuucagcaacggcugugacuauguuucuaauaaaggcguggacacagucuccguggggaacacccuuuacuauguuaauaagcaagagggacagagccuguacgugaaaggcgagccuauuaucaacuuuuaugauccccucgucuucccuuccgacgaauuugaugccucuauuagccaggugaaugagaagaucaaccagucccuggcuuucauucgcaaaucugacgaacugcuccacaacgugaaugccgggaaguccacaaccaacaucaugauuacgaccaucaucauuguuaucauugucauccugcuuucccugauugccgugggacuccugcuguacugcaaggcuagaugaggacuaguguccaccugucccuccugggcugcuggauugucucguuuuccugccaaauaaacaggaucagcgcuuuacagaucuaaaaaaaaaaaaaaaaaaaaaaaaaaaaaaaaaaaaaaaaaaaaaaaaaaaaaaaaaaaaaaaaugcaucccccccccccccccccccccccccccccccaaaggcucuuuucagagccaccagaauu

SEQ ID NO: 8084 - RNA, 1877 nt, Artificial Sequence
  mRNA product Design e-1 comprising derived and/or modified sequence from HRSV(A2)__F-del_DSCav1_mut8 (opt6)
gggagaauauaagcguuggcggagcgucgguuguagcacucugcgcgcccgcucuucugcugcuguuugucuacuuccuccugcuuccccgccgccgccgccgccaucaagcuuaccauggaacuacucauauugaaagccaacgcaaucacaacaauacuaaccgccguaacauuuugcuucgcgucaggccaaaauauaacagaagaauuuuaccaaucaacaugcuccgccguaucaaaaggauaccuaggugcauuacgaaccgguugguacacaucaguaaucacaauagaacuuuccaacauuaaagaaauaaaaugcaauggcacagacgcaaaagucaaacuaauaaaacaagaacuagacaaauauaaaaacgccgucacagacuuacaacuauuaaugcaaagcacaccagcaacaggauccggaucagcaauagcaucaggaguagccgucuguaaaguacuacaccuagaaggcgaaguuaauaaaauuaaaucagcuuuauuaucaaccaacaaagcaguaguaucacuauccggaugcggagucuccguccuaacauucaaaguacuagaccucaagaauuacauagauaaacaacuacuaccaauacucaacaaacaaucauguucaauaccaaacaucgaaaccgucauagaauuucaacaaaaaaauaauagacucuuagaaauaacacgagaauuuagcguaaacgcaggagucacaaccccugucucaacauacaugcuaaccaauuccgaauuauuaucacucauaaaugacaugccaauaacuaaugaccaaaaaaaacuuaugucaaacaacguacaaauaguaagacaacaaucauauucaauaaugugcauaaucaaagaagaaguuuuagcauauguaguacaacuaccacuauauggcgucauagacacaccaugcuggaaauuacacacaucaccucuaugcacaacaaacacaaaagaaggaagcaacauuugccuaaccagaaccgauagaggaugguacugcgauaacgcaggcucaguaucauucuucccucaagccgaaacuugcaaaguccaaucaaauagagucuucugcgauacaaugaacuccuuaacuuuaccaucagaaguaaaucuaugcaacguagauaucuuuaauccaaaauacgauugcaaaaucaugacaucaaaaacagauguaucaucuaguguaauuaccucccuaggagcaauaguaagcugcuacggaaaaacaaaaugcaccgccucuaacaaaugucguggaauaauaaaaacauucucaaacggaugcgauuauguaucaaauaaaggugucgacaccguaucaguaggcaauacacuauacuauguaaauaaacaagaaggacaaucacucuacgucaaaggugaaccaauaauaaacuucuacgacccacuuguauucccaagcgacgaauuugacgcaucaauaagccaaguaaacgaaaaaauaaaccaaucacuagcauucaucagaaaaucagacgaacuacuccacaauguaaaugcaggaaaaucaacaaccaauaucaugauaacaaccauaauaauagucauaauaguaauacuauuaucccucauagccguuggacuacuccuauauuguaaagcacgauaaggacuaguguccaccugucccuccugggcugcuggauugucucguuuuccugccaaauaaacaggaucagcgcuuuacagaucuaaaaaaaaaaaaaaaaaaaaaaaaaaaaaaaaaaaaaaaaaaaaaaaaaaaaaaaaaaaaaaaaugcaucccccccccccccccccccccccccccccccaaaggcucuuuucagagccaccagaauu

SEQ ID NO: 8085 - RNA, 1877 nt, Artificial Sequence
  mRNA product Design e-1 comprising derived and/or modified sequence from HRSV(A2)__F-del_DSCav1_mut8 (opt11)
gggagaauauaagcguuggcggagcgucgguuguagcacucugcgcgcccgcucuucugcugcuguuugucuacuuccuccugcuuccccgccgccgccgccgccaucaagcuuaccauggaacuccucauccucaaagccaacgccaucaccaccauacucaccgcaguaaccuucugcuucgcauccggccaaaacaucacagaagaguucuaccagaguaccugcuccgccgucuccaaaggcuaccuuggcgcccuccguaccgggugguacacauccgucaucacaaucgaacucuccaacaucaaagaaauaaagugcaacggcacagacgccaaaguaaaacugauaaagcaagaacucgacaaauacaaaaacgccguaaccgaccuccagcuacuaaugcaauccacucccgccaccggcagcggauccgccaucgccuccggaguagccgucuguaaagucuuacaccucgaaggcgaagugaacaaaaucaaauccgcccuacucucaaccaacaaagccguaguaucacucuccgggugcggcguuucagugcuaacguucaaaguccuugaccucaaaaacuacaucgacaaacaacuccuccccauccuaaauaaacaauccugcuccauacccaacaucgagacugucaucgaguuccagcagaaaaacaaccgacuccucgaaaucacacgcgaguucucugucaacgccggcgucacaacccccgucuccacauacaugcucaccaacagcgaacuccucucccuaaucaaugacaugcccaucaccaacgaccaaaagaaacucaugucaaacaacguccaaaucguccgccaacaauccuacagcaucaugugcaucaucaaagaagaaguucucgcauacguaguacaacucccccucuacggagugaucgacacccccugcuggaaacuacacaccagcccgcuuugcaccacaaacaccaaggaaggcuccaacaucugccucacucgaaccgaccgcggcugguacugcgacaacgcaggcuccgucaguuucuuuccccaagcagaaacaugcaaaguccaauccaaccgaguauucugcgacaccaugaacucccucacccuaccauccgaaguuaaccuaugcaacguggacaucuucaaccccaaguacgacugcaaaauuaugaccuccaaaaccgacguauccuccagcgucaucaccagccucggagcaauagucuccugcuacggcaagaccaagugcaccgcuuccaacaagugucgcggaaucaucaaaaccuucucaaacggcugcgacuacgucuccaacaaaggcgucgacaccguauccguaggaaacacccuauacuacgucaacaaacaagaaggacaaucccucuaugucaaaggcgaacccaucaucaauuucuacgacccccuagucuucccuuccgacgaguucgacgcguccaucagccaagucaaugaaaagaucaaccagagccuggcauucauccgcaaauccgacgaacuccuccacaacgucaacgcgggaaaauccacgacaaacaucaugaucaccaccaucaucaucgucaucauagucauucuccuuucucucaucgccgugggacuacuucucuacugcaaagcccgauaaggacuaguguccaccugucccuccugggcugcuggauugucucguuuuccugccaaauaaacaggaucagcgcuuuacagaucuaaaaaaaaaaaaaaaaaaaaaaaaaaaaaaaaaaaaaaaaaaaaaaaaaaaaaaaaaaaaaaaaugcaucccccccccccccccccccccccccccccccaaaggcucuuuucagagccaccagaauu

SEQ ID NO: 8086 - RNA, 1859 nt, Artificial Sequence
  mRNA product Design e-2 comprising derived and/or modified sequence from HRSV(A2)__F-del_DSCav1_mut8 (opt1)
gggagacccgugacccggaaguuguacggcuacgcgacuuucccucccacaaacccucgcgcccuuccuuuccuacuugggcccggcagaaagcuuaccauggagcugcucauccugaaggccaacgccaucaccaccauccugacggcggugaccuucugcuucgccagcggccagaacaucaccgaggaguucuaccaguccacgugcagcgccgucuccaagggguaccucggcgcccugcggaccggcugguacaccuccgugaucaccaucgagcugagcaacaucaaggagaucaagugcaacgggaccgacgccaaggugaagcucaucaagcaggagcuggacaaguacaagaacgcggucacggaccugcagcuccugaugcaguccaccccggcaaccggcuccggcuccgccaucgcgagcggcgucgccgugugcaaggugcugcaccucgagggggaggucaacaagaucaagagcgcccugcuguccaccaacaaggccguggugagccucuccggcugcggcgucagcgugcugaccuucaaggugcuggaccucaagaacuacaucgacaagcagcugcugcccauccugaacaagcagagcugcuccauccccaacaucgagacggugaucgaguuccagcagaagaacaaccggcuccuggagaucacccgcgaguucagcgugaacgccggggucaccacccccguguccacguacaugcugaccaacagcgagcuccugucccugaucaacgacaugccgaucaccaacgaccagaagaagcucaugagcaacaacgugcagaucguccggcagcaguccuacagcaucaugugcaucaucaaggaggaggugcuggcguacgugguccagcugccccucuacggcgugaucgacacccccugcuggaagcugcacacgagcccccugugcaccaccaacaccaaggagggguccaacaucugccucacgcgcaccgaccggggcugguacugcgacaacgccggcagcgucuccuucuucccgcaggccgagaccugcaaggugcagagcaaccgcguguucugcgacaccaugaacucccugacgcugcccagcgagguaaaccucugcaacgucgacaucuucaaccccaaguacgacugcaagaucaugaccuccaagaccgacgugagcuccagcgugaucaccucccugggggccaucgucagcugcuacggcaagacgaagugcaccgccagcaacaagugccgggggaucaucaagaccuucuccaacggcugcgacuacgugagcaacaagggcguggacaccguguccgucgggaacacccuguacuacgugaacaagcaggagggccagagccucuacgugaagggggagcccaucaucaacuucuacgacccgcuggucuuccccuccgacgaguucgacgcgagcaucucccaggugaacgagaagaucaaccagagccuggccuucauccgcaaguccgacgagcugcuccacaacgugaacgccggcaagagcacgaccaacaucaugaucaccaccaucaucaucgucaucaucgugauccugcugucccucaucgccguggggcugcugcucuacugcaaggcccggugaggacuaguguccaccugucccuccugggcugcuggauugucucguuuuccugccaaauaaacaggaucagcgcuuuacagaucuaaaaaaaaaaaaaaaaaaaaaaaaaaaaaaaaaaaaaaaaaaaaaaaaaaaaaaaaaaaaaaaaugcaucccccccccccccccccccccccccccccccaaaggcucuuuucagagccaccagaauu

SEQ ID NO: 8087 - RNA, 1859 nt, Artificial Sequence
  mRNA product Design e-2 comprising derived and/or modified sequence from HRSV(A2)__F-del_DSCav1_mut8 (opt1)
gggagacccgugacccggaaguuguacggcuacgcgacuuucccucccacaaacccucgcgcccuuccuuuccuacuugggcccggcagaaagcuuaccauggagcugcucauccugaaggccaacgccaucaccaccauccugacggcggugaccuucugcuucgccagcggccagaacaucaccgaggaguucuaccaguccacgugcagcgccgucuccaagggguaccucggcgcccugcgcaccgggugguacaccagcgugaucaccaucgagcuguccaacaucaaggagaucaagugcaacggcaccgacgccaaggugaagcucaucaagcaggagcuggacaaguacaagaacgcggucacggaccugcagcuccugaugcagagcacccccgccaccggguccggcagcgccaucgccuccggcguggcggugugcaagguccugcaccucgagggggaggugaacaagaucaagagcgcccugcuguccaccaacaaggccguggucagccucuccggcugcggggugagcgugcugacguucaagguccuggaccucaagaacuacaucgacaagcagcugcugccgauccucaacaagcaguccugcagcauccccaacaucgagaccgugaucgaguuccagcagaagaacaaccggcugcuggagaucacccgcgaguucuccgugaacgccggcgucaccacgcccgugagcaccuacaugcucaccaacuccgagcugcugagccucaucaacgacaugcccaucaccaacgaccagaagaagcugaugagcaacaacgugcagaucguccggcagcaguccuacagcaucaugugcaucaucaaggaggaggugcuggccuacgugguccagcucccgcuguacggggugaucgacacgcccugcuggaagcugcacaccagcccccucugcaccaccaacacgaaggagggcuccaacaucugccugacccgcaccgaccggggcugguacugcgacaacgcgggguccgugagcuucuucccccaggccgagaccugcaagguccaguccaaccgcguguucugcgacacgaugaacagccugacccucccguccgaggucaaccugugcaacguggacaucuucaaccccaaguacgacugcaagaucaugaccagcaagaccgacguguccagcuccgucaucacgagccugggcgccaucguguccugcuacgggaagaccaagugcaccgccagcaacaagugccggggcaucaucaagaccuucuccaacggcugcgacuacgugagcaacaagggggucgacacgguguccgugggcaacacccucuacuacgucaacaagcaggaggggcagagccuguacgugaagggcgagcccaucaucaacuucuacgacccccugguguucccgagcgacgaguucgacgccuccaucagccaggucaacgagaagaucaaccagucccucgcguucauccgcaagagcgacgagcugcugcacaacgugaacgccgggaaguccaccaccaacaucaugaucaccacgaucaucaucgugaucaucgucauccuccugagccugaucgccgugggccuccugcuguacugcaaggcccggugaggacuaguguccaccugucccuccugggcugcuggauugucucguuuuccugccaaauaaacaggaucagcgcuuuacagaucuaaaaaaaaaaaaaaaaaaaaaaaaaaaaaaaaaaaaaaaaaaaaaaaaaaaaaaaaaaaaaaaaugcaucccccccccccccccccccccccccccccccaaaggcucuuuucagagccaccagaauu

SEQ ID NO: 8088 - RNA, 1859 nt, Artificial Sequence
  mRNA product Design e-2 comprising derived and/or modified sequence from HRSV(A2)__F-del_DSCav1_mut8 (opt2)
gggagacccgugacccggaaguuguacggcuacgcgacuuucccucccacaaacccucgcgcccuuccuuuccuacuugggcccggcagaaagcuuaccauggagcuccucauccucaaggccaacgccaucaccaccauccucaccgccgucaccuucugcuucgccuccggccagaacaucaccgaggaguucuaccaguccaccugcuccgccgucuccaagggcuaccucggcgcccuccgcaccggcugguacaccuccgucaucaccaucgagcucuccaacaucaaggagaucaagugcaacggcaccgacgccaaggucaagcucaucaagcaggagcucgacaaguacaagaacgccgucaccgaccuccagcuccucaugcaguccacccccgccaccggcuccggcuccgccaucgccuccggcgucgccgucugcaagguccuccaccucgagggcgaggucaacaagaucaaguccgcccuccucuccaccaacaaggccgucgucucccucuccggcugcggcgucuccguccucaccuucaagguccucgaccucaagaacuacaucgacaagcagcuccuccccauccucaacaagcaguccugcuccauccccaacaucgagaccgucaucgaguuccagcagaagaacaaccgccuccucgagaucacccgcgaguucuccgucaacgccggcgucaccacccccgucuccaccuacaugcucaccaacuccgagcuccucucccucaucaacgacaugcccaucaccaacgaccagaagaagcucauguccaacaacguccagaucguccgccagcaguccuacuccaucaugugcaucaucaaggaggagguccucgccuacgucguccagcucccccucuacggcgucaucgacacccccugcuggaagcuccacaccuccccccucugcaccaccaacaccaaggagggcuccaacaucugccucacccgcaccgaccgcggcugguacugcgacaacgccggcuccgucuccuucuucccccaggccgagaccugcaagguccaguccaaccgcgucuucugcgacaccaugaacucccucacccuccccuccgaggucaaccucugcaacgucgacaucuucaaccccaaguacgacugcaagaucaugaccuccaagaccgacgucuccuccuccgucaucaccucccucggcgccaucgucuccugcuacggcaagaccaagugcaccgccuccaacaagugccgcggcaucaucaagaccuucuccaacggcugcgacuacgucuccaacaagggcgucgacaccgucuccgucggcaacacccucuacuacgucaacaagcaggagggccagucccucuacgucaagggcgagcccaucaucaacuucuacgacccccucgucuuccccuccgacgaguucgacgccuccaucucccaggucaacgagaagaucaaccagucccucgccuucauccgcaaguccgacgagcuccuccacaacgucaacgccggcaaguccaccaccaacaucaugaucaccaccaucaucaucgucaucaucgucauccuccucucccucaucgccgucggccuccuccucuacugcaaggcccgcugaggacuaguguccaccugucccuccugggcugcuggauugucucguuuuccugccaaauaaacaggaucagcgcuuuacagaucuaaaaaaaaaaaaaaaaaaaaaaaaaaaaaaaaaaaaaaaaaaaaaaaaaaaaaaaaaaaaaaaaugcaucccccccccccccccccccccccccccccccaaaggcucuuuucagagccaccagaauu

SEQ ID NO: 8089 - RNA, 1859 nt, Artificial Sequence
  mRNA product Design e-2 comprising derived and/or modified sequence from HRSV(A2)__F-del_DSCav1_mut8 (opt3)
gggagacccgugacccggaaguuguacggcuacgcgacuuucccucccacaaacccucgcgcccuuccuuuccuacuugggcccggcagaaagcuuaccauggagcugcucauccuuaaggccaacgcuauuaccacaauacugacugcagugacguucugcuuugccagcggccagaauaucaccgaagaguucuaccaauccacauguucugcggucucaaaaggguauuugggagcuuuaagaacugguugguacaccaguguuauuacaaucgaacugagcaacauuaaggagaucaaaugcaauggcaccgacgccaaggugaaacuaauaaagcaggaacucgauaaguauaaaaacgcaguaacugaccugcagcuucugaugcaguccacacccgccaccgggucuggaucggcuaucgcaucaggcguggccgucuguaagguguugcaccucgagggugagguuaauaaaauuaagagcgcucugcugaguacgaacaaagccguggucucccucucugggugcggagugagcguauuaacuuuuaagguucuggaucuuaagaauuacaucgacaaacaauugcugccuauucuaaacaagcaguccuguucaaucccaaauauagaaaccgugauugaguuccagcagaaaaacaauaggcuccuggaaaucacacgggaguuuagugucaacgcgggcgugacuaccccggugagcacauauaugcuuaccaauucugagcuguugucccucauuaacgauaugcccaucacgaaugaccaaaagaaacugaugucaaacaacguccagaucguucgccagcagagcuacaguauuaugugcauaaucaaggaagagguguuagcauauguagugcaacugccucucuacggcgucauugauacuccauguuggaaacuucauacaucuccccugugcaccacuaauacaaaggaaggguccaacaucuguuugacccgaacggaccguggaugguacugcgauaaugccgguagcgugucguucuuuccucaggcugagaccuguaagguucagucuaacagaguguucugcgacacaaugaacucccuaacucugccaucagaagucaaucucugcaauguggauauauuuaaccccaaauaugacuguaagauuaugaccaguaaaacagauguaagcuccucuguuaucacuagccugggcgccaucgugucaugcuacgggaagaccaaauguacagcaaguaauaagugcaggggaauuaucaagaccuucuccaacggcugugacuaugucagcaauaaagguguggacacugucucuguggggaacacgcuuuacuauguuaauaagcaagagggacagucacuguacgugaaaggcgagccuauuauaaacuuuuaugauccauugguauucccgagugacgaauuugaugcuagcaucucccaggucaaugagaagauuaaccagucucucgccuucauccggaaaucggacgaacuguuacacaacgugaaugcgggcaagagcacaaccaacaucaugauuacuaccauaaucauuguuaucauugugauccugcuaucccucauagccgucgggcugcuuuuguacugcaaggcacgcugaggacuaguguccaccugucccuccugggcugcuggauugucucguuuuccugccaaauaaacaggaucagcgcuuuacagaucuaaaaaaaaaaaaaaaaaaaaaaaaaaaaaaaaaaaaaaaaaaaaaaaaaaaaaaaaaaaaaaaaugcaucccccccccccccccccccccccccccccccaaaggcucuuuucagagccaccagaauu

SEQ ID NO: 8090 - RNA, 1859 nt, Artificial Sequence
  mRNA product Design e-2 comprising derived and/or modified sequence from HRSV(A2)__F-del_DSCav1_mut8 (opt4)
gggagacccgugacccggaaguuguacggcuacgcgacuuucccucccacaaacccucgcgcccuuccuuuccuacuugggcccggcagaaagcuuaccauggagcugcugauccugaaggccaacgccaucaccaccauccugaccgccgugaccuucugcuucgccagcggccagaacaucaccgaggaguucuaccagagcaccugcagcgccgugagcaagggcuaccugggcgcccugagaaccggcugguacaccagcgugaucaccaucgagcugagcaacaucaaggagaucaagugcaacggcaccgacgccaaggugaagcugaucaagcaggagcuggacaaguacaagaacgccgugaccgaccugcagcugcugaugcagagcacccccgccaccggcagcggcagcgccaucgccagcggcguggccgugugcaaggugcugcaccuggagggcgaggugaacaagaucaagagcgcccugcugagcaccaacaaggccguggugagccugagcggcugcggcgugagcgugcugaccuucaaggugcuggaccugaagaacuacaucgacaagcagcugcugcccauccugaacaagcagagcugcagcauccccaacaucgagaccgugaucgaguuccagcagaagaacaacagacugcuggagaucaccagagaguucagcgugaacgccggcgugaccacccccgugagcaccuacaugcugaccaacagcgagcugcugagccugaucaacgacaugcccaucaccaacgaccagaagaagcugaugagcaacaacgugcagaucgugagacagcagagcuacagcaucaugugcaucaucaaggaggaggugcuggccuacguggugcagcugccccuguacggcgugaucgacacccccugcuggaagcugcacaccagcccccugugcaccaccaacaccaaggagggcagcaacaucugccugaccagaaccgacagaggcugguacugcgacaacgccggcagcgugagcuucuucccccaggccgagaccugcaaggugcagagcaacagaguguucugcgacaccaugaacagccugacccugcccagcgaggugaaccugugcaacguggacaucuucaaccccaaguacgacugcaagaucaugaccagcaagaccgacgugagcagcagcgugaucaccagccugggcgccaucgugagcugcuacggcaagaccaagugcaccgccagcaacaagugcagaggcaucaucaagaccuucagcaacggcugcgacuacgugagcaacaagggcguggacaccgugagcgugggcaacacccuguacuacgugaacaagcaggagggccagagccuguacgugaagggcgagcccaucaucaacuucuacgacccccugguguuccccagcgacgaguucgacgccagcaucagccaggugaacgagaagaucaaccagagccuggccuucaucagaaagagcgacgagcugcugcacaacgugaacgccggcaagagcaccaccaacaucaugaucaccaccaucaucaucgugaucaucgugauccugcugagccugaucgccgugggccugcugcuguacugcaaggccagaugaggacuaguguccaccugucccuccugggcugcuggauugucucguuuuccugccaaauaaacaggaucagcgcuuuacagaucuaaaaaaaaaaaaaaaaaaaaaaaaaaaaaaaaaaaaaaaaaaaaaaaaaaaaaaaaaaaaaaaaugcaucccccccccccccccccccccccccccccccaaaggcucuuuucagagccaccagaauu

SEQ ID NO: 8091 - RNA, 1859 nt, Artificial Sequence
  mRNA product Design e-2 comprising derived and/or modified sequence from HRSV(A2)__F-del_DSCav1_mut8 (opt5)
gggagacccgugacccggaaguuguacggcuacgcgacuuucccucccacaaacccucgcgcccuuccuuuccuacuugggcccggcagaaagcuuaccauggagcugcucauccugaaggccaacgcuauuaccacaauccuuacggccgugaccuucugcuuugcgagcggccagaauauuacagaagaguucuaccaauccaccuguucugcugucagcaaaggguaucugggagcccucagaacaggcugguacaccuccguuaucacaauugaacugucuaacaucaaggagaucaaaugcaaugggaccgacgccaaggugaaacuuauuaagcaggaacuggauaaguauaaaaacgcugugacggaccuccagcugcugaugcagagcacccccgccacaggauccggcucugcuaucgccagcggggucgcgguguguaagguucuccaccuggagggagaggugaauaaaauuaaguccgcccuucugagcaccaacaaagcugucgugucucucuccggcugcggcguuagcgugcugacauuuaagguccuugaucugaagaauuacaucgacaaacaacuccugccuauucugaacaagcagucuuguuccaucccgaauauugaaaccgugaucgaguuccagcagaaaaacaaucggcuccuggaaaucacgcgcgaguuuagcgugaacgccggggucacaacccccguuucuacauauaugcuuaccaauuccgagcugcucagccugauuaacgauaugccuaucaccaaugaccaaaagaaacuuauguccaacaacgugcagauugugagacagcagucuuacagcaucaugugcauuaucaaggaagagguccuggcuuaugugguucaacucccccuguacggagugaucgauacaccuuguuggaaacugcauacgagcccccucugcaccacaaauaccaaggaaggcagcaacauuugucugacacggaccgaccgcgggugguacugcgauaaugccggaucugucuccuucuuuccucaggcggagacguguaaggugcagagcaacagaguuuucugcgacacaaugaacucucuuacccugccgagcgaagugaaucucugcaaugucgauaucuuuaaccccaaauaugacuguaagauuaugaccuccaaaacagaugugucuagcuccgucaucaccagccugggcgccauugugucuugcuacgggaagacaaaauguacggcuuccaauaagugccggggaaucaucaagaccuucagcaacggcugugacuauguuucuaauaaaggcguggacacagucuccguggggaacacccuuuacuauguuaauaagcaagagggacagagccuguacgugaaaggcgagccuauuaucaacuuuuaugauccccucgucuucccuuccgacgaauuugaugccucuauuagccaggugaaugagaagaucaaccagucccuggcuuucauucgcaaaucugacgaacugcuccacaacgugaaugccgggaaguccacaaccaacaucaugauuacgaccaucaucauuguuaucauugucauccugcuuucccugauugccgugggacuccugcuguacugcaaggcuagaugaggacuaguguccaccugucccuccugggcugcuggauugucucguuuuccugccaaauaaacaggaucagcgcuuuacagaucuaaaaaaaaaaaaaaaaaaaaaaaaaaaaaaaaaaaaaaaaaaaaaaaaaaaaaaaaaaaaaaaaugcaucccccccccccccccccccccccccccccccaaaggcucuuuucagagccaccagaauu

SEQ ID NO: 8092 - RNA, 1859 nt, Artificial Sequence
  mRNA product Design e-2 comprising derived and/or modified sequence from HRSV(A2)__F-del_DSCav1_mut8 (opt6)
gggagacccgugacccggaaguuguacggcuacgcgacuuucccucccacaaacccucgcgcccuuccuuuccuacuugggcccggcagaaagcuuaccauggaacuacucauauugaaagccaacgcaaucacaacaauacuaaccgccguaacauuuugcuucgcgucaggccaaaauauaacagaagaauuuuaccaaucaacaugcuccgccguaucaaaaggauaccuaggugcauuacgaaccgguugguacacaucaguaaucacaauagaacuuuccaacauuaaagaaauaaaaugcaauggcacagacgcaaaagucaaacuaauaaaacaagaacuagacaaauauaaaaacgccgucacagacuuacaacuauuaaugcaaagcacaccagcaacaggauccggaucagcaauagcaucaggaguagccgucuguaaaguacuacaccuagaaggcgaaguuaauaaaauuaaaucagcuuuauuaucaaccaacaaagcaguaguaucacuauccggaugcggagucuccguccuaacauucaaaguacuagaccucaagaauuacauagauaaacaacuacuaccaauacucaacaaacaaucauguucaauaccaaacaucgaaaccgucauagaauuucaacaaaaaaauaauagacucuuagaaauaacacgagaauuuagcguaaacgcaggagucacaaccccugucucaacauacaugcuaaccaauuccgaauuauuaucacucauaaaugacaugccaauaacuaaugaccaaaaaaaacuuaugucaaacaacguacaaauaguaagacaacaaucauauucaauaaugugcauaaucaaagaagaaguuuuagcauauguaguacaacuaccacuauauggcgucauagacacaccaugcuggaaauuacacacaucaccucuaugcacaacaaacacaaaagaaggaagcaacauuugccuaaccagaaccgauagaggaugguacugcgauaacgcaggcucaguaucauucuucccucaagccgaaacuugcaaaguccaaucaaauagagucuucugcgauacaaugaacuccuuaacuuuaccaucagaaguaaaucuaugcaacguagauaucuuuaauccaaaauacgauugcaaaaucaugacaucaaaaacagauguaucaucuaguguaauuaccucccuaggagcaauaguaagcugcuacggaaaaacaaaaugcaccgccucuaacaaaugucguggaauaauaaaaacauucucaaacggaugcgauuauguaucaaauaaaggugucgacaccguaucaguaggcaauacacuauacuauguaaauaaacaagaaggacaaucacucuacgucaaaggugaaccaauaauaaacuucuacgacccacuuguauucccaagcgacgaauuugacgcaucaauaagccaaguaaacgaaaaaauaaaccaaucacuagcauucaucagaaaaucagacgaacuacuccacaauguaaaugcaggaaaaucaacaaccaauaucaugauaacaaccauaauaauagucauaauaguaauacuauuaucccucauagccguuggacuacuccuauauuguaaagcacgauaaggacuaguguccaccugucccuccugggcugcuggauugucucguuuuccugccaaauaaacaggaucagcgcuuuacagaucuaaaaaaaaaaaaaaaaaaaaaaaaaaaaaaaaaaaaaaaaaaaaaaaaaaaaaaaaaaaaaaaaugcaucccccccccccccccccccccccccccccccaaaggcucuuuucagagccaccagaauu

SEQ ID NO: 8093 - RNA, 1859 nt, Artificial Sequence
  mRNA product Design e-2 comprising derived and/or modified sequence from HRSV(A2)__F-del_DSCav1_mut8 (opt11)
gggagacccgugacccggaaguuguacggcuacgcgacuuucccucccacaaacccucgcgcccuuccuuuccuacuugggcccggcagaaagcuuaccauggaacuccucauccucaaagccaacgccaucaccaccauacucaccgcaguaaccuucugcuucgcauccggccaaaacaucacagaagaguucuaccagaguaccugcuccgccgucuccaaaggcuaccuuggcgcccuccguaccgggugguacacauccgucaucacaaucgaacucuccaacaucaaagaaauaaagugcaacggcacagacgccaaaguaaaacugauaaagcaagaacucgacaaauacaaaaacgccguaaccgaccuccagcuacuaaugcaauccacucccgccaccggcagcggauccgccaucgccuccggaguagccgucuguaaagucuuacaccucgaaggcgaagugaacaaaaucaaauccgcccuacucucaaccaacaaagccguaguaucacucuccgggugcggcguuucagugcuaacguucaaaguccuugaccucaaaaacuacaucgacaaacaacuccuccccauccuaaauaaacaauccugcuccauacccaacaucgagacugucaucgaguuccagcagaaaaacaaccgacuccucgaaaucacacgcgaguucucugucaacgccggcgucacaacccccgucuccacauacaugcucaccaacagcgaacuccucucccuaaucaaugacaugcccaucaccaacgaccaaaagaaacucaugucaaacaacguccaaaucguccgccaacaauccuacagcaucaugugcaucaucaaagaagaaguucucgcauacguaguacaacucccccucuacggagugaucgacacccccugcuggaaacuacacaccagcccgcuuugcaccacaaacaccaaggaaggcuccaacaucugccucacucgaaccgaccgcggcugguacugcgacaacgcaggcuccgucaguuucuuuccccaagcagaaacaugcaaaguccaauccaaccgaguauucugcgacaccaugaacucccucacccuaccauccgaaguuaaccuaugcaacguggacaucuucaaccccaaguacgacugcaaaauuaugaccuccaaaaccgacguauccuccagcgucaucaccagccucggagcaauagucuccugcuacggcaagaccaagugcaccgcuuccaacaagugucgcggaaucaucaaaaccuucucaaacggcugcgacuacgucuccaacaaaggcgucgacaccguauccguaggaaacacccuauacuacgucaacaaacaagaaggacaaucccucuaugucaaaggcgaacccaucaucaauuucuacgacccccuagucuucccuuccgacgaguucgacgcguccaucagccaagucaaugaaaagaucaaccagagccuggcauucauccgcaaauccgacgaacuccuccacaacgucaacgcgggaaaauccacgacaaacaucaugaucaccaccaucaucaucgucaucauagucauucuccuuucucucaucgccgugggacuacuucucuacugcaaagcccgauaaggacuaguguccaccugucccuccugggcugcuggauugucucguuuuccugccaaauaaacaggaucagcgcuuuacagaucuaaaaaaaaaaaaaaaaaaaaaaaaaaaaaaaaaaaaaaaaaaaaaaaaaaaaaaaaaaaaaaaaugcaucccccccccccccccccccccccccccccccaaaggcucuuuucagagccaccagaauu

SEQ ID NO: 8094 - RNA, 1829 nt, Artificial Sequence
  mRNA product Design e-3 comprising derived and/or modified sequence from HRSV(A2)__F-del_DSCav1_mut8 (opt1)
gggagacuuucccauucuguagcagaauuugguguugccuguggucuuggucccgcggagaagcuuaccauggagcugcucauccugaaggccaacgccaucaccaccauccugacggcggugaccuucugcuucgccagcggccagaacaucaccgaggaguucuaccaguccacgugcagcgccgucuccaagggguaccucggcgcccugcggaccggcugguacaccuccgugaucaccaucgagcugagcaacaucaaggagaucaagugcaacgggaccgacgccaaggugaagcucaucaagcaggagcuggacaaguacaagaacgcggucacggaccugcagcuccugaugcaguccaccccggcaaccggcuccggcuccgccaucgcgagcggcgucgccgugugcaaggugcugcaccucgagggggaggucaacaagaucaagagcgcccugcuguccaccaacaaggccguggugagccucuccggcugcggcgucagcgugcugaccuucaaggugcuggaccucaagaacuacaucgacaagcagcugcugcccauccugaacaagcagagcugcuccauccccaacaucgagacggugaucgaguuccagcagaagaacaaccggcuccuggagaucacccgcgaguucagcgugaacgccggggucaccacccccguguccacguacaugcugaccaacagcgagcuccugucccugaucaacgacaugccgaucaccaacgaccagaagaagcucaugagcaacaacgugcagaucguccggcagcaguccuacagcaucaugugcaucaucaaggaggaggugcuggcguacgugguccagcugccccucuacggcgugaucgacacccccugcuggaagcugcacacgagcccccugugcaccaccaacaccaaggagggguccaacaucugccucacgcgcaccgaccggggcugguacugcgacaacgccggcagcgucuccuucuucccgcaggccgagaccugcaaggugcagagcaaccgcguguucugcgacaccaugaacucccugacgcugcccagcgagguaaaccucugcaacgucgacaucuucaaccccaaguacgacugcaagaucaugaccuccaagaccgacgugagcuccagcgugaucaccucccugggggccaucgucagcugcuacggcaagacgaagugcaccgccagcaacaagugccgggggaucaucaagaccuucuccaacggcugcgacuacgugagcaacaagggcguggacaccguguccgucgggaacacccuguacuacgugaacaagcaggagggccagagccucuacgugaagggggagcccaucaucaacuucuacgacccgcuggucuuccccuccgacgaguucgacgcgagcaucucccaggugaacgagaagaucaaccagagccuggccuucauccgcaaguccgacgagcugcuccacaacgugaacgccggcaagagcacgaccaacaucaugaucaccaccaucaucaucgucaucaucgugauccugcugucccucaucgccguggggcugcugcucuacugcaaggcccggugaggacuaguguccaccugucccuccugggcugcuggauugucucguuuuccugccaaauaaacaggaucagcgcuuuacagaucuaaaaaaaaaaaaaaaaaaaaaaaaaaaaaaaaaaaaaaaaaaaaaaaaaaaaaaaaaaaaaaaaugcaucccccccccccccccccccccccccccccccaaaggcucuuuucagagccaccagaauu

SEQ ID NO: 8095 - RNA, 1829 nt, Artificial Sequence
  mRNA product Design e-3 comprising derived and/or modified sequence from HRSV(A2)__F-del_DSCav1_mut8 (opt1)
gggagacuuucccauucuguagcagaauuugguguugccuguggucuuggucccgcggagaagcuuaccauggagcugcucauccugaaggccaacgccaucaccaccauccugacggcggugaccuucugcuucgccagcggccagaacaucaccgaggaguucuaccaguccacgugcagcgccgucuccaagggguaccucggcgcccugcgcaccgggugguacaccagcgugaucaccaucgagcuguccaacaucaaggagaucaagugcaacggcaccgacgccaaggugaagcucaucaagcaggagcuggacaaguacaagaacgcggucacggaccugcagcuccugaugcagagcacccccgccaccggguccggcagcgccaucgccuccggcguggcggugugcaagguccugcaccucgagggggaggugaacaagaucaagagcgcccugcuguccaccaacaaggccguggucagccucuccggcugcggggugagcgugcugacguucaagguccuggaccucaagaacuacaucgacaagcagcugcugccgauccucaacaagcaguccugcagcauccccaacaucgagaccgugaucgaguuccagcagaagaacaaccggcugcuggagaucacccgcgaguucuccgugaacgccggcgucaccacgcccgugagcaccuacaugcucaccaacuccgagcugcugagccucaucaacgacaugcccaucaccaacgaccagaagaagcugaugagcaacaacgugcagaucguccggcagcaguccuacagcaucaugugcaucaucaaggaggaggugcuggccuacgugguccagcucccgcuguacggggugaucgacacgcccugcuggaagcugcacaccagcccccucugcaccaccaacacgaaggagggcuccaacaucugccugacccgcaccgaccggggcugguacugcgacaacgcgggguccgugagcuucuucccccaggccgagaccugcaagguccaguccaaccgcguguucugcgacacgaugaacagccugacccucccguccgaggucaaccugugcaacguggacaucuucaaccccaaguacgacugcaagaucaugaccagcaagaccgacguguccagcuccgucaucacgagccugggcgccaucguguccugcuacgggaagaccaagugcaccgccagcaacaagugccggggcaucaucaagaccuucuccaacggcugcgacuacgugagcaacaagggggucgacacgguguccgugggcaacacccucuacuacgucaacaagcaggaggggcagagccuguacgugaagggcgagcccaucaucaacuucuacgacccccugguguucccgagcgacgaguucgacgccuccaucagccaggucaacgagaagaucaaccagucccucgcguucauccgcaagagcgacgagcugcugcacaacgugaacgccgggaaguccaccaccaacaucaugaucaccacgaucaucaucgugaucaucgucauccuccugagccugaucgccgugggccuccugcuguacugcaaggcccggugaggacuaguguccaccugucccuccugggcugcuggauugucucguuuuccugccaaauaaacaggaucagcgcuuuacagaucuaaaaaaaaaaaaaaaaaaaaaaaaaaaaaaaaaaaaaaaaaaaaaaaaaaaaaaaaaaaaaaaaugcaucccccccccccccccccccccccccccccccaaaggcucuuuucagagccaccagaauu

SEQ ID NO: 8096 - RNA, 1829 nt, Artificial Sequence
  mRNA product Design e-3 comprising derived and/or modified sequence from HRSV(A2)__F-del_DSCav1_mut8 (opt2)
gggagacuuucccauucuguagcagaauuugguguugccuguggucuuggucccgcggagaagcuuaccauggagcuccucauccucaaggccaacgccaucaccaccauccucaccgccgucaccuucugcuucgccuccggccagaacaucaccgaggaguucuaccaguccaccugcuccgccgucuccaagggcuaccucggcgcccuccgcaccggcugguacaccuccgucaucaccaucgagcucuccaacaucaaggagaucaagugcaacggcaccgacgccaaggucaagcucaucaagcaggagcucgacaaguacaagaacgccgucaccgaccuccagcuccucaugcaguccacccccgccaccggcuccggcuccgccaucgccuccggcgucgccgucugcaagguccuccaccucgagggcgaggucaacaagaucaaguccgcccuccucuccaccaacaaggccgucgucucccucuccggcugcggcgucuccguccucaccuucaagguccucgaccucaagaacuacaucgacaagcagcuccuccccauccucaacaagcaguccugcuccauccccaacaucgagaccgucaucgaguuccagcagaagaacaaccgccuccucgagaucacccgcgaguucuccgucaacgccggcgucaccacccccgucuccaccuacaugcucaccaacuccgagcuccucucccucaucaacgacaugcccaucaccaacgaccagaagaagcucauguccaacaacguccagaucguccgccagcaguccuacuccaucaugugcaucaucaaggaggagguccucgccuacgucguccagcucccccucuacggcgucaucgacacccccugcuggaagcuccacaccuccccccucugcaccaccaacaccaaggagggcuccaacaucugccucacccgcaccgaccgcggcugguacugcgacaacgccggcuccgucuccuucuucccccaggccgagaccugcaagguccaguccaaccgcgucuucugcgacaccaugaacucccucacccuccccuccgaggucaaccucugcaacgucgacaucuucaaccccaaguacgacugcaagaucaugaccuccaagaccgacgucuccuccuccgucaucaccucccucggcgccaucgucuccugcuacggcaagaccaagugcaccgccuccaacaagugccgcggcaucaucaagaccuucuccaacggcugcgacuacgucuccaacaagggcgucgacaccgucuccgucggcaacacccucuacuacgucaacaagcaggagggccagucccucuacgucaagggcgagcccaucaucaacuucuacgacccccucgucuuccccuccgacgaguucgacgccuccaucucccaggucaacgagaagaucaaccagucccucgccuucauccgcaaguccgacgagcuccuccacaacgucaacgccggcaaguccaccaccaacaucaugaucaccaccaucaucaucgucaucaucgucauccuccucucccucaucgccgucggccuccuccucuacugcaaggcccgcugaggacuaguguccaccugucccuccugggcugcuggauugucucguuuuccugccaaauaaacaggaucagcgcuuuacagaucuaaaaaaaaaaaaaaaaaaaaaaaaaaaaaaaaaaaaaaaaaaaaaaaaaaaaaaaaaaaaaaaaugcaucccccccccccccccccccccccccccccccaaaggcucuuuucagagccaccagaauu

SEQ ID NO: 8097 - RNA, 1829 nt, Artificial Sequence
  mRNA product Design e-3 comprising derived and/or modified sequence from HRSV(A2)__F-del_DSCav1_mut8 (opt3)
gggagacuuucccauucuguagcagaauuugguguugccuguggucuuggucccgcggagaagcuuaccauggagcugcucauccuuaaggccaacgcuauuaccacaauacugacugcagugacguucugcuuugccagcggccagaauaucaccgaagaguucuaccaauccacauguucugcggucucaaaaggguauuugggagcuuuaagaacugguugguacaccaguguuauuacaaucgaacugagcaacauuaaggagaucaaaugcaauggcaccgacgccaaggugaaacuaauaaagcaggaacucgauaaguauaaaaacgcaguaacugaccugcagcuucugaugcaguccacacccgccaccgggucuggaucggcuaucgcaucaggcguggccgucuguaagguguugcaccucgagggugagguuaauaaaauuaagagcgcucugcugaguacgaacaaagccguggucucccucucugggugcggagugagcguauuaacuuuuaagguucuggaucuuaagaauuacaucgacaaacaauugcugccuauucuaaacaagcaguccuguucaaucccaaauauagaaaccgugauugaguuccagcagaaaaacaauaggcuccuggaaaucacacgggaguuuagugucaacgcgggcgugacuaccccggugagcacauauaugcuuaccaauucugagcuguugucccucauuaacgauaugcccaucacgaaugaccaaaagaaacugaugucaaacaacguccagaucguucgccagcagagcuacaguauuaugugcauaaucaaggaagagguguuagcauauguagugcaacugccucucuacggcgucauugauacuccauguuggaaacuucauacaucuccccugugcaccacuaauacaaaggaaggguccaacaucuguuugacccgaacggaccguggaugguacugcgauaaugccgguagcgugucguucuuuccucaggcugagaccuguaagguucagucuaacagaguguucugcgacacaaugaacucccuaacucugccaucagaagucaaucucugcaauguggauauauuuaaccccaaauaugacuguaagauuaugaccaguaaaacagauguaagcuccucuguuaucacuagccugggcgccaucgugucaugcuacgggaagaccaaauguacagcaaguaauaagugcaggggaauuaucaagaccuucuccaacggcugugacuaugucagcaauaaagguguggacacugucucuguggggaacacgcuuuacuauguuaauaagcaagagggacagucacuguacgugaaaggcgagccuauuauaaacuuuuaugauccauugguauucccgagugacgaauuugaugcuagcaucucccaggucaaugagaagauuaaccagucucucgccuucauccggaaaucggacgaacuguuacacaacgugaaugcgggcaagagcacaaccaacaucaugauuacuaccauaaucauuguuaucauugugauccugcuaucccucauagccgucgggcugcuuuuguacugcaaggcacgcugaggacuaguguccaccugucccuccugggcugcuggauugucucguuuuccugccaaauaaacaggaucagcgcuuuacagaucuaaaaaaaaaaaaaaaaaaaaaaaaaaaaaaaaaaaaaaaaaaaaaaaaaaaaaaaaaaaaaaaaugcaucccccccccccccccccccccccccccccccaaaggcucuuuucagagccaccagaauu

SEQ ID NO: 8098 - RNA, 1829 nt, Artificial Sequence
  mRNA product Design e-3 comprising derived and/or modified sequence from HRSV(A2)__F-del_DSCav1_mut8 (opt4)
gggagacuuucccauucuguagcagaauuugguguugccuguggucuuggucccgcggagaagcuuaccauggagcugcugauccugaaggccaacgccaucaccaccauccugaccgccgugaccuucugcuucgccagcggccagaacaucaccgaggaguucuaccagagcaccugcagcgccgugagcaagggcuaccugggcgcccugagaaccggcugguacaccagcgugaucaccaucgagcugagcaacaucaaggagaucaagugcaacggcaccgacgccaaggugaagcugaucaagcaggagcuggacaaguacaagaacgccgugaccgaccugcagcugcugaugcagagcacccccgccaccggcagcggcagcgccaucgccagcggcguggccgugugcaaggugcugcaccuggagggcgaggugaacaagaucaagagcgcccugcugagcaccaacaaggccguggugagccugagcggcugcggcgugagcgugcugaccuucaaggugcuggaccugaagaacuacaucgacaagcagcugcugcccauccugaacaagcagagcugcagcauccccaacaucgagaccgugaucgaguuccagcagaagaacaacagacugcuggagaucaccagagaguucagcgugaacgccggcgugaccacccccgugagcaccuacaugcugaccaacagcgagcugcugagccugaucaacgacaugcccaucaccaacgaccagaagaagcugaugagcaacaacgugcagaucgugagacagcagagcuacagcaucaugugcaucaucaaggaggaggugcuggccuacguggugcagcugccccuguacggcgugaucgacacccccugcuggaagcugcacaccagcccccugugcaccaccaacaccaaggagggcagcaacaucugccugaccagaaccgacagaggcugguacugcgacaacgccggcagcgugagcuucuucccccaggccgagaccugcaaggugcagagcaacagaguguucugcgacaccaugaacagccugacccugcccagcgaggugaaccugugcaacguggacaucuucaaccccaaguacgacugcaagaucaugaccagcaagaccgacgugagcagcagcgugaucaccagccugggcgccaucgugagcugcuacggcaagaccaagugcaccgccagcaacaagugcagaggcaucaucaagaccuucagcaacggcugcgacuacgugagcaacaagggcguggacaccgugagcgugggcaacacccuguacuacgugaacaagcaggagggccagagccuguacgugaagggcgagcccaucaucaacuucuacgacccccugguguuccccagcgacgaguucgacgccagcaucagccaggugaacgagaagaucaaccagagccuggccuucaucagaaagagcgacgagcugcugcacaacgugaacgccggcaagagcaccaccaacaucaugaucaccaccaucaucaucgugaucaucgugauccugcugagccugaucgccgugggccugcugcuguacugcaaggccagaugaggacuaguguccaccugucccuccugggcugcuggauugucucguuuuccugccaaauaaacaggaucagcgcuuuacagaucuaaaaaaaaaaaaaaaaaaaaaaaaaaaaaaaaaaaaaaaaaaaaaaaaaaaaaaaaaaaaaaaaugcaucccccccccccccccccccccccccccccccaaaggcucuuuucagagccaccagaauu

SEQ ID NO: 8099 - RNA, 1829 nt, Artificial Sequence
  mRNA product Design e-3 comprising derived and/or modified sequence from HRSV(A2)__F-del_DSCav1_mut8 (opt5)
gggagacuuucccauucuguagcagaauuugguguugccuguggucuuggucccgcggagaagcuuaccauggagcugcucauccugaaggccaacgcuauuaccacaauccuuacggccgugaccuucugcuuugcgagcggccagaauauuacagaagaguucuaccaauccaccuguucugcugucagcaaaggguaucugggagcccucagaacaggcugguacaccuccguuaucacaauugaacugucuaacaucaaggagaucaaaugcaaugggaccgacgccaaggugaaacuuauuaagcaggaacuggauaaguauaaaaacgcugugacggaccuccagcugcugaugcagagcacccccgccacaggauccggcucugcuaucgccagcggggucgcgguguguaagguucuccaccuggagggagaggugaauaaaauuaaguccgcccuucugagcaccaacaaagcugucgugucucucuccggcugcggcguuagcgugcugacauuuaagguccuugaucugaagaauuacaucgacaaacaacuccugccuauucugaacaagcagucuuguuccaucccgaauauugaaaccgugaucgaguuccagcagaaaaacaaucggcuccuggaaaucacgcgcgaguuuagcgugaacgccggggucacaacccccguuucuacauauaugcuuaccaauuccgagcugcucagccugauuaacgauaugccuaucaccaaugaccaaaagaaacuuauguccaacaacgugcagauugugagacagcagucuuacagcaucaugugcauuaucaaggaagagguccuggcuuaugugguucaacucccccuguacggagugaucgauacaccuuguuggaaacugcauacgagcccccucugcaccacaaauaccaaggaaggcagcaacauuugucugacacggaccgaccgcgggugguacugcgauaaugccggaucugucuccuucuuuccucaggcggagacguguaaggugcagagcaacagaguuuucugcgacacaaugaacucucuuacccugccgagcgaagugaaucucugcaaugucgauaucuuuaaccccaaauaugacuguaagauuaugaccuccaaaacagaugugucuagcuccgucaucaccagccugggcgccauugugucuugcuacgggaagacaaaauguacggcuuccaauaagugccggggaaucaucaagaccuucagcaacggcugugacuauguuucuaauaaaggcguggacacagucuccguggggaacacccuuuacuauguuaauaagcaagagggacagagccuguacgugaaaggcgagccuauuaucaacuuuuaugauccccucgucuucccuuccgacgaauuugaugccucuauuagccaggugaaugagaagaucaaccagucccuggcuuucauucgcaaaucugacgaacugcuccacaacgugaaugccgggaaguccacaaccaacaucaugauuacgaccaucaucauuguuaucauugucauccugcuuucccugauugccgugggacuccugcuguacugcaaggcuagaugaggacuaguguccaccugucccuccugggcugcuggauugucucguuuuccugccaaauaaacaggaucagcgcuuuacagaucuaaaaaaaaaaaaaaaaaaaaaaaaaaaaaaaaaaaaaaaaaaaaaaaaaaaaaaaaaaaaaaaaugcaucccccccccccccccccccccccccccccccaaaggcucuuuucagagccaccagaauu

SEQ ID NO: 8100 - RNA, 1829 nt, Artificial Sequence
  mRNA product Design e-3 comprising derived and/or modified sequence from HRSV(A2)__F-del_DSCav1_mut8 (opt6)
gggagacuuucccauucuguagcagaauuugguguugccuguggucuuggucccgcggagaagcuuaccauggaacuacucauauugaaagccaacgcaaucacaacaauacuaaccgccguaacauuuugcuucgcgucaggccaaaauauaacagaagaauuuuaccaaucaacaugcuccgccguaucaaaaggauaccuaggugcauuacgaaccgguugguacacaucaguaaucacaauagaacuuuccaacauuaaagaaauaaaaugcaauggcacagacgcaaaagucaaacuaauaaaacaagaacuagacaaauauaaaaacgccgucacagacuuacaacuauuaaugcaaagcacaccagcaacaggauccggaucagcaauagcaucaggaguagccgucuguaaaguacuacaccuagaaggcgaaguuaauaaaauuaaaucagcuuuauuaucaaccaacaaagcaguaguaucacuauccggaugcggagucuccguccuaacauucaaaguacuagaccucaagaauuacauagauaaacaacuacuaccaauacucaacaaacaaucauguucaauaccaaacaucgaaaccgucauagaauuucaacaaaaaaauaauagacucuuagaaauaacacgagaauuuagcguaaacgcaggagucacaaccccugucucaacauacaugcuaaccaauuccgaauuauuaucacucauaaaugacaugccaauaacuaaugaccaaaaaaaacuuaugucaaacaacguacaaauaguaagacaacaaucauauucaauaaugugcauaaucaaagaagaaguuuuagcauauguaguacaacuaccacuauauggcgucauagacacaccaugcuggaaauuacacacaucaccucuaugcacaacaaacacaaaagaaggaagcaacauuugccuaaccagaaccgauagaggaugguacugcgauaacgcaggcucaguaucauucuucccucaagccgaaacuugcaaaguccaaucaaauagagucuucugcgauacaaugaacuccuuaacuuuaccaucagaaguaaaucuaugcaacguagauaucuuuaauccaaaauacgauugcaaaaucaugacaucaaaaacagauguaucaucuaguguaauuaccucccuaggagcaauaguaagcugcuacggaaaaacaaaaugcaccgccucuaacaaaugucguggaauaauaaaaacauucucaaacggaugcgauuauguaucaaauaaaggugucgacaccguaucaguaggcaauacacuauacuauguaaauaaacaagaaggacaaucacucuacgucaaaggugaaccaauaauaaacuucuacgacccacuuguauucccaagcgacgaauuugacgcaucaauaagccaaguaaacgaaaaaauaaaccaaucacuagcauucaucagaaaaucagacgaacuacuccacaauguaaaugcaggaaaaucaacaaccaauaucaugauaacaaccauaauaauagucauaauaguaauacuauuaucccucauagccguuggacuacuccuauauuguaaagcacgauaaggacuaguguccaccugucccuccugggcugcuggauugucucguuuuccugccaaauaaacaggaucagcgcuuuacagaucuaaaaaaaaaaaaaaaaaaaaaaaaaaaaaaaaaaaaaaaaaaaaaaaaaaaaaaaaaaaaaaaaugcaucccccccccccccccccccccccccccccccaaaggcucuuuucagagccaccagaauu

SEQ ID NO: 8101 - RNA, 1829 nt, Artificial Sequence
  mRNA product Design e-3 comprising derived and/or modified sequence from HRSV(A2)__F-del_DSCav1_mut8 (opt11)
gggagacuuucccauucuguagcagaauuugguguugccuguggucuuggucccgcggagaagcuuaccauggaacuccucauccucaaagccaacgccaucaccaccauacucaccgcaguaaccuucugcuucgcauccggccaaaacaucacagaagaguucuaccagaguaccugcuccgccgucuccaaaggcuaccuuggcgcccuccguaccgggugguacacauccgucaucacaaucgaacucuccaacaucaaagaaauaaagugcaacggcacagacgccaaaguaaaacugauaaagcaagaacucgacaaauacaaaaacgccguaaccgaccuccagcuacuaaugcaauccacucccgccaccggcagcggauccgccaucgccuccggaguagccgucuguaaagucuuacaccucgaaggcgaagugaacaaaaucaaauccgcccuacucucaaccaacaaagccguaguaucacucuccgggugcggcguuucagugcuaacguucaaaguccuugaccucaaaaacuacaucgacaaacaacuccuccccauccuaaauaaacaauccugcuccauacccaacaucgagacugucaucgaguuccagcagaaaaacaaccgacuccucgaaaucacacgcgaguucucugucaacgccggcgucacaacccccgucuccacauacaugcucaccaacagcgaacuccucucccuaaucaaugacaugcccaucaccaacgaccaaaagaaacucaugucaaacaacguccaaaucguccgccaacaauccuacagcaucaugugcaucaucaaagaagaaguucucgcauacguaguacaacucccccucuacggagugaucgacacccccugcuggaaacuacacaccagcccgcuuugcaccacaaacaccaaggaaggcuccaacaucugccucacucgaaccgaccgcggcugguacugcgacaacgcaggcuccgucaguuucuuuccccaagcagaaacaugcaaaguccaauccaaccgaguauucugcgacaccaugaacucccucacccuaccauccgaaguuaaccuaugcaacguggacaucuucaaccccaaguacgacugcaaaauuaugaccuccaaaaccgacguauccuccagcgucaucaccagccucggagcaauagucuccugcuacggcaagaccaagugcaccgcuuccaacaagugucgcggaaucaucaaaaccuucucaaacggcugcgacuacgucuccaacaaaggcgucgacaccguauccguaggaaacacccuauacuacgucaacaaacaagaaggacaaucccucuaugucaaaggcgaacccaucaucaauuucuacgacccccuagucuucccuuccgacgaguucgacgcguccaucagccaagucaaugaaaagaucaaccagagccuggcauucauccgcaaauccgacgaacuccuccacaacgucaacgcgggaaaauccacgacaaacaucaugaucaccaccaucaucaucgucaucauagucauucuccuuucucucaucgccgugggacuacuucucuacugcaaagcccgauaaggacuaguguccaccugucccuccugggcugcuggauugucucguuuuccugccaaauaaacaggaucagcgcuuuacagaucuaaaaaaaaaaaaaaaaaaaaaaaaaaaaaaaaaaaaaaaaaaaaaaaaaaaaaaaaaaaaaaaaugcaucccccccccccccccccccccccccccccccaaaggcucuuuucagagccaccagaauu

SEQ ID NO: 8102 - RNA, 1883 nt, Artificial Sequence
  mRNA product Design e-4 comprising derived and/or modified sequence from HRSV(A2)__F-del_DSCav1_mut8 (opt1)
gggagacuccugucgggcggaaguaggaggaguagaguuuaaaaacaguacucuuuuuccgguucgggacguaguugaagcaacgacaagccggauaaccgcucuugagacaggaagcuuaccauggagcugcucauccugaaggccaacgccaucaccaccauccugacggcggugaccuucugcuucgccagcggccagaacaucaccgaggaguucuaccaguccacgugcagcgccgucuccaagggguaccucggcgcccugcggaccggcugguacaccuccgugaucaccaucgagcugagcaacaucaaggagaucaagugcaacgggaccgacgccaaggugaagcucaucaagcaggagcuggacaaguacaagaacgcggucacggaccugcagcuccugaugcaguccaccccggcaaccggcuccggcuccgccaucgcgagcggcgucgccgugugcaaggugcugcaccucgagggggaggucaacaagaucaagagcgcccugcuguccaccaacaaggccguggugagccucuccggcugcggcgucagcgugcugaccuucaaggugcuggaccucaagaacuacaucgacaagcagcugcugcccauccugaacaagcagagcugcuccauccccaacaucgagacggugaucgaguuccagcagaagaacaaccggcuccuggagaucacccgcgaguucagcgugaacgccggggucaccacccccguguccacguacaugcugaccaacagcgagcuccugucccugaucaacgacaugccgaucaccaacgaccagaagaagcucaugagcaacaacgugcagaucguccggcagcaguccuacagcaucaugugcaucaucaaggaggaggugcuggcguacgugguccagcugccccucuacggcgugaucgacacccccugcuggaagcugcacacgagcccccugugcaccaccaacaccaaggagggguccaacaucugccucacgcgcaccgaccggggcugguacugcgacaacgccggcagcgucuccuucuucccgcaggccgagaccugcaaggugcagagcaaccgcguguucugcgacaccaugaacucccugacgcugcccagcgagguaaaccucugcaacgucgacaucuucaaccccaaguacgacugcaagaucaugaccuccaagaccgacgugagcuccagcgugaucaccucccugggggccaucgucagcugcuacggcaagacgaagugcaccgccagcaacaagugccgggggaucaucaagaccuucuccaacggcugcgacuacgugagcaacaagggcguggacaccguguccgucgggaacacccuguacuacgugaacaagcaggagggccagagccucuacgugaagggggagcccaucaucaacuucuacgacccgcuggucuuccccuccgacgaguucgacgcgagcaucucccaggugaacgagaagaucaaccagagccuggccuucauccgcaaguccgacgagcugcuccacaacgugaacgccggcaagagcacgaccaacaucaugaucaccaccaucaucaucgucaucaucgugauccugcugucccucaucgccguggggcugcugcucuacugcaaggcccggugaggacuaguguccaccugucccuccugggcugcuggauugucucguuuuccugccaaauaaacaggaucagcgcuuuacagaucuaaaaaaaaaaaaaaaaaaaaaaaaaaaaaaaaaaaaaaaaaaaaaaaaaaaaaaaaaaaaaaaaugcaucccccccccccccccccccccccccccccccaaaggcucuuuucagagccaccagaauu

SEQ ID NO: 8103 - RNA, 1883 nt, Artificial Sequence
  mRNA product Design e-4 comprising derived and/or modified sequence from HRSV(A2)__F-del_DSCav1_mut8 (opt1)
gggagacuccugucgggcggaaguaggaggaguagaguuuaaaaacaguacucuuuuuccgguucgggacguaguugaagcaacgacaagccggauaaccgcucuugagacaggaagcuuaccauggagcugcucauccugaaggccaacgccaucaccaccauccugacggcggugaccuucugcuucgccagcggccagaacaucaccgaggaguucuaccaguccacgugcagcgccgucuccaagggguaccucggcgcccugcgcaccgggugguacaccagcgugaucaccaucgagcuguccaacaucaaggagaucaagugcaacggcaccgacgccaaggugaagcucaucaagcaggagcuggacaaguacaagaacgcggucacggaccugcagcuccugaugcagagcacccccgccaccggguccggcagcgccaucgccuccggcguggcggugugcaagguccugcaccucgagggggaggugaacaagaucaagagcgcccugcuguccaccaacaaggccguggucagccucuccggcugcggggugagcgugcugacguucaagguccuggaccucaagaacuacaucgacaagcagcugcugccgauccucaacaagcaguccugcagcauccccaacaucgagaccgugaucgaguuccagcagaagaacaaccggcugcuggagaucacccgcgaguucuccgugaacgccggcgucaccacgcccgugagcaccuacaugcucaccaacuccgagcugcugagccucaucaacgacaugcccaucaccaacgaccagaagaagcugaugagcaacaacgugcagaucguccggcagcaguccuacagcaucaugugcaucaucaaggaggaggugcuggccuacgugguccagcucccgcuguacggggugaucgacacgcccugcuggaagcugcacaccagcccccucugcaccaccaacacgaaggagggcuccaacaucugccugacccgcaccgaccggggcugguacugcgacaacgcgggguccgugagcuucuucccccaggccgagaccugcaagguccaguccaaccgcguguucugcgacacgaugaacagccugacccucccguccgaggucaaccugugcaacguggacaucuucaaccccaaguacgacugcaagaucaugaccagcaagaccgacguguccagcuccgucaucacgagccugggcgccaucguguccugcuacgggaagaccaagugcaccgccagcaacaagugccggggcaucaucaagaccuucuccaacggcugcgacuacgugagcaacaagggggucgacacgguguccgugggcaacacccucuacuacgucaacaagcaggaggggcagagccuguacgugaagggcgagcccaucaucaacuucuacgacccccugguguucccgagcgacgaguucgacgccuccaucagccaggucaacgagaagaucaaccagucccucgcguucauccgcaagagcgacgagcugcugcacaacgugaacgccgggaaguccaccaccaacaucaugaucaccacgaucaucaucgugaucaucgucauccuccugagccugaucgccgugggccuccugcuguacugcaaggcccggugaggacuaguguccaccugucccuccugggcugcuggauugucucguuuuccugccaaauaaacaggaucagcgcuuuacagaucuaaaaaaaaaaaaaaaaaaaaaaaaaaaaaaaaaaaaaaaaaaaaaaaaaaaaaaaaaaaaaaaaugcaucccccccccccccccccccccccccccccccaaaggcucuuuucagagccaccagaauu

SEQ ID NO: 8104 - RNA, 1883 nt, Artificial Sequence
  mRNA product Design e-4 comprising derived and/or modified sequence from HRSV(A2)__F-del_DSCav1_mut8 (opt2)
gggagacuccugucgggcggaaguaggaggaguagaguuuaaaaacaguacucuuuuuccgguucgggacguaguugaagcaacgacaagccggauaaccgcucuugagacaggaagcuuaccauggagcuccucauccucaaggccaacgccaucaccaccauccucaccgccgucaccuucugcuucgccuccggccagaacaucaccgaggaguucuaccaguccaccugcuccgccgucuccaagggcuaccucggcgcccuccgcaccggcugguacaccuccgucaucaccaucgagcucuccaacaucaaggagaucaagugcaacggcaccgacgccaaggucaagcucaucaagcaggagcucgacaaguacaagaacgccgucaccgaccuccagcuccucaugcaguccacccccgccaccggcuccggcuccgccaucgccuccggcgucgccgucugcaagguccuccaccucgagggcgaggucaacaagaucaaguccgcccuccucuccaccaacaaggccgucgucucccucuccggcugcggcgucuccguccucaccuucaagguccucgaccucaagaacuacaucgacaagcagcuccuccccauccucaacaagcaguccugcuccauccccaacaucgagaccgucaucgaguuccagcagaagaacaaccgccuccucgagaucacccgcgaguucuccgucaacgccggcgucaccacccccgucuccaccuacaugcucaccaacuccgagcuccucucccucaucaacgacaugcccaucaccaacgaccagaagaagcucauguccaacaacguccagaucguccgccagcaguccuacuccaucaugugcaucaucaaggaggagguccucgccuacgucguccagcucccccucuacggcgucaucgacacccccugcuggaagcuccacaccuccccccucugcaccaccaacaccaaggagggcuccaacaucugccucacccgcaccgaccgcggcugguacugcgacaacgccggcuccgucuccuucuucccccaggccgagaccugcaagguccaguccaaccgcgucuucugcgacaccaugaacucccucacccuccccuccgaggucaaccucugcaacgucgacaucuucaaccccaaguacgacugcaagaucaugaccuccaagaccgacgucuccuccuccgucaucaccucccucggcgccaucgucuccugcuacggcaagaccaagugcaccgccuccaacaagugccgcggcaucaucaagaccuucuccaacggcugcgacuacgucuccaacaagggcgucgacaccgucuccgucggcaacacccucuacuacgucaacaagcaggagggccagucccucuacgucaagggcgagcccaucaucaacuucuacgacccccucgucuuccccuccgacgaguucgacgccuccaucucccaggucaacgagaagaucaaccagucccucgccuucauccgcaaguccgacgagcuccuccacaacgucaacgccggcaaguccaccaccaacaucaugaucaccaccaucaucaucgucaucaucgucauccuccucucccucaucgccgucggccuccuccucuacugcaaggcccgcugaggacuaguguccaccugucccuccugggcugcuggauugucucguuuuccugccaaauaaacaggaucagcgcuuuacagaucuaaaaaaaaaaaaaaaaaaaaaaaaaaaaaaaaaaaaaaaaaaaaaaaaaaaaaaaaaaaaaaaaugcaucccccccccccccccccccccccccccccccaaaggcucuuuucagagccaccagaauu

SEQ ID NO: 8105 - RNA, 1883 nt, Artificial Sequence
  mRNA product Design e-4 comprising derived and/or modified sequence from HRSV(A2)__F-del_DSCav1_mut8 (opt3)
gggagacuccugucgggcggaaguaggaggaguagaguuuaaaaacaguacucuuuuuccgguucgggacguaguugaagcaacgacaagccggauaaccgcucuugagacaggaagcuuaccauggagcugcucauccuuaaggccaacgcuauuaccacaauacugacugcagugacguucugcuuugccagcggccagaauaucaccgaagaguucuaccaauccacauguucugcggucucaaaaggguauuugggagcuuuaagaacugguugguacaccaguguuauuacaaucgaacugagcaacauuaaggagaucaaaugcaauggcaccgacgccaaggugaaacuaauaaagcaggaacucgauaaguauaaaaacgcaguaacugaccugcagcuucugaugcaguccacacccgccaccgggucuggaucggcuaucgcaucaggcguggccgucuguaagguguugcaccucgagggugagguuaauaaaauuaagagcgcucugcugaguacgaacaaagccguggucucccucucugggugcggagugagcguauuaacuuuuaagguucuggaucuuaagaauuacaucgacaaacaauugcugccuauucuaaacaagcaguccuguucaaucccaaauauagaaaccgugauugaguuccagcagaaaaacaauaggcuccuggaaaucacacgggaguuuagugucaacgcgggcgugacuaccccggugagcacauauaugcuuaccaauucugagcuguugucccucauuaacgauaugcccaucacgaaugaccaaaagaaacugaugucaaacaacguccagaucguucgccagcagagcuacaguauuaugugcauaaucaaggaagagguguuagcauauguagugcaacugccucucuacggcgucauugauacuccauguuggaaacuucauacaucuccccugugcaccacuaauacaaaggaaggguccaacaucuguuugacccgaacggaccguggaugguacugcgauaaugccgguagcgugucguucuuuccucaggcugagaccuguaagguucagucuaacagaguguucugcgacacaaugaacucccuaacucugccaucagaagucaaucucugcaauguggauauauuuaaccccaaauaugacuguaagauuaugaccaguaaaacagauguaagcuccucuguuaucacuagccugggcgccaucgugucaugcuacgggaagaccaaauguacagcaaguaauaagugcaggggaauuaucaagaccuucuccaacggcugugacuaugucagcaauaaagguguggacacugucucuguggggaacacgcuuuacuauguuaauaagcaagagggacagucacuguacgugaaaggcgagccuauuauaaacuuuuaugauccauugguauucccgagugacgaauuugaugcuagcaucucccaggucaaugagaagauuaaccagucucucgccuucauccggaaaucggacgaacuguuacacaacgugaaugcgggcaagagcacaaccaacaucaugauuacuaccauaaucauuguuaucauugugauccugcuaucccucauagccgucgggcugcuuuuguacugcaaggcacgcugaggacuaguguccaccugucccuccugggcugcuggauugucucguuuuccugccaaauaaacaggaucagcgcuuuacagaucuaaaaaaaaaaaaaaaaaaaaaaaaaaaaaaaaaaaaaaaaaaaaaaaaaaaaaaaaaaaaaaaaugcaucccccccccccccccccccccccccccccccaaaggcucuuuucagagccaccagaauu

SEQ ID NO: 8106 - RNA, 1883 nt, Artificial Sequence
  mRNA product Design e-4 comprising derived and/or modified sequence from HRSV(A2)__F-del_DSCav1_mut8 (opt4)
gggagacuccugucgggcggaaguaggaggaguagaguuuaaaaacaguacucuuuuuccgguucgggacguaguugaagcaacgacaagccggauaaccgcucuugagacaggaagcuuaccauggagcugcugauccugaaggccaacgccaucaccaccauccugaccgccgugaccuucugcuucgccagcggccagaacaucaccgaggaguucuaccagagcaccugcagcgccgugagcaagggcuaccugggcgcccugagaaccggcugguacaccagcgugaucaccaucgagcugagcaacaucaaggagaucaagugcaacggcaccgacgccaaggugaagcugaucaagcaggagcuggacaaguacaagaacgccgugaccgaccugcagcugcugaugcagagcacccccgccaccggcagcggcagcgccaucgccagcggcguggccgugugcaaggugcugcaccuggagggcgaggugaacaagaucaagagcgcccugcugagcaccaacaaggccguggugagccugagcggcugcggcgugagcgugcugaccuucaaggugcuggaccugaagaacuacaucgacaagcagcugcugcccauccugaacaagcagagcugcagcauccccaacaucgagaccgugaucgaguuccagcagaagaacaacagacugcuggagaucaccagagaguucagcgugaacgccggcgugaccacccccgugagcaccuacaugcugaccaacagcgagcugcugagccugaucaacgacaugcccaucaccaacgaccagaagaagcugaugagcaacaacgugcagaucgugagacagcagagcuacagcaucaugugcaucaucaaggaggaggugcuggccuacguggugcagcugccccuguacggcgugaucgacacccccugcuggaagcugcacaccagcccccugugcaccaccaacaccaaggagggcagcaacaucugccugaccagaaccgacagaggcugguacugcgacaacgccggcagcgugagcuucuucccccaggccgagaccugcaaggugcagagcaacagaguguucugcgacaccaugaacagccugacccugcccagcgaggugaaccugugcaacguggacaucuucaaccccaaguacgacugcaagaucaugaccagcaagaccgacgugagcagcagcgugaucaccagccugggcgccaucgugagcugcuacggcaagaccaagugcaccgccagcaacaagugcagaggcaucaucaagaccuucagcaacggcugcgacuacgugagcaacaagggcguggacaccgugagcgugggcaacacccuguacuacgugaacaagcaggagggccagagccuguacgugaagggcgagcccaucaucaacuucuacgacccccugguguuccccagcgacgaguucgacgccagcaucagccaggugaacgagaagaucaaccagagccuggccuucaucagaaagagcgacgagcugcugcacaacgugaacgccggcaagagcaccaccaacaucaugaucaccaccaucaucaucgugaucaucgugauccugcugagccugaucgccgugggccugcugcuguacugcaaggccagaugaggacuaguguccaccugucccuccugggcugcuggauugucucguuuuccugccaaauaaacaggaucagcgcuuuacagaucuaaaaaaaaaaaaaaaaaaaaaaaaaaaaaaaaaaaaaaaaaaaaaaaaaaaaaaaaaaaaaaaaugcaucccccccccccccccccccccccccccccccaaaggcucuuuucagagccaccagaauu

SEQ ID NO: 8107 - RNA, 1883 nt, Artificial Sequence
  mRNA product Design e-4 comprising derived and/or modified sequence from HRSV(A2)__F-del_DSCav1_mut8 (opt5)
gggagacuccugucgggcggaaguaggaggaguagaguuuaaaaacaguacucuuuuuccgguucgggacguaguugaagcaacgacaagccggauaaccgcucuugagacaggaagcuuaccauggagcugcucauccugaaggccaacgcuauuaccacaauccuuacggccgugaccuucugcuuugcgagcggccagaauauuacagaagaguucuaccaauccaccuguucugcugucagcaaaggguaucugggagcccucagaacaggcugguacaccuccguuaucacaauugaacugucuaacaucaaggagaucaaaugcaaugggaccgacgccaaggugaaacuuauuaagcaggaacuggauaaguauaaaaacgcugugacggaccuccagcugcugaugcagagcacccccgccacaggauccggcucugcuaucgccagcggggucgcgguguguaagguucuccaccuggagggagaggugaauaaaauuaaguccgcccuucugagcaccaacaaagcugucgugucucucuccggcugcggcguuagcgugcugacauuuaagguccuugaucugaagaauuacaucgacaaacaacuccugccuauucugaacaagcagucuuguuccaucccgaauauugaaaccgugaucgaguuccagcagaaaaacaaucggcuccuggaaaucacgcgcgaguuuagcgugaacgccggggucacaacccccguuucuacauauaugcuuaccaauuccgagcugcucagccugauuaacgauaugccuaucaccaaugaccaaaagaaacuuauguccaacaacgugcagauugugagacagcagucuuacagcaucaugugcauuaucaaggaagagguccuggcuuaugugguucaacucccccuguacggagugaucgauacaccuuguuggaaacugcauacgagcccccucugcaccacaaauaccaaggaaggcagcaacauuugucugacacggaccgaccgcgggugguacugcgauaaugccggaucugucuccuucuuuccucaggcggagacguguaaggugcagagcaacagaguuuucugcgacacaaugaacucucuuacccugccgagcgaagugaaucucugcaaugucgauaucuuuaaccccaaauaugacuguaagauuaugaccuccaaaacagaugugucuagcuccgucaucaccagccugggcgccauugugucuugcuacgggaagacaaaauguacggcuuccaauaagugccggggaaucaucaagaccuucagcaacggcugugacuauguuucuaauaaaggcguggacacagucuccguggggaacacccuuuacuauguuaauaagcaagagggacagagccuguacgugaaaggcgagccuauuaucaacuuuuaugauccccucgucuucccuuccgacgaauuugaugccucuauuagccaggugaaugagaagaucaaccagucccuggcuuucauucgcaaaucugacgaacugcuccacaacgugaaugccgggaaguccacaaccaacaucaugauuacgaccaucaucauuguuaucauugucauccugcuuucccugauugccgugggacuccugcuguacugcaaggcuagaugaggacuaguguccaccugucccuccugggcugcuggauugucucguuuuccugccaaauaaacaggaucagcgcuuuacagaucuaaaaaaaaaaaaaaaaaaaaaaaaaaaaaaaaaaaaaaaaaaaaaaaaaaaaaaaaaaaaaaaaugcaucccccccccccccccccccccccccccccccaaaggcucuuuucagagccaccagaauu

SEQ ID NO: 8108 - RNA, 1883 nt, Artificial Sequence
  mRNA product Design e-4 comprising derived and/or modified sequence from HRSV(A2)__F-del_DSCav1_mut8 (opt6)
gggagacuccugucgggcggaaguaggaggaguagaguuuaaaaacaguacucuuuuuccgguucgggacguaguugaagcaacgacaagccggauaaccgcucuugagacaggaagcuuaccauggaacuacucauauugaaagccaacgcaaucacaacaauacuaaccgccguaacauuuugcuucgcgucaggccaaaauauaacagaagaauuuuaccaaucaacaugcuccgccguaucaaaaggauaccuaggugcauuacgaaccgguugguacacaucaguaaucacaauagaacuuuccaacauuaaagaaauaaaaugcaauggcacagacgcaaaagucaaacuaauaaaacaagaacuagacaaauauaaaaacgccgucacagacuuacaacuauuaaugcaaagcacaccagcaacaggauccggaucagcaauagcaucaggaguagccgucuguaaaguacuacaccuagaaggcgaaguuaauaaaauuaaaucagcuuuauuaucaaccaacaaagcaguaguaucacuauccggaugcggagucuccguccuaacauucaaaguacuagaccucaagaauuacauagauaaacaacuacuaccaauacucaacaaacaaucauguucaauaccaaacaucgaaaccgucauagaauuucaacaaaaaaauaauagacucuuagaaauaacacgagaauuuagcguaaacgcaggagucacaaccccugucucaacauacaugcuaaccaauuccgaauuauuaucacucauaaaugacaugccaauaacuaaugaccaaaaaaaacuuaugucaaacaacguacaaauaguaagacaacaaucauauucaauaaugugcauaaucaaagaagaaguuuuagcauauguaguacaacuaccacuauauggcgucauagacacaccaugcuggaaauuacacacaucaccucuaugcacaacaaacacaaaagaaggaagcaacauuugccuaaccagaaccgauagaggaugguacugcgauaacgcaggcucaguaucauucuucccucaagccgaaacuugcaaaguccaaucaaauagagucuucugcgauacaaugaacuccuuaacuuuaccaucagaaguaaaucuaugcaacguagauaucuuuaauccaaaauacgauugcaaaaucaugacaucaaaaacagauguaucaucuaguguaauuaccucccuaggagcaauaguaagcugcuacggaaaaacaaaaugcaccgccucuaacaaaugucguggaauaauaaaaacauucucaaacggaugcgauuauguaucaaauaaaggugucgacaccguaucaguaggcaauacacuauacuauguaaauaaacaagaaggacaaucacucuacgucaaaggugaaccaauaauaaacuucuacgacccacuuguauucccaagcgacgaauuugacgcaucaauaagccaaguaaacgaaaaaauaaaccaaucacuagcauucaucagaaaaucagacgaacuacuccacaauguaaaugcaggaaaaucaacaaccaauaucaugauaacaaccauaauaauagucauaauaguaauacuauuaucccucauagccguuggacuacuccuauauuguaaagcacgauaaggacuaguguccaccugucccuccugggcugcuggauugucucguuuuccugccaaauaaacaggaucagcgcuuuacagaucuaaaaaaaaaaaaaaaaaaaaaaaaaaaaaaaaaaaaaaaaaaaaaaaaaaaaaaaaaaaaaaaaugcaucccccccccccccccccccccccccccccccaaaggcucuuuucagagccaccagaauu

SEQ ID NO: 8109 - RNA, 1883 nt, Artificial Sequence
  mRNA product Design e-4 comprising derived and/or modified sequence from HRSV(A2)__F-del_DSCav1_mut8 (opt11)
gggagacuccugucgggcggaaguaggaggaguagaguuuaaaaacaguacucuuuuuccgguucgggacguaguugaagcaacgacaagccggauaaccgcucuugagacaggaagcuuaccauggaacuccucauccucaaagccaacgccaucaccaccauacucaccgcaguaaccuucugcuucgcauccggccaaaacaucacagaagaguucuaccagaguaccugcuccgccgucuccaaaggcuaccuuggcgcccuccguaccgggugguacacauccgucaucacaaucgaacucuccaacaucaaagaaauaaagugcaacggcacagacgccaaaguaaaacugauaaagcaagaacucgacaaauacaaaaacgccguaaccgaccuccagcuacuaaugcaauccacucccgccaccggcagcggauccgccaucgccuccggaguagccgucuguaaagucuuacaccucgaaggcgaagugaacaaaaucaaauccgcccuacucucaaccaacaaagccguaguaucacucuccgggugcggcguuucagugcuaacguucaaaguccuugaccucaaaaacuacaucgacaaacaacuccuccccauccuaaauaaacaauccugcuccauacccaacaucgagacugucaucgaguuccagcagaaaaacaaccgacuccucgaaaucacacgcgaguucucugucaacgccggcgucacaacccccgucuccacauacaugcucaccaacagcgaacuccucucccuaaucaaugacaugcccaucaccaacgaccaaaagaaacucaugucaaacaacguccaaaucguccgccaacaauccuacagcaucaugugcaucaucaaagaagaaguucucgcauacguaguacaacucccccucuacggagugaucgacacccccugcuggaaacuacacaccagcccgcuuugcaccacaaacaccaaggaaggcuccaacaucugccucacucgaaccgaccgcggcugguacugcgacaacgcaggcuccgucaguuucuuuccccaagcagaaacaugcaaaguccaauccaaccgaguauucugcgacaccaugaacucccucacccuaccauccgaaguuaaccuaugcaacguggacaucuucaaccccaaguacgacugcaaaauuaugaccuccaaaaccgacguauccuccagcgucaucaccagccucggagcaauagucuccugcuacggcaagaccaagugcaccgcuuccaacaagugucgcggaaucaucaaaaccuucucaaacggcugcgacuacgucuccaacaaaggcgucgacaccguauccguaggaaacacccuauacuacgucaacaaacaagaaggacaaucccucuaugucaaaggcgaacccaucaucaauuucuacgacccccuagucuucccuuccgacgaguucgacgcguccaucagccaagucaaugaaaagaucaaccagagccuggcauucauccgcaaauccgacgaacuccuccacaacgucaacgcgggaaaauccacgacaaacaucaugaucaccaccaucaucaucgucaucauagucauucuccuuucucucaucgccgugggacuacuucucuacugcaaagcccgauaaggacuaguguccaccugucccuccugggcugcuggauugucucguuuuccugccaaauaaacaggaucagcgcuuuacagaucuaaaaaaaaaaaaaaaaaaaaaaaaaaaaaaaaaaaaaaaaaaaaaaaaaaaaaaaaaaaaaaaaugcaucccccccccccccccccccccccccccccccaaaggcucuuuucagagccaccagaauu

SEQ ID NO: 8110 - RNA, 1850 nt, Artificial Sequence
  mRNA product Design e-5 comprising derived and/or modified sequence from HRSV(A2)__F-del_DSCav1_mut8 (opt1)
gggagagcggcucggccauuuugucccagucaguccggaggcugcggcugcagaaguaccgccugcggaguaacugcaaagaagcuuaccauggagcugcucauccugaaggccaacgccaucaccaccauccugacggcggugaccuucugcuucgccagcggccagaacaucaccgaggaguucuaccaguccacgugcagcgccgucuccaagggguaccucggcgcccugcggaccggcugguacaccuccgugaucaccaucgagcugagcaacaucaaggagaucaagugcaacgggaccgacgccaaggugaagcucaucaagcaggagcuggacaaguacaagaacgcggucacggaccugcagcuccugaugcaguccaccccggcaaccggcuccggcuccgccaucgcgagcggcgucgccgugugcaaggugcugcaccucgagggggaggucaacaagaucaagagcgcccugcuguccaccaacaaggccguggugagccucuccggcugcggcgucagcgugcugaccuucaaggugcuggaccucaagaacuacaucgacaagcagcugcugcccauccugaacaagcagagcugcuccauccccaacaucgagacggugaucgaguuccagcagaagaacaaccggcuccuggagaucacccgcgaguucagcgugaacgccggggucaccacccccguguccacguacaugcugaccaacagcgagcuccugucccugaucaacgacaugccgaucaccaacgaccagaagaagcucaugagcaacaacgugcagaucguccggcagcaguccuacagcaucaugugcaucaucaaggaggaggugcuggcguacgugguccagcugccccucuacggcgugaucgacacccccugcuggaagcugcacacgagcccccugugcaccaccaacaccaaggagggguccaacaucugccucacgcgcaccgaccggggcugguacugcgacaacgccggcagcgucuccuucuucccgcaggccgagaccugcaaggugcagagcaaccgcguguucugcgacaccaugaacucccugacgcugcccagcgagguaaaccucugcaacgucgacaucuucaaccccaaguacgacugcaagaucaugaccuccaagaccgacgugagcuccagcgugaucaccucccugggggccaucgucagcugcuacggcaagacgaagugcaccgccagcaacaagugccgggggaucaucaagaccuucuccaacggcugcgacuacgugagcaacaagggcguggacaccguguccgucgggaacacccuguacuacgugaacaagcaggagggccagagccucuacgugaagggggagcccaucaucaacuucuacgacccgcuggucuuccccuccgacgaguucgacgcgagcaucucccaggugaacgagaagaucaaccagagccuggccuucauccgcaaguccgacgagcugcuccacaacgugaacgccggcaagagcacgaccaacaucaugaucaccaccaucaucaucgucaucaucgugauccugcugucccucaucgccguggggcugcugcucuacugcaaggcccggugaggacuaguguccaccugucccuccugggcugcuggauugucucguuuuccugccaaauaaacaggaucagcgcuuuacagaucuaaaaaaaaaaaaaaaaaaaaaaaaaaaaaaaaaaaaaaaaaaaaaaaaaaaaaaaaaaaaaaaaugcaucccccccccccccccccccccccccccccccaaaggcucuuuucagagccaccagaauu

SEQ ID NO: 8111 - RNA, 1850 nt, Artificial Sequence
  mRNA product Design e-5 comprising derived and/or modified sequence from HRSV(A2)__F-del_DSCav1_mut8 (opt1)
gggagagcggcucggccauuuugucccagucaguccggaggcugcggcugcagaaguaccgccugcggaguaacugcaaagaagcuuaccauggagcugcucauccugaaggccaacgccaucaccaccauccugacggcggugaccuucugcuucgccagcggccagaacaucaccgaggaguucuaccaguccacgugcagcgccgucuccaagggguaccucggcgcccugcgcaccgggugguacaccagcgugaucaccaucgagcuguccaacaucaaggagaucaagugcaacggcaccgacgccaaggugaagcucaucaagcaggagcuggacaaguacaagaacgcggucacggaccugcagcuccugaugcagagcacccccgccaccggguccggcagcgccaucgccuccggcguggcggugugcaagguccugcaccucgagggggaggugaacaagaucaagagcgcccugcuguccaccaacaaggccguggucagccucuccggcugcggggugagcgugcugacguucaagguccuggaccucaagaacuacaucgacaagcagcugcugccgauccucaacaagcaguccugcagcauccccaacaucgagaccgugaucgaguuccagcagaagaacaaccggcugcuggagaucacccgcgaguucuccgugaacgccggcgucaccacgcccgugagcaccuacaugcucaccaacuccgagcugcugagccucaucaacgacaugcccaucaccaacgaccagaagaagcugaugagcaacaacgugcagaucguccggcagcaguccuacagcaucaugugcaucaucaaggaggaggugcuggccuacgugguccagcucccgcuguacggggugaucgacacgcccugcuggaagcugcacaccagcccccucugcaccaccaacacgaaggagggcuccaacaucugccugacccgcaccgaccggggcugguacugcgacaacgcgggguccgugagcuucuucccccaggccgagaccugcaagguccaguccaaccgcguguucugcgacacgaugaacagccugacccucccguccgaggucaaccugugcaacguggacaucuucaaccccaaguacgacugcaagaucaugaccagcaagaccgacguguccagcuccgucaucacgagccugggcgccaucguguccugcuacgggaagaccaagugcaccgccagcaacaagugccggggcaucaucaagaccuucuccaacggcugcgacuacgugagcaacaagggggucgacacgguguccgugggcaacacccucuacuacgucaacaagcaggaggggcagagccuguacgugaagggcgagcccaucaucaacuucuacgacccccugguguucccgagcgacgaguucgacgccuccaucagccaggucaacgagaagaucaaccagucccucgcguucauccgcaagagcgacgagcugcugcacaacgugaacgccgggaaguccaccaccaacaucaugaucaccacgaucaucaucgugaucaucgucauccuccugagccugaucgccgugggccuccugcuguacugcaaggcccggugaggacuaguguccaccugucccuccugggcugcuggauugucucguuuuccugccaaauaaacaggaucagcgcuuuacagaucuaaaaaaaaaaaaaaaaaaaaaaaaaaaaaaaaaaaaaaaaaaaaaaaaaaaaaaaaaaaaaaaaugcaucccccccccccccccccccccccccccccccaaaggcucuuuucagagccaccagaauu

SEQ ID NO: 8112 - RNA, 1850 nt, Artificial Sequence
  mRNA product Design e-5 comprising derived and/or modified sequence from HRSV(A2)__F-del_DSCav1_mut8 (opt2)
gggagagcggcucggccauuuugucccagucaguccggaggcugcggcugcagaaguaccgccugcggaguaacugcaaagaagcuuaccauggagcuccucauccucaaggccaacgccaucaccaccauccucaccgccgucaccuucugcuucgccuccggccagaacaucaccgaggaguucuaccaguccaccugcuccgccgucuccaagggcuaccucggcgcccuccgcaccggcugguacaccuccgucaucaccaucgagcucuccaacaucaaggagaucaagugcaacggcaccgacgccaaggucaagcucaucaagcaggagcucgacaaguacaagaacgccgucaccgaccuccagcuccucaugcaguccacccccgccaccggcuccggcuccgccaucgccuccggcgucgccgucugcaagguccuccaccucgagggcgaggucaacaagaucaaguccgcccuccucuccaccaacaaggccgucgucucccucuccggcugcggcgucuccguccucaccuucaagguccucgaccucaagaacuacaucgacaagcagcuccuccccauccucaacaagcaguccugcuccauccccaacaucgagaccgucaucgaguuccagcagaagaacaaccgccuccucgagaucacccgcgaguucuccgucaacgccggcgucaccacccccgucuccaccuacaugcucaccaacuccgagcuccucucccucaucaacgacaugcccaucaccaacgaccagaagaagcucauguccaacaacguccagaucguccgccagcaguccuacuccaucaugugcaucaucaaggaggagguccucgccuacgucguccagcucccccucuacggcgucaucgacacccccugcuggaagcuccacaccuccccccucugcaccaccaacaccaaggagggcuccaacaucugccucacccgcaccgaccgcggcugguacugcgacaacgccggcuccgucuccuucuucccccaggccgagaccugcaagguccaguccaaccgcgucuucugcgacaccaugaacucccucacccuccccuccgaggucaaccucugcaacgucgacaucuucaaccccaaguacgacugcaagaucaugaccuccaagaccgacgucuccuccuccgucaucaccucccucggcgccaucgucuccugcuacggcaagaccaagugcaccgccuccaacaagugccgcggcaucaucaagaccuucuccaacggcugcgacuacgucuccaacaagggcgucgacaccgucuccgucggcaacacccucuacuacgucaacaagcaggagggccagucccucuacgucaagggcgagcccaucaucaacuucuacgacccccucgucuuccccuccgacgaguucgacgccuccaucucccaggucaacgagaagaucaaccagucccucgccuucauccgcaaguccgacgagcuccuccacaacgucaacgccggcaaguccaccaccaacaucaugaucaccaccaucaucaucgucaucaucgucauccuccucucccucaucgccgucggccuccuccucuacugcaaggcccgcugaggacuaguguccaccugucccuccugggcugcuggauugucucguuuuccugccaaauaaacaggaucagcgcuuuacagaucuaaaaaaaaaaaaaaaaaaaaaaaaaaaaaaaaaaaaaaaaaaaaaaaaaaaaaaaaaaaaaaaaugcaucccccccccccccccccccccccccccccccaaaggcucuuuucagagccaccagaauu

SEQ ID NO: 8113 - RNA, 1850 nt, Artificial Sequence
  mRNA product Design e-5 comprising derived and/or modified sequence from HRSV(A2)__F-del_DSCav1_mut8 (opt3)
gggagagcggcucggccauuuugucccagucaguccggaggcugcggcugcagaaguaccgccugcggaguaacugcaaagaagcuuaccauggagcugcucauccuuaaggccaacgcuauuaccacaauacugacugcagugacguucugcuuugccagcggccagaauaucaccgaagaguucuaccaauccacauguucugcggucucaaaaggguauuugggagcuuuaagaacugguugguacaccaguguuauuacaaucgaacugagcaacauuaaggagaucaaaugcaauggcaccgacgccaaggugaaacuaauaaagcaggaacucgauaaguauaaaaacgcaguaacugaccugcagcuucugaugcaguccacacccgccaccgggucuggaucggcuaucgcaucaggcguggccgucuguaagguguugcaccucgagggugagguuaauaaaauuaagagcgcucugcugaguacgaacaaagccguggucucccucucugggugcggagugagcguauuaacuuuuaagguucuggaucuuaagaauuacaucgacaaacaauugcugccuauucuaaacaagcaguccuguucaaucccaaauauagaaaccgugauugaguuccagcagaaaaacaauaggcuccuggaaaucacacgggaguuuagugucaacgcgggcgugacuaccccggugagcacauauaugcuuaccaauucugagcuguugucccucauuaacgauaugcccaucacgaaugaccaaaagaaacugaugucaaacaacguccagaucguucgccagcagagcuacaguauuaugugcauaaucaaggaagagguguuagcauauguagugcaacugccucucuacggcgucauugauacuccauguuggaaacuucauacaucuccccugugcaccacuaauacaaaggaaggguccaacaucuguuugacccgaacggaccguggaugguacugcgauaaugccgguagcgugucguucuuuccucaggcugagaccuguaagguucagucuaacagaguguucugcgacacaaugaacucccuaacucugccaucagaagucaaucucugcaauguggauauauuuaaccccaaauaugacuguaagauuaugaccaguaaaacagauguaagcuccucuguuaucacuagccugggcgccaucgugucaugcuacgggaagaccaaauguacagcaaguaauaagugcaggggaauuaucaagaccuucuccaacggcugugacuaugucagcaauaaagguguggacacugucucuguggggaacacgcuuuacuauguuaauaagcaagagggacagucacuguacgugaaaggcgagccuauuauaaacuuuuaugauccauugguauucccgagugacgaauuugaugcuagcaucucccaggucaaugagaagauuaaccagucucucgccuucauccggaaaucggacgaacuguuacacaacgugaaugcgggcaagagcacaaccaacaucaugauuacuaccauaaucauuguuaucauugugauccugcuaucccucauagccgucgggcugcuuuuguacugcaaggcacgcugaggacuaguguccaccugucccuccugggcugcuggauugucucguuuuccugccaaauaaacaggaucagcgcuuuacagaucuaaaaaaaaaaaaaaaaaaaaaaaaaaaaaaaaaaaaaaaaaaaaaaaaaaaaaaaaaaaaaaaaugcaucccccccccccccccccccccccccccccccaaaggcucuuuucagagccaccagaauu

SEQ ID NO: 8114 - RNA, 1850 nt, Artificial Sequence
  mRNA product Design e-5 comprising derived and/or modified sequence from HRSV(A2)__F-del_DSCav1_mut8 (opt4)
gggagagcggcucggccauuuugucccagucaguccggaggcugcggcugcagaaguaccgccugcggaguaacugcaaagaagcuuaccauggagcugcugauccugaaggccaacgccaucaccaccauccugaccgccgugaccuucugcuucgccagcggccagaacaucaccgaggaguucuaccagagcaccugcagcgccgugagcaagggcuaccugggcgcccugagaaccggcugguacaccagcgugaucaccaucgagcugagcaacaucaaggagaucaagugcaacggcaccgacgccaaggugaagcugaucaagcaggagcuggacaaguacaagaacgccgugaccgaccugcagcugcugaugcagagcacccccgccaccggcagcggcagcgccaucgccagcggcguggccgugugcaaggugcugcaccuggagggcgaggugaacaagaucaagagcgcccugcugagcaccaacaaggccguggugagccugagcggcugcggcgugagcgugcugaccuucaaggugcuggaccugaagaacuacaucgacaagcagcugcugcccauccugaacaagcagagcugcagcauccccaacaucgagaccgugaucgaguuccagcagaagaacaacagacugcuggagaucaccagagaguucagcgugaacgccggcgugaccacccccgugagcaccuacaugcugaccaacagcgagcugcugagccugaucaacgacaugcccaucaccaacgaccagaagaagcugaugagcaacaacgugcagaucgugagacagcagagcuacagcaucaugugcaucaucaaggaggaggugcuggccuacguggugcagcugccccuguacggcgugaucgacacccccugcuggaagcugcacaccagcccccugugcaccaccaacaccaaggagggcagcaacaucugccugaccagaaccgacagaggcugguacugcgacaacgccggcagcgugagcuucuucccccaggccgagaccugcaaggugcagagcaacagaguguucugcgacaccaugaacagccugacccugcccagcgaggugaaccugugcaacguggacaucuucaaccccaaguacgacugcaagaucaugaccagcaagaccgacgugagcagcagcgugaucaccagccugggcgccaucgugagcugcuacggcaagaccaagugcaccgccagcaacaagugcagaggcaucaucaagaccuucagcaacggcugcgacuacgugagcaacaagggcguggacaccgugagcgugggcaacacccuguacuacgugaacaagcaggagggccagagccuguacgugaagggcgagcccaucaucaacuucuacgacccccugguguuccccagcgacgaguucgacgccagcaucagccaggugaacgagaagaucaaccagagccuggccuucaucagaaagagcgacgagcugcugcacaacgugaacgccggcaagagcaccaccaacaucaugaucaccaccaucaucaucgugaucaucgugauccugcugagccugaucgccgugggccugcugcuguacugcaaggccagaugaggacuaguguccaccugucccuccugggcugcuggauugucucguuuuccugccaaauaaacaggaucagcgcuuuacagaucuaaaaaaaaaaaaaaaaaaaaaaaaaaaaaaaaaaaaaaaaaaaaaaaaaaaaaaaaaaaaaaaaugcaucccccccccccccccccccccccccccccccaaaggcucuuuucagagccaccagaauu

SEQ ID NO: 8115 - RNA, 1850 nt, Artificial Sequence
  mRNA product Design e-5 comprising derived and/or modified sequence from HRSV(A2)__F-del_DSCav1_mut8 (opt5)
gggagagcggcucggccauuuugucccagucaguccggaggcugcggcugcagaaguaccgccugcggaguaacugcaaagaagcuuaccauggagcugcucauccugaaggccaacgcuauuaccacaauccuuacggccgugaccuucugcuuugcgagcggccagaauauuacagaagaguucuaccaauccaccuguucugcugucagcaaaggguaucugggagcccucagaacaggcugguacaccuccguuaucacaauugaacugucuaacaucaaggagaucaaaugcaaugggaccgacgccaaggugaaacuuauuaagcaggaacuggauaaguauaaaaacgcugugacggaccuccagcugcugaugcagagcacccccgccacaggauccggcucugcuaucgccagcggggucgcgguguguaagguucuccaccuggagggagaggugaauaaaauuaaguccgcccuucugagcaccaacaaagcugucgugucucucuccggcugcggcguuagcgugcugacauuuaagguccuugaucugaagaauuacaucgacaaacaacuccugccuauucugaacaagcagucuuguuccaucccgaauauugaaaccgugaucgaguuccagcagaaaaacaaucggcuccuggaaaucacgcgcgaguuuagcgugaacgccggggucacaacccccguuucuacauauaugcuuaccaauuccgagcugcucagccugauuaacgauaugccuaucaccaaugaccaaaagaaacuuauguccaacaacgugcagauugugagacagcagucuuacagcaucaugugcauuaucaaggaagagguccuggcuuaugugguucaacucccccuguacggagugaucgauacaccuuguuggaaacugcauacgagcccccucugcaccacaaauaccaaggaaggcagcaacauuugucugacacggaccgaccgcgggugguacugcgauaaugccggaucugucuccuucuuuccucaggcggagacguguaaggugcagagcaacagaguuuucugcgacacaaugaacucucuuacccugccgagcgaagugaaucucugcaaugucgauaucuuuaaccccaaauaugacuguaagauuaugaccuccaaaacagaugugucuagcuccgucaucaccagccugggcgccauugugucuugcuacgggaagacaaaauguacggcuuccaauaagugccggggaaucaucaagaccuucagcaacggcugugacuauguuucuaauaaaggcguggacacagucuccguggggaacacccuuuacuauguuaauaagcaagagggacagagccuguacgugaaaggcgagccuauuaucaacuuuuaugauccccucgucuucccuuccgacgaauuugaugccucuauuagccaggugaaugagaagaucaaccagucccuggcuuucauucgcaaaucugacgaacugcuccacaacgugaaugccgggaaguccacaaccaacaucaugauuacgaccaucaucauuguuaucauugucauccugcuuucccugauugccgugggacuccugcuguacugcaaggcuagaugaggacuaguguccaccugucccuccugggcugcuggauugucucguuuuccugccaaauaaacaggaucagcgcuuuacagaucuaaaaaaaaaaaaaaaaaaaaaaaaaaaaaaaaaaaaaaaaaaaaaaaaaaaaaaaaaaaaaaaaugcaucccccccccccccccccccccccccccccccaaaggcucuuuucagagccaccagaauu

SEQ ID NO: 8116 - RNA, 1850 nt, Artificial Sequence
  mRNA product Design e-5 comprising derived and/or modified sequence from HRSV(A2)__F-del_DSCav1_mut8 (opt6)
gggagagcggcucggccauuuugucccagucaguccggaggcugcggcugcagaaguaccgccugcggaguaacugcaaagaagcuuaccauggaacuacucauauugaaagccaacgcaaucacaacaauacuaaccgccguaacauuuugcuucgcgucaggccaaaauauaacagaagaauuuuaccaaucaacaugcuccgccguaucaaaaggauaccuaggugcauuacgaaccgguugguacacaucaguaaucacaauagaacuuuccaacauuaaagaaauaaaaugcaauggcacagacgcaaaagucaaacuaauaaaacaagaacuagacaaauauaaaaacgccgucacagacuuacaacuauuaaugcaaagcacaccagcaacaggauccggaucagcaauagcaucaggaguagccgucuguaaaguacuacaccuagaaggcgaaguuaauaaaauuaaaucagcuuuauuaucaaccaacaaagcaguaguaucacuauccggaugcggagucuccguccuaacauucaaaguacuagaccucaagaauuacauagauaaacaacuacuaccaauacucaacaaacaaucauguucaauaccaaacaucgaaaccgucauagaauuucaacaaaaaaauaauagacucuuagaaauaacacgagaauuuagcguaaacgcaggagucacaaccccugucucaacauacaugcuaaccaauuccgaauuauuaucacucauaaaugacaugccaauaacuaaugaccaaaaaaaacuuaugucaaacaacguacaaauaguaagacaacaaucauauucaauaaugugcauaaucaaagaagaaguuuuagcauauguaguacaacuaccacuauauggcgucauagacacaccaugcuggaaauuacacacaucaccucuaugcacaacaaacacaaaagaaggaagcaacauuugccuaaccagaaccgauagaggaugguacugcgauaacgcaggcucaguaucauucuucccucaagccgaaacuugcaaaguccaaucaaauagagucuucugcgauacaaugaacuccuuaacuuuaccaucagaaguaaaucuaugcaacguagauaucuuuaauccaaaauacgauugcaaaaucaugacaucaaaaacagauguaucaucuaguguaauuaccucccuaggagcaauaguaagcugcuacggaaaaacaaaaugcaccgccucuaacaaaugucguggaauaauaaaaacauucucaaacggaugcgauuauguaucaaauaaaggugucgacaccguaucaguaggcaauacacuauacuauguaaauaaacaagaaggacaaucacucuacgucaaaggugaaccaauaauaaacuucuacgacccacuuguauucccaagcgacgaauuugacgcaucaauaagccaaguaaacgaaaaaauaaaccaaucacuagcauucaucagaaaaucagacgaacuacuccacaauguaaaugcaggaaaaucaacaaccaauaucaugauaacaaccauaauaauagucauaauaguaauacuauuaucccucauagccguuggacuacuccuauauuguaaagcacgauaaggacuaguguccaccugucccuccugggcugcuggauugucucguuuuccugccaaauaaacaggaucagcgcuuuacagaucuaaaaaaaaaaaaaaaaaaaaaaaaaaaaaaaaaaaaaaaaaaaaaaaaaaaaaaaaaaaaaaaaugcaucccccccccccccccccccccccccccccccaaaggcucuuuucagagccaccagaauu

SEQ ID NO: 8117 - RNA, 1850 nt, Artificial Sequence
  mRNA product Design e-5 comprising derived and/or modified sequence from HRSV(A2)__F-del_DSCav1_mut8 (opt11)
gggagagcggcucggccauuuugucccagucaguccggaggcugcggcugcagaaguaccgccugcggaguaacugcaaagaagcuuaccauggaacuccucauccucaaagccaacgccaucaccaccauacucaccgcaguaaccuucugcuucgcauccggccaaaacaucacagaagaguucuaccagaguaccugcuccgccgucuccaaaggcuaccuuggcgcccuccguaccgggugguacacauccgucaucacaaucgaacucuccaacaucaaagaaauaaagugcaacggcacagacgccaaaguaaaacugauaaagcaagaacucgacaaauacaaaaacgccguaaccgaccuccagcuacuaaugcaauccacucccgccaccggcagcggauccgccaucgccuccggaguagccgucuguaaagucuuacaccucgaaggcgaagugaacaaaaucaaauccgcccuacucucaaccaacaaagccguaguaucacucuccgggugcggcguuucagugcuaacguucaaaguccuugaccucaaaaacuacaucgacaaacaacuccuccccauccuaaauaaacaauccugcuccauacccaacaucgagacugucaucgaguuccagcagaaaaacaaccgacuccucgaaaucacacgcgaguucucugucaacgccggcgucacaacccccgucuccacauacaugcucaccaacagcgaacuccucucccuaaucaaugacaugcccaucaccaacgaccaaaagaaacucaugucaaacaacguccaaaucguccgccaacaauccuacagcaucaugugcaucaucaaagaagaaguucucgcauacguaguacaacucccccucuacggagugaucgacacccccugcuggaaacuacacaccagcccgcuuugcaccacaaacaccaaggaaggcuccaacaucugccucacucgaaccgaccgcggcugguacugcgacaacgcaggcuccgucaguuucuuuccccaagcagaaacaugcaaaguccaauccaaccgaguauucugcgacaccaugaacucccucacccuaccauccgaaguuaaccuaugcaacguggacaucuucaaccccaaguacgacugcaaaauuaugaccuccaaaaccgacguauccuccagcgucaucaccagccucggagcaauagucuccugcuacggcaagaccaagugcaccgcuuccaacaagugucgcggaaucaucaaaaccuucucaaacggcugcgacuacgucuccaacaaaggcgucgacaccguauccguaggaaacacccuauacuacgucaacaaacaagaaggacaaucccucuaugucaaaggcgaacccaucaucaauuucuacgacccccuagucuucccuuccgacgaguucgacgcguccaucagccaagucaaugaaaagaucaaccagagccuggcauucauccgcaaauccgacgaacuccuccacaacgucaacgcgggaaaauccacgacaaacaucaugaucaccaccaucaucaucgucaucauagucauucuccuuucucucaucgccgugggacuacuucucuacugcaaagcccgauaaggacuaguguccaccugucccuccugggcugcuggauugucucguuuuccugccaaauaaacaggaucagcgcuuuacagaucuaaaaaaaaaaaaaaaaaaaaaaaaaaaaaaaaaaaaaaaaaaaaaaaaaaaaaaaaaaaaaaaaugcaucccccccccccccccccccccccccccccccaaaggcucuuuucagagccaccagaauu

SEQ ID NO: 8118 - RNA, 1917 nt, Artificial Sequence
  mRNA product Design e-6 comprising derived and/or modified sequence from HRSV(A2)__F-del_DSCav1_mut8 (opt1)
gggagagcggcucggccauuuugucccagucaguccggaggcugcggcugcagaaguaccgccugcggaguaacugcaaagaagcuuaccauggagcugcucauccugaaggccaacgccaucaccaccauccugacggcggugaccuucugcuucgccagcggccagaacaucaccgaggaguucuaccaguccacgugcagcgccgucuccaagggguaccucggcgcccugcggaccggcugguacaccuccgugaucaccaucgagcugagcaacaucaaggagaucaagugcaacgggaccgacgccaaggugaagcucaucaagcaggagcuggacaaguacaagaacgcggucacggaccugcagcuccugaugcaguccaccccggcaaccggcuccggcuccgccaucgcgagcggcgucgccgugugcaaggugcugcaccucgagggggaggucaacaagaucaagagcgcccugcuguccaccaacaaggccguggugagccucuccggcugcggcgucagcgugcugaccuucaaggugcuggaccucaagaacuacaucgacaagcagcugcugcccauccugaacaagcagagcugcuccauccccaacaucgagacggugaucgaguuccagcagaagaacaaccggcuccuggagaucacccgcgaguucagcgugaacgccggggucaccacccccguguccacguacaugcugaccaacagcgagcuccugucccugaucaacgacaugccgaucaccaacgaccagaagaagcucaugagcaacaacgugcagaucguccggcagcaguccuacagcaucaugugcaucaucaaggaggaggugcuggcguacgugguccagcugccccucuacggcgugaucgacacccccugcuggaagcugcacacgagcccccugugcaccaccaacaccaaggagggguccaacaucugccucacgcgcaccgaccggggcugguacugcgacaacgccggcagcgucuccuucuucccgcaggccgagaccugcaaggugcagagcaaccgcguguucugcgacaccaugaacucccugacgcugcccagcgagguaaaccucugcaacgucgacaucuucaaccccaaguacgacugcaagaucaugaccuccaagaccgacgugagcuccagcgugaucaccucccugggggccaucgucagcugcuacggcaagacgaagugcaccgccagcaacaagugccgggggaucaucaagaccuucuccaacggcugcgacuacgugagcaacaagggcguggacaccguguccgucgggaacacccuguacuacgugaacaagcaggagggccagagccucuacgugaagggggagcccaucaucaacuucuacgacccgcuggucuuccccuccgacgaguucgacgcgagcaucucccaggugaacgagaagaucaaccagagccuggccuucauccgcaaguccgacgagcugcuccacaacgugaacgccggcaagagcacgaccaacaucaugaucaccaccaucaucaucgucaucaucgugauccugcugucccucaucgccguggggcugcugcucuacugcaaggcccggugaggacuaguacuggcugcaucucccuuuccucuguccuccauccuucucccaggauggugaagggggaccugguacccagugauccccaccccaggauccuaaaucaugacuuaccugcuaauaaaaacucauuggaaaagugagaagaucuaaaaaaaaaaaaaaaaaaaaaaaaaaaaaaaaaaaaaaaaaaaaaaaaaaaaaaaaaaaaaaaaugcaucccccccccccccccccccccccccccccccaaaggcucuuuucagagccaccagaauu

SEQ ID NO: 8119 - RNA, 1917 nt, Artificial Sequence
  mRNA product Design e-6 comprising derived and/or modified sequence from HRSV(A2)__F-del_DSCav1_mut8 (opt1)
gggagagcggcucggccauuuugucccagucaguccggaggcugcggcugcagaaguaccgccugcggaguaacugcaaagaagcuuaccauggagcugcucauccugaaggccaacgccaucaccaccauccugacggcggugaccuucugcuucgccagcggccagaacaucaccgaggaguucuaccaguccacgugcagcgccgucuccaagggguaccucggcgcccugcgcaccgggugguacaccagcgugaucaccaucgagcuguccaacaucaaggagaucaagugcaacggcaccgacgccaaggugaagcucaucaagcaggagcuggacaaguacaagaacgcggucacggaccugcagcuccugaugcagagcacccccgccaccggguccggcagcgccaucgccuccggcguggcggugugcaagguccugcaccucgagggggaggugaacaagaucaagagcgcccugcuguccaccaacaaggccguggucagccucuccggcugcggggugagcgugcugacguucaagguccuggaccucaagaacuacaucgacaagcagcugcugccgauccucaacaagcaguccugcagcauccccaacaucgagaccgugaucgaguuccagcagaagaacaaccggcugcuggagaucacccgcgaguucuccgugaacgccggcgucaccacgcccgugagcaccuacaugcucaccaacuccgagcugcugagccucaucaacgacaugcccaucaccaacgaccagaagaagcugaugagcaacaacgugcagaucguccggcagcaguccuacagcaucaugugcaucaucaaggaggaggugcuggccuacgugguccagcucccgcuguacggggugaucgacacgcccugcuggaagcugcacaccagcccccucugcaccaccaacacgaaggagggcuccaacaucugccugacccgcaccgaccggggcugguacugcgacaacgcgggguccgugagcuucuucccccaggccgagaccugcaagguccaguccaaccgcguguucugcgacacgaugaacagccugacccucccguccgaggucaaccugugcaacguggacaucuucaaccccaaguacgacugcaagaucaugaccagcaagaccgacguguccagcuccgucaucacgagccugggcgccaucguguccugcuacgggaagaccaagugcaccgccagcaacaagugccggggcaucaucaagaccuucuccaacggcugcgacuacgugagcaacaagggggucgacacgguguccgugggcaacacccucuacuacgucaacaagcaggaggggcagagccuguacgugaagggcgagcccaucaucaacuucuacgacccccugguguucccgagcgacgaguucgacgccuccaucagccaggucaacgagaagaucaaccagucccucgcguucauccgcaagagcgacgagcugcugcacaacgugaacgccgggaaguccaccaccaacaucaugaucaccacgaucaucaucgugaucaucgucauccuccugagccugaucgccgugggccuccugcuguacugcaaggcccggugaggacuaguacuggcugcaucucccuuuccucuguccuccauccuucucccaggauggugaagggggaccugguacccagugauccccaccccaggauccuaaaucaugacuuaccugcuaauaaaaacucauuggaaaagugagaagaucuaaaaaaaaaaaaaaaaaaaaaaaaaaaaaaaaaaaaaaaaaaaaaaaaaaaaaaaaaaaaaaaaugcaucccccccccccccccccccccccccccccccaaaggcucuuuucagagccaccagaauu

SEQ ID NO: 8120 - RNA, 1917 nt, Artificial Sequence
  mRNA product Design e-6 comprising derived and/or modified sequence from HRSV(A2)__F-del_DSCav1_mut8 (opt2)
gggagagcggcucggccauuuugucccagucaguccggaggcugcggcugcagaaguaccgccugcggaguaacugcaaagaagcuuaccauggagcuccucauccucaaggccaacgccaucaccaccauccucaccgccgucaccuucugcuucgccuccggccagaacaucaccgaggaguucuaccaguccaccugcuccgccgucuccaagggcuaccucggcgcccuccgcaccggcugguacaccuccgucaucaccaucgagcucuccaacaucaaggagaucaagugcaacggcaccgacgccaaggucaagcucaucaagcaggagcucgacaaguacaagaacgccgucaccgaccuccagcuccucaugcaguccacccccgccaccggcuccggcuccgccaucgccuccggcgucgccgucugcaagguccuccaccucgagggcgaggucaacaagaucaaguccgcccuccucuccaccaacaaggccgucgucucccucuccggcugcggcgucuccguccucaccuucaagguccucgaccucaagaacuacaucgacaagcagcuccuccccauccucaacaagcaguccugcuccauccccaacaucgagaccgucaucgaguuccagcagaagaacaaccgccuccucgagaucacccgcgaguucuccgucaacgccggcgucaccacccccgucuccaccuacaugcucaccaacuccgagcuccucucccucaucaacgacaugcccaucaccaacgaccagaagaagcucauguccaacaacguccagaucguccgccagcaguccuacuccaucaugugcaucaucaaggaggagguccucgccuacgucguccagcucccccucuacggcgucaucgacacccccugcuggaagcuccacaccuccccccucugcaccaccaacaccaaggagggcuccaacaucugccucacccgcaccgaccgcggcugguacugcgacaacgccggcuccgucuccuucuucccccaggccgagaccugcaagguccaguccaaccgcgucuucugcgacaccaugaacucccucacccuccccuccgaggucaaccucugcaacgucgacaucuucaaccccaaguacgacugcaagaucaugaccuccaagaccgacgucuccuccuccgucaucaccucccucggcgccaucgucuccugcuacggcaagaccaagugcaccgccuccaacaagugccgcggcaucaucaagaccuucuccaacggcugcgacuacgucuccaacaagggcgucgacaccgucuccgucggcaacacccucuacuacgucaacaagcaggagggccagucccucuacgucaagggcgagcccaucaucaacuucuacgacccccucgucuuccccuccgacgaguucgacgccuccaucucccaggucaacgagaagaucaaccagucccucgccuucauccgcaaguccgacgagcuccuccacaacgucaacgccggcaaguccaccaccaacaucaugaucaccaccaucaucaucgucaucaucgucauccuccucucccucaucgccgucggccuccuccucuacugcaaggcccgcugaggacuaguacuggcugcaucucccuuuccucuguccuccauccuucucccaggauggugaagggggaccugguacccagugauccccaccccaggauccuaaaucaugacuuaccugcuaauaaaaacucauuggaaaagugagaagaucuaaaaaaaaaaaaaaaaaaaaaaaaaaaaaaaaaaaaaaaaaaaaaaaaaaaaaaaaaaaaaaaaugcaucccccccccccccccccccccccccccccccaaaggcucuuuucagagccaccagaauu

SEQ ID NO: 8121 - RNA, 1917 nt, Artificial Sequence
  mRNA product Design e-6 comprising derived and/or modified sequence from HRSV(A2)__F-del_DSCav1_mut8 (opt3)
gggagagcggcucggccauuuugucccagucaguccggaggcugcggcugcagaaguaccgccugcggaguaacugcaaagaagcuuaccauggagcugcucauccuuaaggccaacgcuauuaccacaauacugacugcagugacguucugcuuugccagcggccagaauaucaccgaagaguucuaccaauccacauguucugcggucucaaaaggguauuugggagcuuuaagaacugguugguacaccaguguuauuacaaucgaacugagcaacauuaaggagaucaaaugcaauggcaccgacgccaaggugaaacuaauaaagcaggaacucgauaaguauaaaaacgcaguaacugaccugcagcuucugaugcaguccacacccgccaccgggucuggaucggcuaucgcaucaggcguggccgucuguaagguguugcaccucgagggugagguuaauaaaauuaagagcgcucugcugaguacgaacaaagccguggucucccucucugggugcggagugagcguauuaacuuuuaagguucuggaucuuaagaauuacaucgacaaacaauugcugccuauucuaaacaagcaguccuguucaaucccaaauauagaaaccgugauugaguuccagcagaaaaacaauaggcuccuggaaaucacacgggaguuuagugucaacgcgggcgugacuaccccggugagcacauauaugcuuaccaauucugagcuguugucccucauuaacgauaugcccaucacgaaugaccaaaagaaacugaugucaaacaacguccagaucguucgccagcagagcuacaguauuaugugcauaaucaaggaagagguguuagcauauguagugcaacugccucucuacggcgucauugauacuccauguuggaaacuucauacaucuccccugugcaccacuaauacaaaggaaggguccaacaucuguuugacccgaacggaccguggaugguacugcgauaaugccgguagcgugucguucuuuccucaggcugagaccuguaagguucagucuaacagaguguucugcgacacaaugaacucccuaacucugccaucagaagucaaucucugcaauguggauauauuuaaccccaaauaugacuguaagauuaugaccaguaaaacagauguaagcuccucuguuaucacuagccugggcgccaucgugucaugcuacgggaagaccaaauguacagcaaguaauaagugcaggggaauuaucaagaccuucuccaacggcugugacuaugucagcaauaaagguguggacacugucucuguggggaacacgcuuuacuauguuaauaagcaagagggacagucacuguacgugaaaggcgagccuauuauaaacuuuuaugauccauugguauucccgagugacgaauuugaugcuagcaucucccaggucaaugagaagauuaaccagucucucgccuucauccggaaaucggacgaacuguuacacaacgugaaugcgggcaagagcacaaccaacaucaugauuacuaccauaaucauuguuaucauugugauccugcuaucccucauagccgucgggcugcuuuuguacugcaaggcacgcugaggacuaguacuggcugcaucucccuuuccucuguccuccauccuucucccaggauggugaagggggaccugguacccagugauccccaccccaggauccuaaaucaugacuuaccugcuaauaaaaacucauuggaaaagugagaagaucuaaaaaaaaaaaaaaaaaaaaaaaaaaaaaaaaaaaaaaaaaaaaaaaaaaaaaaaaaaaaaaaaugcaucccccccccccccccccccccccccccccccaaaggcucuuuucagagccaccagaauu

SEQ ID NO: 8122 - RNA, 1917 nt, Artificial Sequence
  mRNA product Design e-6 comprising derived and/or modified sequence from HRSV(A2)__F-del_DSCav1_mut8 (opt4)
gggagagcggcucggccauuuugucccagucaguccggaggcugcggcugcagaaguaccgccugcggaguaacugcaaagaagcuuaccauggagcugcugauccugaaggccaacgccaucaccaccauccugaccgccgugaccuucugcuucgccagcggccagaacaucaccgaggaguucuaccagagcaccugcagcgccgugagcaagggcuaccugggcgcccugagaaccggcugguacaccagcgugaucaccaucgagcugagcaacaucaaggagaucaagugcaacggcaccgacgccaaggugaagcugaucaagcaggagcuggacaaguacaagaacgccgugaccgaccugcagcugcugaugcagagcacccccgccaccggcagcggcagcgccaucgccagcggcguggccgugugcaaggugcugcaccuggagggcgaggugaacaagaucaagagcgcccugcugagcaccaacaaggccguggugagccugagcggcugcggcgugagcgugcugaccuucaaggugcuggaccugaagaacuacaucgacaagcagcugcugcccauccugaacaagcagagcugcagcauccccaacaucgagaccgugaucgaguuccagcagaagaacaacagacugcuggagaucaccagagaguucagcgugaacgccggcgugaccacccccgugagcaccuacaugcugaccaacagcgagcugcugagccugaucaacgacaugcccaucaccaacgaccagaagaagcugaugagcaacaacgugcagaucgugagacagcagagcuacagcaucaugugcaucaucaaggaggaggugcuggccuacguggugcagcugccccuguacggcgugaucgacacccccugcuggaagcugcacaccagcccccugugcaccaccaacaccaaggagggcagcaacaucugccugaccagaaccgacagaggcugguacugcgacaacgccggcagcgugagcuucuucccccaggccgagaccugcaaggugcagagcaacagaguguucugcgacaccaugaacagccugacccugcccagcgaggugaaccugugcaacguggacaucuucaaccccaaguacgacugcaagaucaugaccagcaagaccgacgugagcagcagcgugaucaccagccugggcgccaucgugagcugcuacggcaagaccaagugcaccgccagcaacaagugcagaggcaucaucaagaccuucagcaacggcugcgacuacgugagcaacaagggcguggacaccgugagcgugggcaacacccuguacuacgugaacaagcaggagggccagagccuguacgugaagggcgagcccaucaucaacuucuacgacccccugguguuccccagcgacgaguucgacgccagcaucagccaggugaacgagaagaucaaccagagccuggccuucaucagaaagagcgacgagcugcugcacaacgugaacgccggcaagagcaccaccaacaucaugaucaccaccaucaucaucgugaucaucgugauccugcugagccugaucgccgugggccugcugcuguacugcaaggccagaugaggacuaguacuggcugcaucucccuuuccucuguccuccauccuucucccaggauggugaagggggaccugguacccagugauccccaccccaggauccuaaaucaugacuuaccugcuaauaaaaacucauuggaaaagugagaagaucuaaaaaaaaaaaaaaaaaaaaaaaaaaaaaaaaaaaaaaaaaaaaaaaaaaaaaaaaaaaaaaaaugcaucccccccccccccccccccccccccccccccaaaggcucuuuucagagccaccagaauu

SEQ ID NO: 8123 - RNA, 1917 nt, Artificial Sequence
  mRNA product Design e-6 comprising derived and/or modified sequence from HRSV(A2)__F-del_DSCav1_mut8 (opt5)
gggagagcggcucggccauuuugucccagucaguccggaggcugcggcugcagaaguaccgccugcggaguaacugcaaagaagcuuaccauggagcugcucauccugaaggccaacgcuauuaccacaauccuuacggccgugaccuucugcuuugcgagcggccagaauauuacagaagaguucuaccaauccaccuguucugcugucagcaaaggguaucugggagcccucagaacaggcugguacaccuccguuaucacaauugaacugucuaacaucaaggagaucaaaugcaaugggaccgacgccaaggugaaacuuauuaagcaggaacuggauaaguauaaaaacgcugugacggaccuccagcugcugaugcagagcacccccgccacaggauccggcucugcuaucgccagcggggucgcgguguguaagguucuccaccuggagggagaggugaauaaaauuaaguccgcccuucugagcaccaacaaagcugucgugucucucuccggcugcggcguuagcgugcugacauuuaagguccuugaucugaagaauuacaucgacaaacaacuccugccuauucugaacaagcagucuuguuccaucccgaauauugaaaccgugaucgaguuccagcagaaaaacaaucggcuccuggaaaucacgcgcgaguuuagcgugaacgccggggucacaacccccguuucuacauauaugcuuaccaauuccgagcugcucagccugauuaacgauaugccuaucaccaaugaccaaaagaaacuuauguccaacaacgugcagauugugagacagcagucuuacagcaucaugugcauuaucaaggaagagguccuggcuuaugugguucaacucccccuguacggagugaucgauacaccuuguuggaaacugcauacgagcccccucugcaccacaaauaccaaggaaggcagcaacauuugucugacacggaccgaccgcgggugguacugcgauaaugccggaucugucuccuucuuuccucaggcggagacguguaaggugcagagcaacagaguuuucugcgacacaaugaacucucuuacccugccgagcgaagugaaucucugcaaugucgauaucuuuaaccccaaauaugacuguaagauuaugaccuccaaaacagaugugucuagcuccgucaucaccagccugggcgccauugugucuugcuacgggaagacaaaauguacggcuuccaauaagugccggggaaucaucaagaccuucagcaacggcugugacuauguuucuaauaaaggcguggacacagucuccguggggaacacccuuuacuauguuaauaagcaagagggacagagccuguacgugaaaggcgagccuauuaucaacuuuuaugauccccucgucuucccuuccgacgaauuugaugccucuauuagccaggugaaugagaagaucaaccagucccuggcuuucauucgcaaaucugacgaacugcuccacaacgugaaugccgggaaguccacaaccaacaucaugauuacgaccaucaucauuguuaucauugucauccugcuuucccugauugccgugggacuccugcuguacugcaaggcuagaugaggacuaguacuggcugcaucucccuuuccucuguccuccauccuucucccaggauggugaagggggaccugguacccagugauccccaccccaggauccuaaaucaugacuuaccugcuaauaaaaacucauuggaaaagugagaagaucuaaaaaaaaaaaaaaaaaaaaaaaaaaaaaaaaaaaaaaaaaaaaaaaaaaaaaaaaaaaaaaaaugcaucccccccccccccccccccccccccccccccaaaggcucuuuucagagccaccagaauu

SEQ ID NO: 8124 - RNA, 1917 nt, Artificial Sequence
  mRNA product Design e-6 comprising derived and/or modified sequence from HRSV(A2)__F-del_DSCav1_mut8 (opt6)
gggagagcggcucggccauuuugucccagucaguccggaggcugcggcugcagaaguaccgccugcggaguaacugcaaagaagcuuaccauggaacuacucauauugaaagccaacgcaaucacaacaauacuaaccgccguaacauuuugcuucgcgucaggccaaaauauaacagaagaauuuuaccaaucaacaugcuccgccguaucaaaaggauaccuaggugcauuacgaaccgguugguacacaucaguaaucacaauagaacuuuccaacauuaaagaaauaaaaugcaauggcacagacgcaaaagucaaacuaauaaaacaagaacuagacaaauauaaaaacgccgucacagacuuacaacuauuaaugcaaagcacaccagcaacaggauccggaucagcaauagcaucaggaguagccgucuguaaaguacuacaccuagaaggcgaaguuaauaaaauuaaaucagcuuuauuaucaaccaacaaagcaguaguaucacuauccggaugcggagucuccguccuaacauucaaaguacuagaccucaagaauuacauagauaaacaacuacuaccaauacucaacaaacaaucauguucaauaccaaacaucgaaaccgucauagaauuucaacaaaaaaauaauagacucuuagaaauaacacgagaauuuagcguaaacgcaggagucacaaccccugucucaacauacaugcuaaccaauuccgaauuauuaucacucauaaaugacaugccaauaacuaaugaccaaaaaaaacuuaugucaaacaacguacaaauaguaagacaacaaucauauucaauaaugugcauaaucaaagaagaaguuuuagcauauguaguacaacuaccacuauauggcgucauagacacaccaugcuggaaauuacacacaucaccucuaugcacaacaaacacaaaagaaggaagcaacauuugccuaaccagaaccgauagaggaugguacugcgauaacgcaggcucaguaucauucuucccucaagccgaaacuugcaaaguccaaucaaauagagucuucugcgauacaaugaacuccuuaacuuuaccaucagaaguaaaucuaugcaacguagauaucuuuaauccaaaauacgauugcaaaaucaugacaucaaaaacagauguaucaucuaguguaauuaccucccuaggagcaauaguaagcugcuacggaaaaacaaaaugcaccgccucuaacaaaugucguggaauaauaaaaacauucucaaacggaugcgauuauguaucaaauaaaggugucgacaccguaucaguaggcaauacacuauacuauguaaauaaacaagaaggacaaucacucuacgucaaaggugaaccaauaauaaacuucuacgacccacuuguauucccaagcgacgaauuugacgcaucaauaagccaaguaaacgaaaaaauaaaccaaucacuagcauucaucagaaaaucagacgaacuacuccacaauguaaaugcaggaaaaucaacaaccaauaucaugauaacaaccauaauaauagucauaauaguaauacuauuaucccucauagccguuggacuacuccuauauuguaaagcacgauaaggacuaguacuggcugcaucucccuuuccucuguccuccauccuucucccaggauggugaagggggaccugguacccagugauccccaccccaggauccuaaaucaugacuuaccugcuaauaaaaacucauuggaaaagugagaagaucuaaaaaaaaaaaaaaaaaaaaaaaaaaaaaaaaaaaaaaaaaaaaaaaaaaaaaaaaaaaaaaaaugcaucccccccccccccccccccccccccccccccaaaggcucuuuucagagccaccagaauu

SEQ ID NO: 8125 - RNA, 1917 nt, Artificial Sequence
  mRNA product Design e-6 comprising derived and/or modified sequence from HRSV(A2)__F-del_DSCav1_mut8 (opt11)
gggagagcggcucggccauuuugucccagucaguccggaggcugcggcugcagaaguaccgccugcggaguaacugcaaagaagcuuaccauggaacuccucauccucaaagccaacgccaucaccaccauacucaccgcaguaaccuucugcuucgcauccggccaaaacaucacagaagaguucuaccagaguaccugcuccgccgucuccaaaggcuaccuuggcgcccuccguaccgggugguacacauccgucaucacaaucgaacucuccaacaucaaagaaauaaagugcaacggcacagacgccaaaguaaaacugauaaagcaagaacucgacaaauacaaaaacgccguaaccgaccuccagcuacuaaugcaauccacucccgccaccggcagcggauccgccaucgccuccggaguagccgucuguaaagucuuacaccucgaaggcgaagugaacaaaaucaaauccgcccuacucucaaccaacaaagccguaguaucacucuccgggugcggcguuucagugcuaacguucaaaguccuugaccucaaaaacuacaucgacaaacaacuccuccccauccuaaauaaacaauccugcuccauacccaacaucgagacugucaucgaguuccagcagaaaaacaaccgacuccucgaaaucacacgcgaguucucugucaacgccggcgucacaacccccgucuccacauacaugcucaccaacagcgaacuccucucccuaaucaaugacaugcccaucaccaacgaccaaaagaaacucaugucaaacaacguccaaaucguccgccaacaauccuacagcaucaugugcaucaucaaagaagaaguucucgcauacguaguacaacucccccucuacggagugaucgacacccccugcuggaaacuacacaccagcccgcuuugcaccacaaacaccaaggaaggcuccaacaucugccucacucgaaccgaccgcggcugguacugcgacaacgcaggcuccgucaguuucuuuccccaagcagaaacaugcaaaguccaauccaaccgaguauucugcgacaccaugaacucccucacccuaccauccgaaguuaaccuaugcaacguggacaucuucaaccccaaguacgacugcaaaauuaugaccuccaaaaccgacguauccuccagcgucaucaccagccucggagcaauagucuccugcuacggcaagaccaagugcaccgcuuccaacaagugucgcggaaucaucaaaaccuucucaaacggcugcgacuacgucuccaacaaaggcgucgacaccguauccguaggaaacacccuauacuacgucaacaaacaagaaggacaaucccucuaugucaaaggcgaacccaucaucaauuucuacgacccccuagucuucccuuccgacgaguucgacgcguccaucagccaagucaaugaaaagaucaaccagagccuggcauucauccgcaaauccgacgaacuccuccacaacgucaacgcgggaaaauccacgacaaacaucaugaucaccaccaucaucaucgucaucauagucauucuccuuucucucaucgccgugggacuacuucucuacugcaaagcccgauaaggacuaguacuggcugcaucucccuuuccucuguccuccauccuucucccaggauggugaagggggaccugguacccagugauccccaccccaggauccuaaaucaugacuuaccugcuaauaaaaacucauuggaaaagugagaagaucuaaaaaaaaaaaaaaaaaaaaaaaaaaaaaaaaaaaaaaaaaaaaaaaaaaaaaaaaaaaaaaaaugcaucccccccccccccccccccccccccccccccaaaggcucuuuucagagccaccagaauu

SEQ ID NO: 8126 - RNA, 2133 nt, Artificial Sequence
  mRNA product Design f-1 comprising derived and/or modified sequence from HRSV(A2)__F-del_DSCav1_mut8 (opt1)
gggagagcggcucggccauuuugucccagucaguccggaggcugcggcugcagaaguaccgccugcggaguaacugcaaagaagcuuaccauggagcugcucauccugaaggccaacgccaucaccaccauccugacggcggugaccuucugcuucgccagcggccagaacaucaccgaggaguucuaccaguccacgugcagcgccgucuccaagggguaccucggcgcccugcggaccggcugguacaccuccgugaucaccaucgagcugagcaacaucaaggagaucaagugcaacgggaccgacgccaaggugaagcucaucaagcaggagcuggacaaguacaagaacgcggucacggaccugcagcuccugaugcaguccaccccggcaaccggcuccggcuccgccaucgcgagcggcgucgccgugugcaaggugcugcaccucgagggggaggucaacaagaucaagagcgcccugcuguccaccaacaaggccguggugagccucuccggcugcggcgucagcgugcugaccuucaaggugcuggaccucaagaacuacaucgacaagcagcugcugcccauccugaacaagcagagcugcuccauccccaacaucgagacggugaucgaguuccagcagaagaacaaccggcuccuggagaucacccgcgaguucagcgugaacgccggggucaccacccccguguccacguacaugcugaccaacagcgagcuccugucccugaucaacgacaugccgaucaccaacgaccagaagaagcucaugagcaacaacgugcagaucguccggcagcaguccuacagcaucaugugcaucaucaaggaggaggugcuggcguacgugguccagcugccccucuacggcgugaucgacacccccugcuggaagcugcacacgagcccccugugcaccaccaacaccaaggagggguccaacaucugccucacgcgcaccgaccggggcugguacugcgacaacgccggcagcgucuccuucuucccgcaggccgagaccugcaaggugcagagcaaccgcguguucugcgacaccaugaacucccugacgcugcccagcgagguaaaccucugcaacgucgacaucuucaaccccaaguacgacugcaagaucaugaccuccaagaccgacgugagcuccagcgugaucaccucccugggggccaucgucagcugcuacggcaagacgaagugcaccgccagcaacaagugccgggggaucaucaagaccuucuccaacggcugcgacuacgugagcaacaagggcguggacaccguguccgucgggaacacccuguacuacgugaacaagcaggagggccagagccucuacgugaagggggagcccaucaucaacuucuacgacccgcuggucuuccccuccgacgaguucgacgcgagcaucucccaggugaacgagaagaucaaccagagccuggccuucauccgcaaguccgacgagcugcuccacaacgugaacgccggcaagagcacgaccaacaucaugaucaccaccaucaucaucgucaucaucgugauccugcugucccucaucgccguggggcugcugcucuacugcaaggcccggugaggacuagugaagggaacacccaaauuuaauucagccuuaagcacaauuaauuaagagugaaacguaauuguacaagcaguuggucacccaccauagggcaugaucaacaccgcaaccuuuccuuuuucccccagugauucugaaaaaccccucuucccuucagcuugcuuagauguuccaaauuuaguaagcuuaaggcggccuacagaagaaaaagaaaaaaaaggccacaaaaguucccucucacuuucaguaaauaaaauaaaagcagcaacagaaauaaagaaauaaaugaaauucaaaaugaaauaaauauuguguugugcagcauuaaaaaaucaauaaaaauuaaaaaugagcaagaucuaaaaaaaaaaaaaaaaaaaaaaaaaaaaaaaaaaaaaaaaaaaaaaaaaaaaaaaaaaaaaaaaugcaucccccccccccccccccccccccccccccccaaaggcucuuuucagagccaccagaauu

SEQ ID NO: 8127 - RNA, 2133 nt, Artificial Sequence
  mRNA product Design f-1 comprising derived and/or modified sequence from HRSV(A2)__F-del_DSCav1_mut8 (opt1)
gggagagcggcucggccauuuugucccagucaguccggaggcugcggcugcagaaguaccgccugcggaguaacugcaaagaagcuuaccauggagcugcucauccugaaggccaacgccaucaccaccauccugacggcggugaccuucugcuucgccagcggccagaacaucaccgaggaguucuaccaguccacgugcagcgccgucuccaagggguaccucggcgcccugcgcaccgggugguacaccagcgugaucaccaucgagcuguccaacaucaaggagaucaagugcaacggcaccgacgccaaggugaagcucaucaagcaggagcuggacaaguacaagaacgcggucacggaccugcagcuccugaugcagagcacccccgccaccggguccggcagcgccaucgccuccggcguggcggugugcaagguccugcaccucgagggggaggugaacaagaucaagagcgcccugcuguccaccaacaaggccguggucagccucuccggcugcggggugagcgugcugacguucaagguccuggaccucaagaacuacaucgacaagcagcugcugccgauccucaacaagcaguccugcagcauccccaacaucgagaccgugaucgaguuccagcagaagaacaaccggcugcuggagaucacccgcgaguucuccgugaacgccggcgucaccacgcccgugagcaccuacaugcucaccaacuccgagcugcugagccucaucaacgacaugcccaucaccaacgaccagaagaagcugaugagcaacaacgugcagaucguccggcagcaguccuacagcaucaugugcaucaucaaggaggaggugcuggccuacgugguccagcucccgcuguacggggugaucgacacgcccugcuggaagcugcacaccagcccccucugcaccaccaacacgaaggagggcuccaacaucugccugacccgcaccgaccggggcugguacugcgacaacgcgggguccgugagcuucuucccccaggccgagaccugcaagguccaguccaaccgcguguucugcgacacgaugaacagccugacccucccguccgaggucaaccugugcaacguggacaucuucaaccccaaguacgacugcaagaucaugaccagcaagaccgacguguccagcuccgucaucacgagccugggcgccaucguguccugcuacgggaagaccaagugcaccgccagcaacaagugccggggcaucaucaagaccuucuccaacggcugcgacuacgugagcaacaagggggucgacacgguguccgugggcaacacccucuacuacgucaacaagcaggaggggcagagccuguacgugaagggcgagcccaucaucaacuucuacgacccccugguguucccgagcgacgaguucgacgccuccaucagccaggucaacgagaagaucaaccagucccucgcguucauccgcaagagcgacgagcugcugcacaacgugaacgccgggaaguccaccaccaacaucaugaucaccacgaucaucaucgugaucaucgucauccuccugagccugaucgccgugggccuccugcuguacugcaaggcccggugaggacuagugaagggaacacccaaauuuaauucagccuuaagcacaauuaauuaagagugaaacguaauuguacaagcaguuggucacccaccauagggcaugaucaacaccgcaaccuuuccuuuuucccccagugauucugaaaaaccccucuucccuucagcuugcuuagauguuccaaauuuaguaagcuuaaggcggccuacagaagaaaaagaaaaaaaaggccacaaaaguucccucucacuuucaguaaauaaaauaaaagcagcaacagaaauaaagaaauaaaugaaauucaaaaugaaauaaauauuguguugugcagcauuaaaaaaucaauaaaaauuaaaaaugagcaagaucuaaaaaaaaaaaaaaaaaaaaaaaaaaaaaaaaaaaaaaaaaaaaaaaaaaaaaaaaaaaaaaaaugcaucccccccccccccccccccccccccccccccaaaggcucuuuucagagccaccagaauu

SEQ ID NO: 8128 - RNA, 2133 nt, Artificial Sequence
  mRNA product Design f-1 comprising derived and/or modified sequence from HRSV(A2)__F-del_DSCav1_mut8 (opt2)
gggagagcggcucggccauuuugucccagucaguccggaggcugcggcugcagaaguaccgccugcggaguaacugcaaagaagcuuaccauggagcuccucauccucaaggccaacgccaucaccaccauccucaccgccgucaccuucugcuucgccuccggccagaacaucaccgaggaguucuaccaguccaccugcuccgccgucuccaagggcuaccucggcgcccuccgcaccggcugguacaccuccgucaucaccaucgagcucuccaacaucaaggagaucaagugcaacggcaccgacgccaaggucaagcucaucaagcaggagcucgacaaguacaagaacgccgucaccgaccuccagcuccucaugcaguccacccccgccaccggcuccggcuccgccaucgccuccggcgucgccgucugcaagguccuccaccucgagggcgaggucaacaagaucaaguccgcccuccucuccaccaacaaggccgucgucucccucuccggcugcggcgucuccguccucaccuucaagguccucgaccucaagaacuacaucgacaagcagcuccuccccauccucaacaagcaguccugcuccauccccaacaucgagaccgucaucgaguuccagcagaagaacaaccgccuccucgagaucacccgcgaguucuccgucaacgccggcgucaccacccccgucuccaccuacaugcucaccaacuccgagcuccucucccucaucaacgacaugcccaucaccaacgaccagaagaagcucauguccaacaacguccagaucguccgccagcaguccuacuccaucaugugcaucaucaaggaggagguccucgccuacgucguccagcucccccucuacggcgucaucgacacccccugcuggaagcuccacaccuccccccucugcaccaccaacaccaaggagggcuccaacaucugccucacccgcaccgaccgcggcugguacugcgacaacgccggcuccgucuccuucuucccccaggccgagaccugcaagguccaguccaaccgcgucuucugcgacaccaugaacucccucacccuccccuccgaggucaaccucugcaacgucgacaucuucaaccccaaguacgacugcaagaucaugaccuccaagaccgacgucuccuccuccgucaucaccucccucggcgccaucgucuccugcuacggcaagaccaagugcaccgccuccaacaagugccgcggcaucaucaagaccuucuccaacggcugcgacuacgucuccaacaagggcgucgacaccgucuccgucggcaacacccucuacuacgucaacaagcaggagggccagucccucuacgucaagggcgagcccaucaucaacuucuacgacccccucgucuuccccuccgacgaguucgacgccuccaucucccaggucaacgagaagaucaaccagucccucgccuucauccgcaaguccgacgagcuccuccacaacgucaacgccggcaaguccaccaccaacaucaugaucaccaccaucaucaucgucaucaucgucauccuccucucccucaucgccgucggccuccuccucuacugcaaggcccgcugaggacuagugaagggaacacccaaauuuaauucagccuuaagcacaauuaauuaagagugaaacguaauuguacaagcaguuggucacccaccauagggcaugaucaacaccgcaaccuuuccuuuuucccccagugauucugaaaaaccccucuucccuucagcuugcuuagauguuccaaauuuaguaagcuuaaggcggccuacagaagaaaaagaaaaaaaaggccacaaaaguucccucucacuuucaguaaauaaaauaaaagcagcaacagaaauaaagaaauaaaugaaauucaaaaugaaauaaauauuguguugugcagcauuaaaaaaucaauaaaaauuaaaaaugagcaagaucuaaaaaaaaaaaaaaaaaaaaaaaaaaaaaaaaaaaaaaaaaaaaaaaaaaaaaaaaaaaaaaaaugcaucccccccccccccccccccccccccccccccaaaggcucuuuucagagccaccagaauu

SEQ ID NO: 8129 - RNA, 2133 nt, Artificial Sequence
  mRNA product Design f-1 comprising derived and/or modified sequence from HRSV(A2)__F-del_DSCav1_mut8 (opt3)
gggagagcggcucggccauuuugucccagucaguccggaggcugcggcugcagaaguaccgccugcggaguaacugcaaagaagcuuaccauggagcugcucauccuuaaggccaacgcuauuaccacaauacugacugcagugacguucugcuuugccagcggccagaauaucaccgaagaguucuaccaauccacauguucugcggucucaaaaggguauuugggagcuuuaagaacugguugguacaccaguguuauuacaaucgaacugagcaacauuaaggagaucaaaugcaauggcaccgacgccaaggugaaacuaauaaagcaggaacucgauaaguauaaaaacgcaguaacugaccugcagcuucugaugcaguccacacccgccaccgggucuggaucggcuaucgcaucaggcguggccgucuguaagguguugcaccucgagggugagguuaauaaaauuaagagcgcucugcugaguacgaacaaagccguggucucccucucugggugcggagugagcguauuaacuuuuaagguucuggaucuuaagaauuacaucgacaaacaauugcugccuauucuaaacaagcaguccuguucaaucccaaauauagaaaccgugauugaguuccagcagaaaaacaauaggcuccuggaaaucacacgggaguuuagugucaacgcgggcgugacuaccccggugagcacauauaugcuuaccaauucugagcuguugucccucauuaacgauaugcccaucacgaaugaccaaaagaaacugaugucaaacaacguccagaucguucgccagcagagcuacaguauuaugugcauaaucaaggaagagguguuagcauauguagugcaacugccucucuacggcgucauugauacuccauguuggaaacuucauacaucuccccugugcaccacuaauacaaaggaaggguccaacaucuguuugacccgaacggaccguggaugguacugcgauaaugccgguagcgugucguucuuuccucaggcugagaccuguaagguucagucuaacagaguguucugcgacacaaugaacucccuaacucugccaucagaagucaaucucugcaauguggauauauuuaaccccaaauaugacuguaagauuaugaccaguaaaacagauguaagcuccucuguuaucacuagccugggcgccaucgugucaugcuacgggaagaccaaauguacagcaaguaauaagugcaggggaauuaucaagaccuucuccaacggcugugacuaugucagcaauaaagguguggacacugucucuguggggaacacgcuuuacuauguuaauaagcaagagggacagucacuguacgugaaaggcgagccuauuauaaacuuuuaugauccauugguauucccgagugacgaauuugaugcuagcaucucccaggucaaugagaagauuaaccagucucucgccuucauccggaaaucggacgaacuguuacacaacgugaaugcgggcaagagcacaaccaacaucaugauuacuaccauaaucauuguuaucauugugauccugcuaucccucauagccgucgggcugcuuuuguacugcaaggcacgcugaggacuagugaagggaacacccaaauuuaauucagccuuaagcacaauuaauuaagagugaaacguaauuguacaagcaguuggucacccaccauagggcaugaucaacaccgcaaccuuuccuuuuucccccagugauucugaaaaaccccucuucccuucagcuugcuuagauguuccaaauuuaguaagcuuaaggcggccuacagaagaaaaagaaaaaaaaggccacaaaaguucccucucacuuucaguaaauaaaauaaaagcagcaacagaaauaaagaaauaaaugaaauucaaaaugaaauaaauauuguguugugcagcauuaaaaaaucaauaaaaauuaaaaaugagcaagaucuaaaaaaaaaaaaaaaaaaaaaaaaaaaaaaaaaaaaaaaaaaaaaaaaaaaaaaaaaaaaaaaaugcaucccccccccccccccccccccccccccccccaaaggcucuuuucagagccaccagaauu

SEQ ID NO: 8130 - RNA, 2133 nt, Artificial Sequence
  mRNA product Design f-1 comprising derived and/or modified sequence from HRSV(A2)__F-del_DSCav1_mut8 (opt4)
gggagagcggcucggccauuuugucccagucaguccggaggcugcggcugcagaaguaccgccugcggaguaacugcaaagaagcuuaccauggagcugcugauccugaaggccaacgccaucaccaccauccugaccgccgugaccuucugcuucgccagcggccagaacaucaccgaggaguucuaccagagcaccugcagcgccgugagcaagggcuaccugggcgcccugagaaccggcugguacaccagcgugaucaccaucgagcugagcaacaucaaggagaucaagugcaacggcaccgacgccaaggugaagcugaucaagcaggagcuggacaaguacaagaacgccgugaccgaccugcagcugcugaugcagagcacccccgccaccggcagcggcagcgccaucgccagcggcguggccgugugcaaggugcugcaccuggagggcgaggugaacaagaucaagagcgcccugcugagcaccaacaaggccguggugagccugagcggcugcggcgugagcgugcugaccuucaaggugcuggaccugaagaacuacaucgacaagcagcugcugcccauccugaacaagcagagcugcagcauccccaacaucgagaccgugaucgaguuccagcagaagaacaacagacugcuggagaucaccagagaguucagcgugaacgccggcgugaccacccccgugagcaccuacaugcugaccaacagcgagcugcugagccugaucaacgacaugcccaucaccaacgaccagaagaagcugaugagcaacaacgugcagaucgugagacagcagagcuacagcaucaugugcaucaucaaggaggaggugcuggccuacguggugcagcugccccuguacggcgugaucgacacccccugcuggaagcugcacaccagcccccugugcaccaccaacaccaaggagggcagcaacaucugccugaccagaaccgacagaggcugguacugcgacaacgccggcagcgugagcuucuucccccaggccgagaccugcaaggugcagagcaacagaguguucugcgacaccaugaacagccugacccugcccagcgaggugaaccugugcaacguggacaucuucaaccccaaguacgacugcaagaucaugaccagcaagaccgacgugagcagcagcgugaucaccagccugggcgccaucgugagcugcuacggcaagaccaagugcaccgccagcaacaagugcagaggcaucaucaagaccuucagcaacggcugcgacuacgugagcaacaagggcguggacaccgugagcgugggcaacacccuguacuacgugaacaagcaggagggccagagccuguacgugaagggcgagcccaucaucaacuucuacgacccccugguguuccccagcgacgaguucgacgccagcaucagccaggugaacgagaagaucaaccagagccuggccuucaucagaaagagcgacgagcugcugcacaacgugaacgccggcaagagcaccaccaacaucaugaucaccaccaucaucaucgugaucaucgugauccugcugagccugaucgccgugggccugcugcuguacugcaaggccagaugaggacuagugaagggaacacccaaauuuaauucagccuuaagcacaauuaauuaagagugaaacguaauuguacaagcaguuggucacccaccauagggcaugaucaacaccgcaaccuuuccuuuuucccccagugauucugaaaaaccccucuucccuucagcuugcuuagauguuccaaauuuaguaagcuuaaggcggccuacagaagaaaaagaaaaaaaaggccacaaaaguucccucucacuuucaguaaauaaaauaaaagcagcaacagaaauaaagaaauaaaugaaauucaaaaugaaauaaauauuguguugugcagcauuaaaaaaucaauaaaaauuaaaaaugagcaagaucuaaaaaaaaaaaaaaaaaaaaaaaaaaaaaaaaaaaaaaaaaaaaaaaaaaaaaaaaaaaaaaaaugcaucccccccccccccccccccccccccccccccaaaggcucuuuucagagccaccagaauu

SEQ ID NO: 8131 - RNA, 2133 nt, Artificial Sequence
  mRNA product Design f-1 comprising derived and/or modified sequence from HRSV(A2)__F-del_DSCav1_mut8 (opt5)
gggagagcggcucggccauuuugucccagucaguccggaggcugcggcugcagaaguaccgccugcggaguaacugcaaagaagcuuaccauggagcugcucauccugaaggccaacgcuauuaccacaauccuuacggccgugaccuucugcuuugcgagcggccagaauauuacagaagaguucuaccaauccaccuguucugcugucagcaaaggguaucugggagcccucagaacaggcugguacaccuccguuaucacaauugaacugucuaacaucaaggagaucaaaugcaaugggaccgacgccaaggugaaacuuauuaagcaggaacuggauaaguauaaaaacgcugugacggaccuccagcugcugaugcagagcacccccgccacaggauccggcucugcuaucgccagcggggucgcgguguguaagguucuccaccuggagggagaggugaauaaaauuaaguccgcccuucugagcaccaacaaagcugucgugucucucuccggcugcggcguuagcgugcugacauuuaagguccuugaucugaagaauuacaucgacaaacaacuccugccuauucugaacaagcagucuuguuccaucccgaauauugaaaccgugaucgaguuccagcagaaaaacaaucggcuccuggaaaucacgcgcgaguuuagcgugaacgccggggucacaacccccguuucuacauauaugcuuaccaauuccgagcugcucagccugauuaacgauaugccuaucaccaaugaccaaaagaaacuuauguccaacaacgugcagauugugagacagcagucuuacagcaucaugugcauuaucaaggaagagguccuggcuuaugugguucaacucccccuguacggagugaucgauacaccuuguuggaaacugcauacgagcccccucugcaccacaaauaccaaggaaggcagcaacauuugucugacacggaccgaccgcgggugguacugcgauaaugccggaucugucuccuucuuuccucaggcggagacguguaaggugcagagcaacagaguuuucugcgacacaaugaacucucuuacccugccgagcgaagugaaucucugcaaugucgauaucuuuaaccccaaauaugacuguaagauuaugaccuccaaaacagaugugucuagcuccgucaucaccagccugggcgccauugugucuugcuacgggaagacaaaauguacggcuuccaauaagugccggggaaucaucaagaccuucagcaacggcugugacuauguuucuaauaaaggcguggacacagucuccguggggaacacccuuuacuauguuaauaagcaagagggacagagccuguacgugaaaggcgagccuauuaucaacuuuuaugauccccucgucuucccuuccgacgaauuugaugccucuauuagccaggugaaugagaagaucaaccagucccuggcuuucauucgcaaaucugacgaacugcuccacaacgugaaugccgggaaguccacaaccaacaucaugauuacgaccaucaucauuguuaucauugucauccugcuuucccugauugccgugggacuccugcuguacugcaaggcuagaugaggacuagugaagggaacacccaaauuuaauucagccuuaagcacaauuaauuaagagugaaacguaauuguacaagcaguuggucacccaccauagggcaugaucaacaccgcaaccuuuccuuuuucccccagugauucugaaaaaccccucuucccuucagcuugcuuagauguuccaaauuuaguaagcuuaaggcggccuacagaagaaaaagaaaaaaaaggccacaaaaguucccucucacuuucaguaaauaaaauaaaagcagcaacagaaauaaagaaauaaaugaaauucaaaaugaaauaaauauuguguugugcagcauuaaaaaaucaauaaaaauuaaaaaugagcaagaucuaaaaaaaaaaaaaaaaaaaaaaaaaaaaaaaaaaaaaaaaaaaaaaaaaaaaaaaaaaaaaaaaugcaucccccccccccccccccccccccccccccccaaaggcucuuuucagagccaccagaauu

SEQ ID NO: 8132 - RNA, 2133 nt, Artificial Sequence
  mRNA product Design f-1 comprising derived and/or modified sequence from HRSV(A2)__F-del_DSCav1_mut8 (opt6)
gggagagcggcucggccauuuugucccagucaguccggaggcugcggcugcagaaguaccgccugcggaguaacugcaaagaagcuuaccauggaacuacucauauugaaagccaacgcaaucacaacaauacuaaccgccguaacauuuugcuucgcgucaggccaaaauauaacagaagaauuuuaccaaucaacaugcuccgccguaucaaaaggauaccuaggugcauuacgaaccgguugguacacaucaguaaucacaauagaacuuuccaacauuaaagaaauaaaaugcaauggcacagacgcaaaagucaaacuaauaaaacaagaacuagacaaauauaaaaacgccgucacagacuuacaacuauuaaugcaaagcacaccagcaacaggauccggaucagcaauagcaucaggaguagccgucuguaaaguacuacaccuagaaggcgaaguuaauaaaauuaaaucagcuuuauuaucaaccaacaaagcaguaguaucacuauccggaugcggagucuccguccuaacauucaaaguacuagaccucaagaauuacauagauaaacaacuacuaccaauacucaacaaacaaucauguucaauaccaaacaucgaaaccgucauagaauuucaacaaaaaaauaauagacucuuagaaauaacacgagaauuuagcguaaacgcaggagucacaaccccugucucaacauacaugcuaaccaauuccgaauuauuaucacucauaaaugacaugccaauaacuaaugaccaaaaaaaacuuaugucaaacaacguacaaauaguaagacaacaaucauauucaauaaugugcauaaucaaagaagaaguuuuagcauauguaguacaacuaccacuauauggcgucauagacacaccaugcuggaaauuacacacaucaccucuaugcacaacaaacacaaaagaaggaagcaacauuugccuaaccagaaccgauagaggaugguacugcgauaacgcaggcucaguaucauucuucccucaagccgaaacuugcaaaguccaaucaaauagagucuucugcgauacaaugaacuccuuaacuuuaccaucagaaguaaaucuaugcaacguagauaucuuuaauccaaaauacgauugcaaaaucaugacaucaaaaacagauguaucaucuaguguaauuaccucccuaggagcaauaguaagcugcuacggaaaaacaaaaugcaccgccucuaacaaaugucguggaauaauaaaaacauucucaaacggaugcgauuauguaucaaauaaaggugucgacaccguaucaguaggcaauacacuauacuauguaaauaaacaagaaggacaaucacucuacgucaaaggugaaccaauaauaaacuucuacgacccacuuguauucccaagcgacgaauuugacgcaucaauaagccaaguaaacgaaaaaauaaaccaaucacuagcauucaucagaaaaucagacgaacuacuccacaauguaaaugcaggaaaaucaacaaccaauaucaugauaacaaccauaauaauagucauaauaguaauacuauuaucccucauagccguuggacuacuccuauauuguaaagcacgauaaggacuagugaagggaacacccaaauuuaauucagccuuaagcacaauuaauuaagagugaaacguaauuguacaagcaguuggucacccaccauagggcaugaucaacaccgcaaccuuuccuuuuucccccagugauucugaaaaaccccucuucccuucagcuugcuuagauguuccaaauuuaguaagcuuaaggcggccuacagaagaaaaagaaaaaaaaggccacaaaaguucccucucacuuucaguaaauaaaauaaaagcagcaacagaaauaaagaaauaaaugaaauucaaaaugaaauaaauauuguguugugcagcauuaaaaaaucaauaaaaauuaaaaaugagcaagaucuaaaaaaaaaaaaaaaaaaaaaaaaaaaaaaaaaaaaaaaaaaaaaaaaaaaaaaaaaaaaaaaaugcaucccccccccccccccccccccccccccccccaaaggcucuuuucagagccaccagaauu

SEQ ID NO: 8133 - RNA, 2133 nt, Artificial Sequence
  mRNA product Design f-1 comprising derived and/or modified sequence from HRSV(A2)__F-del_DSCav1_mut8 (opt11)
gggagagcggcucggccauuuugucccagucaguccggaggcugcggcugcagaaguaccgccugcggaguaacugcaaagaagcuuaccauggaacuccucauccucaaagccaacgccaucaccaccauacucaccgcaguaaccuucugcuucgcauccggccaaaacaucacagaagaguucuaccagaguaccugcuccgccgucuccaaaggcuaccuuggcgcccuccguaccgggugguacacauccgucaucacaaucgaacucuccaacaucaaagaaauaaagugcaacggcacagacgccaaaguaaaacugauaaagcaagaacucgacaaauacaaaaacgccguaaccgaccuccagcuacuaaugcaauccacucccgccaccggcagcggauccgccaucgccuccggaguagccgucuguaaagucuuacaccucgaaggcgaagugaacaaaaucaaauccgcccuacucucaaccaacaaagccguaguaucacucuccgggugcggcguuucagugcuaacguucaaaguccuugaccucaaaaacuacaucgacaaacaacuccuccccauccuaaauaaacaauccugcuccauacccaacaucgagacugucaucgaguuccagcagaaaaacaaccgacuccucgaaaucacacgcgaguucucugucaacgccggcgucacaacccccgucuccacauacaugcucaccaacagcgaacuccucucccuaaucaaugacaugcccaucaccaacgaccaaaagaaacucaugucaaacaacguccaaaucguccgccaacaauccuacagcaucaugugcaucaucaaagaagaaguucucgcauacguaguacaacucccccucuacggagugaucgacacccccugcuggaaacuacacaccagcccgcuuugcaccacaaacaccaaggaaggcuccaacaucugccucacucgaaccgaccgcggcugguacugcgacaacgcaggcuccgucaguuucuuuccccaagcagaaacaugcaaaguccaauccaaccgaguauucugcgacaccaugaacucccucacccuaccauccgaaguuaaccuaugcaacguggacaucuucaaccccaaguacgacugcaaaauuaugaccuccaaaaccgacguauccuccagcgucaucaccagccucggagcaauagucuccugcuacggcaagaccaagugcaccgcuuccaacaagugucgcggaaucaucaaaaccuucucaaacggcugcgacuacgucuccaacaaaggcgucgacaccguauccguaggaaacacccuauacuacgucaacaaacaagaaggacaaucccucuaugucaaaggcgaacccaucaucaauuucuacgacccccuagucuucccuuccgacgaguucgacgcguccaucagccaagucaaugaaaagaucaaccagagccuggcauucauccgcaaauccgacgaacuccuccacaacgucaacgcgggaaaauccacgacaaacaucaugaucaccaccaucaucaucgucaucauagucauucuccuuucucucaucgccgugggacuacuucucuacugcaaagcccgauaaggacuagugaagggaacacccaaauuuaauucagccuuaagcacaauuaauuaagagugaaacguaauuguacaagcaguuggucacccaccauagggcaugaucaacaccgcaaccuuuccuuuuucccccagugauucugaaaaaccccucuucccuucagcuugcuuagauguuccaaauuuaguaagcuuaaggcggccuacagaagaaaaagaaaaaaaaggccacaaaaguucccucucacuuucaguaaauaaaauaaaagcagcaacagaaauaaagaaauaaaugaaauucaaaaugaaauaaauauuguguugugcagcauuaaaaaaucaauaaaaauuaaaaaugagcaagaucuaaaaaaaaaaaaaaaaaaaaaaaaaaaaaaaaaaaaaaaaaaaaaaaaaaaaaaaaaaaaaaaaugcaucccccccccccccccccccccccccccccccaaaggcucuuuucagagccaccagaauu

SEQ ID NO: 8134 - RNA, 1913 nt, Artificial Sequence
  mRNA product Design f-2 comprising derived and/or modified sequence from HRSV(A2)__F-del_DSCav1_mut8 (opt1)
gggagagcggcucggccauuuugucccagucaguccggaggcugcggcugcagaaguaccgccugcggaguaacugcaaagaagcuuaccauggagcugcucauccugaaggccaacgccaucaccaccauccugacggcggugaccuucugcuucgccagcggccagaacaucaccgaggaguucuaccaguccacgugcagcgccgucuccaagggguaccucggcgcccugcggaccggcugguacaccuccgugaucaccaucgagcugagcaacaucaaggagaucaagugcaacgggaccgacgccaaggugaagcucaucaagcaggagcuggacaaguacaagaacgcggucacggaccugcagcuccugaugcaguccaccccggcaaccggcuccggcuccgccaucgcgagcggcgucgccgugugcaaggugcugcaccucgagggggaggucaacaagaucaagagcgcccugcuguccaccaacaaggccguggugagccucuccggcugcggcgucagcgugcugaccuucaaggugcuggaccucaagaacuacaucgacaagcagcugcugcccauccugaacaagcagagcugcuccauccccaacaucgagacggugaucgaguuccagcagaagaacaaccggcuccuggagaucacccgcgaguucagcgugaacgccggggucaccacccccguguccacguacaugcugaccaacagcgagcuccugucccugaucaacgacaugccgaucaccaacgaccagaagaagcucaugagcaacaacgugcagaucguccggcagcaguccuacagcaucaugugcaucaucaaggaggaggugcuggcguacgugguccagcugccccucuacggcgugaucgacacccccugcuggaagcugcacacgagcccccugugcaccaccaacaccaaggagggguccaacaucugccucacgcgcaccgaccggggcugguacugcgacaacgccggcagcgucuccuucuucccgcaggccgagaccugcaaggugcagagcaaccgcguguucugcgacaccaugaacucccugacgcugcccagcgagguaaaccucugcaacgucgacaucuucaaccccaaguacgacugcaagaucaugaccuccaagaccgacgugagcuccagcgugaucaccucccugggggccaucgucagcugcuacggcaagacgaagugcaccgccagcaacaagugccgggggaucaucaagaccuucuccaacggcugcgacuacgugagcaacaagggcguggacaccguguccgucgggaacacccuguacuacgugaacaagcaggagggccagagccucuacgugaagggggagcccaucaucaacuucuacgacccgcuggucuuccccuccgacgaguucgacgcgagcaucucccaggugaacgagaagaucaaccagagccuggccuucauccgcaaguccgacgagcugcuccacaacgugaacgccggcaagagcacgaccaacaucaugaucaccaccaucaucaucgucaucaucgugauccugcugucccucaucgccguggggcugcugcucuacugcaaggcccggugaggacuaguggaagcauuuuccuggcugauuaaaagaaauuacucagcuauggucaucuguuccuguuagaaggcuaugcagcauauuauauacuaugcgcauguuaugaaaugcauaauaaaaaauuuuaaaaaaucuaaaagaucuaaaaaaaaaaaaaaaaaaaaaaaaaaaaaaaaaaaaaaaaaaaaaaaaaaaaaaaaaaaaaaaaugcaucccccccccccccccccccccccccccccccaaaggcucuuuucagagccaccagaauu

SEQ ID NO: 8135 - RNA, 1913 nt, Artificial Sequence
  mRNA product Design f-2 comprising derived and/or modified sequence from HRSV(A2)__F-del_DSCav1_mut8 (opt1)
gggagagcggcucggccauuuugucccagucaguccggaggcugcggcugcagaaguaccgccugcggaguaacugcaaagaagcuuaccauggagcugcucauccugaaggccaacgccaucaccaccauccugacggcggugaccuucugcuucgccagcggccagaacaucaccgaggaguucuaccaguccacgugcagcgccgucuccaagggguaccucggcgcccugcgcaccgggugguacaccagcgugaucaccaucgagcuguccaacaucaaggagaucaagugcaacggcaccgacgccaaggugaagcucaucaagcaggagcuggacaaguacaagaacgcggucacggaccugcagcuccugaugcagagcacccccgccaccggguccggcagcgccaucgccuccggcguggcggugugcaagguccugcaccucgagggggaggugaacaagaucaagagcgcccugcuguccaccaacaaggccguggucagccucuccggcugcggggugagcgugcugacguucaagguccuggaccucaagaacuacaucgacaagcagcugcugccgauccucaacaagcaguccugcagcauccccaacaucgagaccgugaucgaguuccagcagaagaacaaccggcugcuggagaucacccgcgaguucuccgugaacgccggcgucaccacgcccgugagcaccuacaugcucaccaacuccgagcugcugagccucaucaacgacaugcccaucaccaacgaccagaagaagcugaugagcaacaacgugcagaucguccggcagcaguccuacagcaucaugugcaucaucaaggaggaggugcuggccuacgugguccagcucccgcuguacggggugaucgacacgcccugcuggaagcugcacaccagcccccucugcaccaccaacacgaaggagggcuccaacaucugccugacccgcaccgaccggggcugguacugcgacaacgcgggguccgugagcuucuucccccaggccgagaccugcaagguccaguccaaccgcguguucugcgacacgaugaacagccugacccucccguccgaggucaaccugugcaacguggacaucuucaaccccaaguacgacugcaagaucaugaccagcaagaccgacguguccagcuccgucaucacgagccugggcgccaucguguccugcuacgggaagaccaagugcaccgccagcaacaagugccggggcaucaucaagaccuucuccaacggcugcgacuacgugagcaacaagggggucgacacgguguccgugggcaacacccucuacuacgucaacaagcaggaggggcagagccuguacgugaagggcgagcccaucaucaacuucuacgacccccugguguucccgagcgacgaguucgacgccuccaucagccaggucaacgagaagaucaaccagucccucgcguucauccgcaagagcgacgagcugcugcacaacgugaacgccgggaaguccaccaccaacaucaugaucaccacgaucaucaucgugaucaucgucauccuccugagccugaucgccgugggccuccugcuguacugcaaggcccggugaggacuaguggaagcauuuuccuggcugauuaaaagaaauuacucagcuauggucaucuguuccuguuagaaggcuaugcagcauauuauauacuaugcgcauguuaugaaaugcauaauaaaaaauuuuaaaaaaucuaaaagaucuaaaaaaaaaaaaaaaaaaaaaaaaaaaaaaaaaaaaaaaaaaaaaaaaaaaaaaaaaaaaaaaaugcaucccccccccccccccccccccccccccccccaaaggcucuuuucagagccaccagaauu

SEQ ID NO: 8136 - RNA, 1913 nt, Artificial Sequence
  mRNA product Design f-2 comprising derived and/or modified sequence from HRSV(A2)__F-del_DSCav1_mut8 (opt2)
gggagagcggcucggccauuuugucccagucaguccggaggcugcggcugcagaaguaccgccugcggaguaacugcaaagaagcuuaccauggagcuccucauccucaaggccaacgccaucaccaccauccucaccgccgucaccuucugcuucgccuccggccagaacaucaccgaggaguucuaccaguccaccugcuccgccgucuccaagggcuaccucggcgcccuccgcaccggcugguacaccuccgucaucaccaucgagcucuccaacaucaaggagaucaagugcaacggcaccgacgccaaggucaagcucaucaagcaggagcucgacaaguacaagaacgccgucaccgaccuccagcuccucaugcaguccacccccgccaccggcuccggcuccgccaucgccuccggcgucgccgucugcaagguccuccaccucgagggcgaggucaacaagaucaaguccgcccuccucuccaccaacaaggccgucgucucccucuccggcugcggcgucuccguccucaccuucaagguccucgaccucaagaacuacaucgacaagcagcuccuccccauccucaacaagcaguccugcuccauccccaacaucgagaccgucaucgaguuccagcagaagaacaaccgccuccucgagaucacccgcgaguucuccgucaacgccggcgucaccacccccgucuccaccuacaugcucaccaacuccgagcuccucucccucaucaacgacaugcccaucaccaacgaccagaagaagcucauguccaacaacguccagaucguccgccagcaguccuacuccaucaugugcaucaucaaggaggagguccucgccuacgucguccagcucccccucuacggcgucaucgacacccccugcuggaagcuccacaccuccccccucugcaccaccaacaccaaggagggcuccaacaucugccucacccgcaccgaccgcggcugguacugcgacaacgccggcuccgucuccuucuucccccaggccgagaccugcaagguccaguccaaccgcgucuucugcgacaccaugaacucccucacccuccccuccgaggucaaccucugcaacgucgacaucuucaaccccaaguacgacugcaagaucaugaccuccaagaccgacgucuccuccuccgucaucaccucccucggcgccaucgucuccugcuacggcaagaccaagugcaccgccuccaacaagugccgcggcaucaucaagaccuucuccaacggcugcgacuacgucuccaacaagggcgucgacaccgucuccgucggcaacacccucuacuacgucaacaagcaggagggccagucccucuacgucaagggcgagcccaucaucaacuucuacgacccccucgucuuccccuccgacgaguucgacgccuccaucucccaggucaacgagaagaucaaccagucccucgccuucauccgcaaguccgacgagcuccuccacaacgucaacgccggcaaguccaccaccaacaucaugaucaccaccaucaucaucgucaucaucgucauccuccucucccucaucgccgucggccuccuccucuacugcaaggcccgcugaggacuaguggaagcauuuuccuggcugauuaaaagaaauuacucagcuauggucaucuguuccuguuagaaggcuaugcagcauauuauauacuaugcgcauguuaugaaaugcauaauaaaaaauuuuaaaaaaucuaaaagaucuaaaaaaaaaaaaaaaaaaaaaaaaaaaaaaaaaaaaaaaaaaaaaaaaaaaaaaaaaaaaaaaaugcaucccccccccccccccccccccccccccccccaaaggcucuuuucagagccaccagaauu

SEQ ID NO: 8137 - RNA, 1913 nt, Artificial Sequence
  mRNA product Design f-2 comprising derived and/or modified sequence from HRSV(A2)__F-del_DSCav1_mut8 (opt3)
gggagagcggcucggccauuuugucccagucaguccggaggcugcggcugcagaaguaccgccugcggaguaacugcaaagaagcuuaccauggagcugcucauccuuaaggccaacgcuauuaccacaauacugacugcagugacguucugcuuugccagcggccagaauaucaccgaagaguucuaccaauccacauguucugcggucucaaaaggguauuugggagcuuuaagaacugguugguacaccaguguuauuacaaucgaacugagcaacauuaaggagaucaaaugcaauggcaccgacgccaaggugaaacuaauaaagcaggaacucgauaaguauaaaaacgcaguaacugaccugcagcuucugaugcaguccacacccgccaccgggucuggaucggcuaucgcaucaggcguggccgucuguaagguguugcaccucgagggugagguuaauaaaauuaagagcgcucugcugaguacgaacaaagccguggucucccucucugggugcggagugagcguauuaacuuuuaagguucuggaucuuaagaauuacaucgacaaacaauugcugccuauucuaaacaagcaguccuguucaaucccaaauauagaaaccgugauugaguuccagcagaaaaacaauaggcuccuggaaaucacacgggaguuuagugucaacgcgggcgugacuaccccggugagcacauauaugcuuaccaauucugagcuguugucccucauuaacgauaugcccaucacgaaugaccaaaagaaacugaugucaaacaacguccagaucguucgccagcagagcuacaguauuaugugcauaaucaaggaagagguguuagcauauguagugcaacugccucucuacggcgucauugauacuccauguuggaaacuucauacaucuccccugugcaccacuaauacaaaggaaggguccaacaucuguuugacccgaacggaccguggaugguacugcgauaaugccgguagcgugucguucuuuccucaggcugagaccuguaagguucagucuaacagaguguucugcgacacaaugaacucccuaacucugccaucagaagucaaucucugcaauguggauauauuuaaccccaaauaugacuguaagauuaugaccaguaaaacagauguaagcuccucuguuaucacuagccugggcgccaucgugucaugcuacgggaagaccaaauguacagcaaguaauaagugcaggggaauuaucaagaccuucuccaacggcugugacuaugucagcaauaaagguguggacacugucucuguggggaacacgcuuuacuauguuaauaagcaagagggacagucacuguacgugaaaggcgagccuauuauaaacuuuuaugauccauugguauucccgagugacgaauuugaugcuagcaucucccaggucaaugagaagauuaaccagucucucgccuucauccggaaaucggacgaacuguuacacaacgugaaugcgggcaagagcacaaccaacaucaugauuacuaccauaaucauuguuaucauugugauccugcuaucccucauagccgucgggcugcuuuuguacugcaaggcacgcugaggacuaguggaagcauuuuccuggcugauuaaaagaaauuacucagcuauggucaucuguuccuguuagaaggcuaugcagcauauuauauacuaugcgcauguuaugaaaugcauaauaaaaaauuuuaaaaaaucuaaaagaucuaaaaaaaaaaaaaaaaaaaaaaaaaaaaaaaaaaaaaaaaaaaaaaaaaaaaaaaaaaaaaaaaugcaucccccccccccccccccccccccccccccccaaaggcucuuuucagagccaccagaauu

SEQ ID NO: 8138 - RNA, 1913 nt, Artificial Sequence
  mRNA product Design f-2 comprising derived and/or modified sequence from HRSV(A2)__F-del_DSCav1_mut8 (opt4)
gggagagcggcucggccauuuugucccagucaguccggaggcugcggcugcagaaguaccgccugcggaguaacugcaaagaagcuuaccauggagcugcugauccugaaggccaacgccaucaccaccauccugaccgccgugaccuucugcuucgccagcggccagaacaucaccgaggaguucuaccagagcaccugcagcgccgugagcaagggcuaccugggcgcccugagaaccggcugguacaccagcgugaucaccaucgagcugagcaacaucaaggagaucaagugcaacggcaccgacgccaaggugaagcugaucaagcaggagcuggacaaguacaagaacgccgugaccgaccugcagcugcugaugcagagcacccccgccaccggcagcggcagcgccaucgccagcggcguggccgugugcaaggugcugcaccuggagggcgaggugaacaagaucaagagcgcccugcugagcaccaacaaggccguggugagccugagcggcugcggcgugagcgugcugaccuucaaggugcuggaccugaagaacuacaucgacaagcagcugcugcccauccugaacaagcagagcugcagcauccccaacaucgagaccgugaucgaguuccagcagaagaacaacagacugcuggagaucaccagagaguucagcgugaacgccggcgugaccacccccgugagcaccuacaugcugaccaacagcgagcugcugagccugaucaacgacaugcccaucaccaacgaccagaagaagcugaugagcaacaacgugcagaucgugagacagcagagcuacagcaucaugugcaucaucaaggaggaggugcuggccuacguggugcagcugccccuguacggcgugaucgacacccccugcuggaagcugcacaccagcccccugugcaccaccaacaccaaggagggcagcaacaucugccugaccagaaccgacagaggcugguacugcgacaacgccggcagcgugagcuucuucccccaggccgagaccugcaaggugcagagcaacagaguguucugcgacaccaugaacagccugacccugcccagcgaggugaaccugugcaacguggacaucuucaaccccaaguacgacugcaagaucaugaccagcaagaccgacgugagcagcagcgugaucaccagccugggcgccaucgugagcugcuacggcaagaccaagugcaccgccagcaacaagugcagaggcaucaucaagaccuucagcaacggcugcgacuacgugagcaacaagggcguggacaccgugagcgugggcaacacccuguacuacgugaacaagcaggagggccagagccuguacgugaagggcgagcccaucaucaacuucuacgacccccugguguuccccagcgacgaguucgacgccagcaucagccaggugaacgagaagaucaaccagagccuggccuucaucagaaagagcgacgagcugcugcacaacgugaacgccggcaagagcaccaccaacaucaugaucaccaccaucaucaucgugaucaucgugauccugcugagccugaucgccgugggccugcugcuguacugcaaggccagaugaggacuaguggaagcauuuuccuggcugauuaaaagaaauuacucagcuauggucaucuguuccuguuagaaggcuaugcagcauauuauauacuaugcgcauguuaugaaaugcauaauaaaaaauuuuaaaaaaucuaaaagaucuaaaaaaaaaaaaaaaaaaaaaaaaaaaaaaaaaaaaaaaaaaaaaaaaaaaaaaaaaaaaaaaaugcaucccccccccccccccccccccccccccccccaaaggcucuuuucagagccaccagaauu

SEQ ID NO: 8139 - RNA, 1913 nt, Artificial Sequence
  mRNA product Design f-2 comprising derived and/or modified sequence from HRSV(A2)__F-del_DSCav1_mut8 (opt5)
gggagagcggcucggccauuuugucccagucaguccggaggcugcggcugcagaaguaccgccugcggaguaacugcaaagaagcuuaccauggagcugcucauccugaaggccaacgcuauuaccacaauccuuacggccgugaccuucugcuuugcgagcggccagaauauuacagaagaguucuaccaauccaccuguucugcugucagcaaaggguaucugggagcccucagaacaggcugguacaccuccguuaucacaauugaacugucuaacaucaaggagaucaaaugcaaugggaccgacgccaaggugaaacuuauuaagcaggaacuggauaaguauaaaaacgcugugacggaccuccagcugcugaugcagagcacccccgccacaggauccggcucugcuaucgccagcggggucgcgguguguaagguucuccaccuggagggagaggugaauaaaauuaaguccgcccuucugagcaccaacaaagcugucgugucucucuccggcugcggcguuagcgugcugacauuuaagguccuugaucugaagaauuacaucgacaaacaacuccugccuauucugaacaagcagucuuguuccaucccgaauauugaaaccgugaucgaguuccagcagaaaaacaaucggcuccuggaaaucacgcgcgaguuuagcgugaacgccggggucacaacccccguuucuacauauaugcuuaccaauuccgagcugcucagccugauuaacgauaugccuaucaccaaugaccaaaagaaacuuauguccaacaacgugcagauugugagacagcagucuuacagcaucaugugcauuaucaaggaagagguccuggcuuaugugguucaacucccccuguacggagugaucgauacaccuuguuggaaacugcauacgagcccccucugcaccacaaauaccaaggaaggcagcaacauuugucugacacggaccgaccgcgggugguacugcgauaaugccggaucugucuccuucuuuccucaggcggagacguguaaggugcagagcaacagaguuuucugcgacacaaugaacucucuuacccugccgagcgaagugaaucucugcaaugucgauaucuuuaaccccaaauaugacuguaagauuaugaccuccaaaacagaugugucuagcuccgucaucaccagccugggcgccauugugucuugcuacgggaagacaaaauguacggcuuccaauaagugccggggaaucaucaagaccuucagcaacggcugugacuauguuucuaauaaaggcguggacacagucuccguggggaacacccuuuacuauguuaauaagcaagagggacagagccuguacgugaaaggcgagccuauuaucaacuuuuaugauccccucgucuucccuuccgacgaauuugaugccucuauuagccaggugaaugagaagaucaaccagucccuggcuuucauucgcaaaucugacgaacugcuccacaacgugaaugccgggaaguccacaaccaacaucaugauuacgaccaucaucauuguuaucauugucauccugcuuucccugauugccgugggacuccugcuguacugcaaggcuagaugaggacuaguggaagcauuuuccuggcugauuaaaagaaauuacucagcuauggucaucuguuccuguuagaaggcuaugcagcauauuauauacuaugcgcauguuaugaaaugcauaauaaaaaauuuuaaaaaaucuaaaagaucuaaaaaaaaaaaaaaaaaaaaaaaaaaaaaaaaaaaaaaaaaaaaaaaaaaaaaaaaaaaaaaaaugcaucccccccccccccccccccccccccccccccaaaggcucuuuucagagccaccagaauu

SEQ ID NO: 8140 - RNA, 1913 nt, Artificial Sequence
  mRNA product Design f-2 comprising derived and/or modified sequence from HRSV(A2)__F-del_DSCav1_mut8 (opt6)
gggagagcggcucggccauuuugucccagucaguccggaggcugcggcugcagaaguaccgccugcggaguaacugcaaagaagcuuaccauggaacuacucauauugaaagccaacgcaaucacaacaauacuaaccgccguaacauuuugcuucgcgucaggccaaaauauaacagaagaauuuuaccaaucaacaugcuccgccguaucaaaaggauaccuaggugcauuacgaaccgguugguacacaucaguaaucacaauagaacuuuccaacauuaaagaaauaaaaugcaauggcacagacgcaaaagucaaacuaauaaaacaagaacuagacaaauauaaaaacgccgucacagacuuacaacuauuaaugcaaagcacaccagcaacaggauccggaucagcaauagcaucaggaguagccgucuguaaaguacuacaccuagaaggcgaaguuaauaaaauuaaaucagcuuuauuaucaaccaacaaagcaguaguaucacuauccggaugcggagucuccguccuaacauucaaaguacuagaccucaagaauuacauagauaaacaacuacuaccaauacucaacaaacaaucauguucaauaccaaacaucgaaaccgucauagaauuucaacaaaaaaauaauagacucuuagaaauaacacgagaauuuagcguaaacgcaggagucacaaccccugucucaacauacaugcuaaccaauuccgaauuauuaucacucauaaaugacaugccaauaacuaaugaccaaaaaaaacuuaugucaaacaacguacaaauaguaagacaacaaucauauucaauaaugugcauaaucaaagaagaaguuuuagcauauguaguacaacuaccacuauauggcgucauagacacaccaugcuggaaauuacacacaucaccucuaugcacaacaaacacaaaagaaggaagcaacauuugccuaaccagaaccgauagaggaugguacugcgauaacgcaggcucaguaucauucuucccucaagccgaaacuugcaaaguccaaucaaauagagucuucugcgauacaaugaacuccuuaacuuuaccaucagaaguaaaucuaugcaacguagauaucuuuaauccaaaauacgauugcaaaaucaugacaucaaaaacagauguaucaucuaguguaauuaccucccuaggagcaauaguaagcugcuacggaaaaacaaaaugcaccgccucuaacaaaugucguggaauaauaaaaacauucucaaacggaugcgauuauguaucaaauaaaggugucgacaccguaucaguaggcaauacacuauacuauguaaauaaacaagaaggacaaucacucuacgucaaaggugaaccaauaauaaacuucuacgacccacuuguauucccaagcgacgaauuugacgcaucaauaagccaaguaaacgaaaaaauaaaccaaucacuagcauucaucagaaaaucagacgaacuacuccacaauguaaaugcaggaaaaucaacaaccaauaucaugauaacaaccauaauaauagucauaauaguaauacuauuaucccucauagccguuggacuacuccuauauuguaaagcacgauaaggacuaguggaagcauuuuccuggcugauuaaaagaaauuacucagcuauggucaucuguuccuguuagaaggcuaugcagcauauuauauacuaugcgcauguuaugaaaugcauaauaaaaaauuuuaaaaaaucuaaaagaucuaaaaaaaaaaaaaaaaaaaaaaaaaaaaaaaaaaaaaaaaaaaaaaaaaaaaaaaaaaaaaaaaugcaucccccccccccccccccccccccccccccccaaaggcucuuuucagagccaccagaauu

SEQ ID NO: 8141 - RNA, 1913 nt, Artificial Sequence
  mRNA product Design f-2 comprising derived and/or modified sequence from HRSV(A2)__F-del_DSCav1_mut8 (opt11)
gggagagcggcucggccauuuugucccagucaguccggaggcugcggcugcagaaguaccgccugcggaguaacugcaaagaagcuuaccauggaacuccucauccucaaagccaacgccaucaccaccauacucaccgcaguaaccuucugcuucgcauccggccaaaacaucacagaagaguucuaccagaguaccugcuccgccgucuccaaaggcuaccuuggcgcccuccguaccgggugguacacauccgucaucacaaucgaacucuccaacaucaaagaaauaaagugcaacggcacagacgccaaaguaaaacugauaaagcaagaacucgacaaauacaaaaacgccguaaccgaccuccagcuacuaaugcaauccacucccgccaccggcagcggauccgccaucgccuccggaguagccgucuguaaagucuuacaccucgaaggcgaagugaacaaaaucaaauccgcccuacucucaaccaacaaagccguaguaucacucuccgggugcggcguuucagugcuaacguucaaaguccuugaccucaaaaacuacaucgacaaacaacuccuccccauccuaaauaaacaauccugcuccauacccaacaucgagacugucaucgaguuccagcagaaaaacaaccgacuccucgaaaucacacgcgaguucucugucaacgccggcgucacaacccccgucuccacauacaugcucaccaacagcgaacuccucucccuaaucaaugacaugcccaucaccaacgaccaaaagaaacucaugucaaacaacguccaaaucguccgccaacaauccuacagcaucaugugcaucaucaaagaagaaguucucgcauacguaguacaacucccccucuacggagugaucgacacccccugcuggaaacuacacaccagcccgcuuugcaccacaaacaccaaggaaggcuccaacaucugccucacucgaaccgaccgcggcugguacugcgacaacgcaggcuccgucaguuucuuuccccaagcagaaacaugcaaaguccaauccaaccgaguauucugcgacaccaugaacucccucacccuaccauccgaaguuaaccuaugcaacguggacaucuucaaccccaaguacgacugcaaaauuaugaccuccaaaaccgacguauccuccagcgucaucaccagccucggagcaauagucuccugcuacggcaagaccaagugcaccgcuuccaacaagugucgcggaaucaucaaaaccuucucaaacggcugcgacuacgucuccaacaaaggcgucgacaccguauccguaggaaacacccuauacuacgucaacaaacaagaaggacaaucccucuaugucaaaggcgaacccaucaucaauuucuacgacccccuagucuucccuuccgacgaguucgacgcguccaucagccaagucaaugaaaagaucaaccagagccuggcauucauccgcaaauccgacgaacuccuccacaacgucaacgcgggaaaauccacgacaaacaucaugaucaccaccaucaucaucgucaucauagucauucuccuuucucucaucgccgugggacuacuucucuacugcaaagcccgauaaggacuaguggaagcauuuuccuggcugauuaaaagaaauuacucagcuauggucaucuguuccuguuagaaggcuaugcagcauauuauauacuaugcgcauguuaugaaaugcauaauaaaaaauuuuaaaaaaucuaaaagaucuaaaaaaaaaaaaaaaaaaaaaaaaaaaaaaaaaaaaaaaaaaaaaaaaaaaaaaaaaaaaaaaaugcaucccccccccccccccccccccccccccccccaaaggcucuuuucagagccaccagaauu

SEQ ID NO: 8142 - RNA, 1904 nt, Artificial Sequence
  mRNA product Design f-3 comprising derived and/or modified sequence from HRSV(A2)__F-del_DSCav1_mut8 (opt1)
gggagagucccgcagucggcguccagcggcucugcuuguucgugugugugucguugcaggccuuauucaagcuuaccauggagcugcucauccugaaggccaacgccaucaccaccauccugacggcggugaccuucugcuucgccagcggccagaacaucaccgaggaguucuaccaguccacgugcagcgccgucuccaagggguaccucggcgcccugcggaccggcugguacaccuccgugaucaccaucgagcugagcaacaucaaggagaucaagugcaacgggaccgacgccaaggugaagcucaucaagcaggagcuggacaaguacaagaacgcggucacggaccugcagcuccugaugcaguccaccccggcaaccggcuccggcuccgccaucgcgagcggcgucgccgugugcaaggugcugcaccucgagggggaggucaacaagaucaagagcgcccugcuguccaccaacaaggccguggugagccucuccggcugcggcgucagcgugcugaccuucaaggugcuggaccucaagaacuacaucgacaagcagcugcugcccauccugaacaagcagagcugcuccauccccaacaucgagacggugaucgaguuccagcagaagaacaaccggcuccuggagaucacccgcgaguucagcgugaacgccggggucaccacccccguguccacguacaugcugaccaacagcgagcuccugucccugaucaacgacaugccgaucaccaacgaccagaagaagcucaugagcaacaacgugcagaucguccggcagcaguccuacagcaucaugugcaucaucaaggaggaggugcuggcguacgugguccagcugccccucuacggcgugaucgacacccccugcuggaagcugcacacgagcccccugugcaccaccaacaccaaggagggguccaacaucugccucacgcgcaccgaccggggcugguacugcgacaacgccggcagcgucuccuucuucccgcaggccgagaccugcaaggugcagagcaaccgcguguucugcgacaccaugaacucccugacgcugcccagcgagguaaaccucugcaacgucgacaucuucaaccccaaguacgacugcaagaucaugaccuccaagaccgacgugagcuccagcgugaucaccucccugggggccaucgucagcugcuacggcaagacgaagugcaccgccagcaacaagugccgggggaucaucaagaccuucuccaacggcugcgacuacgugagcaacaagggcguggacaccguguccgucgggaacacccuguacuacgugaacaagcaggagggccagagccucuacgugaagggggagcccaucaucaacuucuacgacccgcuggucuuccccuccgacgaguucgacgcgagcaucucccaggugaacgagaagaucaaccagagccuggccuucauccgcaaguccgacgagcugcuccacaacgugaacgccggcaagagcacgaccaacaucaugaucaccaccaucaucaucgucaucaucgugauccugcugucccucaucgccguggggcugcugcucuacugcaaggcccggugaggacuaguacuggcugcaucucccuuuccucuguccuccauccuucucccaggauggugaagggggaccugguacccagugauccccaccccaggauccuaaaucaugacuuaccugcuaauaaaaacucauuggaaaagugagaagaucuaaaaaaaaaaaaaaaaaaaaaaaaaaaaaaaaaaaaaaaaaaaaaaaaaaaaaaaaaaaaaaaaugcaucccccccccccccccccccccccccccccccaaaggcucuuuucagagccaccagaauu

SEQ ID NO: 8143 - RNA, 1904 nt, Artificial Sequence
  mRNA product Design f-3 comprising derived and/or modified sequence from HRSV(A2)__F-del_DSCav1_mut8 (opt1)
gggagagucccgcagucggcguccagcggcucugcuuguucgugugugugucguugcaggccuuauucaagcuuaccauggagcugcucauccugaaggccaacgccaucaccaccauccugacggcggugaccuucugcuucgccagcggccagaacaucaccgaggaguucuaccaguccacgugcagcgccgucuccaagggguaccucggcgcccugcgcaccgggugguacaccagcgugaucaccaucgagcuguccaacaucaaggagaucaagugcaacggcaccgacgccaaggugaagcucaucaagcaggagcuggacaaguacaagaacgcggucacggaccugcagcuccugaugcagagcacccccgccaccggguccggcagcgccaucgccuccggcguggcggugugcaagguccugcaccucgagggggaggugaacaagaucaagagcgcccugcuguccaccaacaaggccguggucagccucuccggcugcggggugagcgugcugacguucaagguccuggaccucaagaacuacaucgacaagcagcugcugccgauccucaacaagcaguccugcagcauccccaacaucgagaccgugaucgaguuccagcagaagaacaaccggcugcuggagaucacccgcgaguucuccgugaacgccggcgucaccacgcccgugagcaccuacaugcucaccaacuccgagcugcugagccucaucaacgacaugcccaucaccaacgaccagaagaagcugaugagcaacaacgugcagaucguccggcagcaguccuacagcaucaugugcaucaucaaggaggaggugcuggccuacgugguccagcucccgcuguacggggugaucgacacgcccugcuggaagcugcacaccagcccccucugcaccaccaacacgaaggagggcuccaacaucugccugacccgcaccgaccggggcugguacugcgacaacgcgggguccgugagcuucuucccccaggccgagaccugcaagguccaguccaaccgcguguucugcgacacgaugaacagccugacccucccguccgaggucaaccugugcaacguggacaucuucaaccccaaguacgacugcaagaucaugaccagcaagaccgacguguccagcuccgucaucacgagccugggcgccaucguguccugcuacgggaagaccaagugcaccgccagcaacaagugccggggcaucaucaagaccuucuccaacggcugcgacuacgugagcaacaagggggucgacacgguguccgugggcaacacccucuacuacgucaacaagcaggaggggcagagccuguacgugaagggcgagcccaucaucaacuucuacgacccccugguguucccgagcgacgaguucgacgccuccaucagccaggucaacgagaagaucaaccagucccucgcguucauccgcaagagcgacgagcugcugcacaacgugaacgccgggaaguccaccaccaacaucaugaucaccacgaucaucaucgugaucaucgucauccuccugagccugaucgccgugggccuccugcuguacugcaaggcccggugaggacuaguacuggcugcaucucccuuuccucuguccuccauccuucucccaggauggugaagggggaccugguacccagugauccccaccccaggauccuaaaucaugacuuaccugcuaauaaaaacucauuggaaaagugagaagaucuaaaaaaaaaaaaaaaaaaaaaaaaaaaaaaaaaaaaaaaaaaaaaaaaaaaaaaaaaaaaaaaaugcaucccccccccccccccccccccccccccccccaaaggcucuuuucagagccaccagaauu

SEQ ID NO: 8144 - RNA, 1904 nt, Artificial Sequence
  mRNA product Design f-3 comprising derived and/or modified sequence from HRSV(A2)__F-del_DSCav1_mut8 (opt2)
gggagagucccgcagucggcguccagcggcucugcuuguucgugugugugucguugcaggccuuauucaagcuuaccauggagcuccucauccucaaggccaacgccaucaccaccauccucaccgccgucaccuucugcuucgccuccggccagaacaucaccgaggaguucuaccaguccaccugcuccgccgucuccaagggcuaccucggcgcccuccgcaccggcugguacaccuccgucaucaccaucgagcucuccaacaucaaggagaucaagugcaacggcaccgacgccaaggucaagcucaucaagcaggagcucgacaaguacaagaacgccgucaccgaccuccagcuccucaugcaguccacccccgccaccggcuccggcuccgccaucgccuccggcgucgccgucugcaagguccuccaccucgagggcgaggucaacaagaucaaguccgcccuccucuccaccaacaaggccgucgucucccucuccggcugcggcgucuccguccucaccuucaagguccucgaccucaagaacuacaucgacaagcagcuccuccccauccucaacaagcaguccugcuccauccccaacaucgagaccgucaucgaguuccagcagaagaacaaccgccuccucgagaucacccgcgaguucuccgucaacgccggcgucaccacccccgucuccaccuacaugcucaccaacuccgagcuccucucccucaucaacgacaugcccaucaccaacgaccagaagaagcucauguccaacaacguccagaucguccgccagcaguccuacuccaucaugugcaucaucaaggaggagguccucgccuacgucguccagcucccccucuacggcgucaucgacacccccugcuggaagcuccacaccuccccccucugcaccaccaacaccaaggagggcuccaacaucugccucacccgcaccgaccgcggcugguacugcgacaacgccggcuccgucuccuucuucccccaggccgagaccugcaagguccaguccaaccgcgucuucugcgacaccaugaacucccucacccuccccuccgaggucaaccucugcaacgucgacaucuucaaccccaaguacgacugcaagaucaugaccuccaagaccgacgucuccuccuccgucaucaccucccucggcgccaucgucuccugcuacggcaagaccaagugcaccgccuccaacaagugccgcggcaucaucaagaccuucuccaacggcugcgacuacgucuccaacaagggcgucgacaccgucuccgucggcaacacccucuacuacgucaacaagcaggagggccagucccucuacgucaagggcgagcccaucaucaacuucuacgacccccucgucuuccccuccgacgaguucgacgccuccaucucccaggucaacgagaagaucaaccagucccucgccuucauccgcaaguccgacgagcuccuccacaacgucaacgccggcaaguccaccaccaacaucaugaucaccaccaucaucaucgucaucaucgucauccuccucucccucaucgccgucggccuccuccucuacugcaaggcccgcugaggacuaguacuggcugcaucucccuuuccucuguccuccauccuucucccaggauggugaagggggaccugguacccagugauccccaccccaggauccuaaaucaugacuuaccugcuaauaaaaacucauuggaaaagugagaagaucuaaaaaaaaaaaaaaaaaaaaaaaaaaaaaaaaaaaaaaaaaaaaaaaaaaaaaaaaaaaaaaaaugcaucccccccccccccccccccccccccccccccaaaggcucuuuucagagccaccagaauu

SEQ ID NO: 8145 - RNA, 1904 nt, Artificial Sequence
  mRNA product Design f-3 comprising derived and/or modified sequence from HRSV(A2)__F-del_DSCav1_mut8 (opt3)
gggagagucccgcagucggcguccagcggcucugcuuguucgugugugugucguugcaggccuuauucaagcuuaccauggagcugcucauccuuaaggccaacgcuauuaccacaauacugacugcagugacguucugcuuugccagcggccagaauaucaccgaagaguucuaccaauccacauguucugcggucucaaaaggguauuugggagcuuuaagaacugguugguacaccaguguuauuacaaucgaacugagcaacauuaaggagaucaaaugcaauggcaccgacgccaaggugaaacuaauaaagcaggaacucgauaaguauaaaaacgcaguaacugaccugcagcuucugaugcaguccacacccgccaccgggucuggaucggcuaucgcaucaggcguggccgucuguaagguguugcaccucgagggugagguuaauaaaauuaagagcgcucugcugaguacgaacaaagccguggucucccucucugggugcggagugagcguauuaacuuuuaagguucuggaucuuaagaauuacaucgacaaacaauugcugccuauucuaaacaagcaguccuguucaaucccaaauauagaaaccgugauugaguuccagcagaaaaacaauaggcuccuggaaaucacacgggaguuuagugucaacgcgggcgugacuaccccggugagcacauauaugcuuaccaauucugagcuguugucccucauuaacgauaugcccaucacgaaugaccaaaagaaacugaugucaaacaacguccagaucguucgccagcagagcuacaguauuaugugcauaaucaaggaagagguguuagcauauguagugcaacugccucucuacggcgucauugauacuccauguuggaaacuucauacaucuccccugugcaccacuaauacaaaggaaggguccaacaucuguuugacccgaacggaccguggaugguacugcgauaaugccgguagcgugucguucuuuccucaggcugagaccuguaagguucagucuaacagaguguucugcgacacaaugaacucccuaacucugccaucagaagucaaucucugcaauguggauauauuuaaccccaaauaugacuguaagauuaugaccaguaaaacagauguaagcuccucuguuaucacuagccugggcgccaucgugucaugcuacgggaagaccaaauguacagcaaguaauaagugcaggggaauuaucaagaccuucuccaacggcugugacuaugucagcaauaaagguguggacacugucucuguggggaacacgcuuuacuauguuaauaagcaagagggacagucacuguacgugaaaggcgagccuauuauaaacuuuuaugauccauugguauucccgagugacgaauuugaugcuagcaucucccaggucaaugagaagauuaaccagucucucgccuucauccggaaaucggacgaacuguuacacaacgugaaugcgggcaagagcacaaccaacaucaugauuacuaccauaaucauuguuaucauugugauccugcuaucccucauagccgucgggcugcuuuuguacugcaaggcacgcugaggacuaguacuggcugcaucucccuuuccucuguccuccauccuucucccaggauggugaagggggaccugguacccagugauccccaccccaggauccuaaaucaugacuuaccugcuaauaaaaacucauuggaaaagugagaagaucuaaaaaaaaaaaaaaaaaaaaaaaaaaaaaaaaaaaaaaaaaaaaaaaaaaaaaaaaaaaaaaaaugcaucccccccccccccccccccccccccccccccaaaggcucuuuucagagccaccagaauu

SEQ ID NO: 8146 - RNA, 1904 nt, Artificial Sequence
  mRNA product Design f-3 comprising derived and/or modified sequence from HRSV(A2)__F-del_DSCav1_mut8 (opt4)
gggagagucccgcagucggcguccagcggcucugcuuguucgugugugugucguugcaggccuuauucaagcuuaccauggagcugcugauccugaaggccaacgccaucaccaccauccugaccgccgugaccuucugcuucgccagcggccagaacaucaccgaggaguucuaccagagcaccugcagcgccgugagcaagggcuaccugggcgcccugagaaccggcugguacaccagcgugaucaccaucgagcugagcaacaucaaggagaucaagugcaacggcaccgacgccaaggugaagcugaucaagcaggagcuggacaaguacaagaacgccgugaccgaccugcagcugcugaugcagagcacccccgccaccggcagcggcagcgccaucgccagcggcguggccgugugcaaggugcugcaccuggagggcgaggugaacaagaucaagagcgcccugcugagcaccaacaaggccguggugagccugagcggcugcggcgugagcgugcugaccuucaaggugcuggaccugaagaacuacaucgacaagcagcugcugcccauccugaacaagcagagcugcagcauccccaacaucgagaccgugaucgaguuccagcagaagaacaacagacugcuggagaucaccagagaguucagcgugaacgccggcgugaccacccccgugagcaccuacaugcugaccaacagcgagcugcugagccugaucaacgacaugcccaucaccaacgaccagaagaagcugaugagcaacaacgugcagaucgugagacagcagagcuacagcaucaugugcaucaucaaggaggaggugcuggccuacguggugcagcugccccuguacggcgugaucgacacccccugcuggaagcugcacaccagcccccugugcaccaccaacaccaaggagggcagcaacaucugccugaccagaaccgacagaggcugguacugcgacaacgccggcagcgugagcuucuucccccaggccgagaccugcaaggugcagagcaacagaguguucugcgacaccaugaacagccugacccugcccagcgaggugaaccugugcaacguggacaucuucaaccccaaguacgacugcaagaucaugaccagcaagaccgacgugagcagcagcgugaucaccagccugggcgccaucgugagcugcuacggcaagaccaagugcaccgccagcaacaagugcagaggcaucaucaagaccuucagcaacggcugcgacuacgugagcaacaagggcguggacaccgugagcgugggcaacacccuguacuacgugaacaagcaggagggccagagccuguacgugaagggcgagcccaucaucaacuucuacgacccccugguguuccccagcgacgaguucgacgccagcaucagccaggugaacgagaagaucaaccagagccuggccuucaucagaaagagcgacgagcugcugcacaacgugaacgccggcaagagcaccaccaacaucaugaucaccaccaucaucaucgugaucaucgugauccugcugagccugaucgccgugggccugcugcuguacugcaaggccagaugaggacuaguacuggcugcaucucccuuuccucuguccuccauccuucucccaggauggugaagggggaccugguacccagugauccccaccccaggauccuaaaucaugacuuaccugcuaauaaaaacucauuggaaaagugagaagaucuaaaaaaaaaaaaaaaaaaaaaaaaaaaaaaaaaaaaaaaaaaaaaaaaaaaaaaaaaaaaaaaaugcaucccccccccccccccccccccccccccccccaaaggcucuuuucagagccaccagaauu

SEQ ID NO: 8147 - RNA, 1904 nt, Artificial Sequence
  mRNA product Design f-3 comprising derived and/or modified sequence from HRSV(A2)__F-del_DSCav1_mut8 (opt5)
gggagagucccgcagucggcguccagcggcucugcuuguucgugugugugucguugcaggccuuauucaagcuuaccauggagcugcucauccugaaggccaacgcuauuaccacaauccuuacggccgugaccuucugcuuugcgagcggccagaauauuacagaagaguucuaccaauccaccuguucugcugucagcaaaggguaucugggagcccucagaacaggcugguacaccuccguuaucacaauugaacugucuaacaucaaggagaucaaaugcaaugggaccgacgccaaggugaaacuuauuaagcaggaacuggauaaguauaaaaacgcugugacggaccuccagcugcugaugcagagcacccccgccacaggauccggcucugcuaucgccagcggggucgcgguguguaagguucuccaccuggagggagaggugaauaaaauuaaguccgcccuucugagcaccaacaaagcugucgugucucucuccggcugcggcguuagcgugcugacauuuaagguccuugaucugaagaauuacaucgacaaacaacuccugccuauucugaacaagcagucuuguuccaucccgaauauugaaaccgugaucgaguuccagcagaaaaacaaucggcuccuggaaaucacgcgcgaguuuagcgugaacgccggggucacaacccccguuucuacauauaugcuuaccaauuccgagcugcucagccugauuaacgauaugccuaucaccaaugaccaaaagaaacuuauguccaacaacgugcagauugugagacagcagucuuacagcaucaugugcauuaucaaggaagagguccuggcuuaugugguucaacucccccuguacggagugaucgauacaccuuguuggaaacugcauacgagcccccucugcaccacaaauaccaaggaaggcagcaacauuugucugacacggaccgaccgcgggugguacugcgauaaugccggaucugucuccuucuuuccucaggcggagacguguaaggugcagagcaacagaguuuucugcgacacaaugaacucucuuacccugccgagcgaagugaaucucugcaaugucgauaucuuuaaccccaaauaugacuguaagauuaugaccuccaaaacagaugugucuagcuccgucaucaccagccugggcgccauugugucuugcuacgggaagacaaaauguacggcuuccaauaagugccggggaaucaucaagaccuucagcaacggcugugacuauguuucuaauaaaggcguggacacagucuccguggggaacacccuuuacuauguuaauaagcaagagggacagagccuguacgugaaaggcgagccuauuaucaacuuuuaugauccccucgucuucccuuccgacgaauuugaugccucuauuagccaggugaaugagaagaucaaccagucccuggcuuucauucgcaaaucugacgaacugcuccacaacgugaaugccgggaaguccacaaccaacaucaugauuacgaccaucaucauuguuaucauugucauccugcuuucccugauugccgugggacuccugcuguacugcaaggcuagaugaggacuaguacuggcugcaucucccuuuccucuguccuccauccuucucccaggauggugaagggggaccugguacccagugauccccaccccaggauccuaaaucaugacuuaccugcuaauaaaaacucauuggaaaagugagaagaucuaaaaaaaaaaaaaaaaaaaaaaaaaaaaaaaaaaaaaaaaaaaaaaaaaaaaaaaaaaaaaaaaugcaucccccccccccccccccccccccccccccccaaaggcucuuuucagagccaccagaauu

SEQ ID NO: 8148 - RNA, 1904 nt, Artificial Sequence
  mRNA product Design f-3 comprising derived and/or modified sequence from HRSV(A2)__F-del_DSCav1_mut8 (opt6)
gggagagucccgcagucggcguccagcggcucugcuuguucgugugugugucguugcaggccuuauucaagcuuaccauggaacuacucauauugaaagccaacgcaaucacaacaauacuaaccgccguaacauuuugcuucgcgucaggccaaaauauaacagaagaauuuuaccaaucaacaugcuccgccguaucaaaaggauaccuaggugcauuacgaaccgguugguacacaucaguaaucacaauagaacuuuccaacauuaaagaaauaaaaugcaauggcacagacgcaaaagucaaacuaauaaaacaagaacuagacaaauauaaaaacgccgucacagacuuacaacuauuaaugcaaagcacaccagcaacaggauccggaucagcaauagcaucaggaguagccgucuguaaaguacuacaccuagaaggcgaaguuaauaaaauuaaaucagcuuuauuaucaaccaacaaagcaguaguaucacuauccggaugcggagucuccguccuaacauucaaaguacuagaccucaagaauuacauagauaaacaacuacuaccaauacucaacaaacaaucauguucaauaccaaacaucgaaaccgucauagaauuucaacaaaaaaauaauagacucuuagaaauaacacgagaauuuagcguaaacgcaggagucacaaccccugucucaacauacaugcuaaccaauuccgaauuauuaucacucauaaaugacaugccaauaacuaaugaccaaaaaaaacuuaugucaaacaacguacaaauaguaagacaacaaucauauucaauaaugugcauaaucaaagaagaaguuuuagcauauguaguacaacuaccacuauauggcgucauagacacaccaugcuggaaauuacacacaucaccucuaugcacaacaaacacaaaagaaggaagcaacauuugccuaaccagaaccgauagaggaugguacugcgauaacgcaggcucaguaucauucuucccucaagccgaaacuugcaaaguccaaucaaauagagucuucugcgauacaaugaacuccuuaacuuuaccaucagaaguaaaucuaugcaacguagauaucuuuaauccaaaauacgauugcaaaaucaugacaucaaaaacagauguaucaucuaguguaauuaccucccuaggagcaauaguaagcugcuacggaaaaacaaaaugcaccgccucuaacaaaugucguggaauaauaaaaacauucucaaacggaugcgauuauguaucaaauaaaggugucgacaccguaucaguaggcaauacacuauacuauguaaauaaacaagaaggacaaucacucuacgucaaaggugaaccaauaauaaacuucuacgacccacuuguauucccaagcgacgaauuugacgcaucaauaagccaaguaaacgaaaaaauaaaccaaucacuagcauucaucagaaaaucagacgaacuacuccacaauguaaaugcaggaaaaucaacaaccaauaucaugauaacaaccauaauaauagucauaauaguaauacuauuaucccucauagccguuggacuacuccuauauuguaaagcacgauaaggacuaguacuggcugcaucucccuuuccucuguccuccauccuucucccaggauggugaagggggaccugguacccagugauccccaccccaggauccuaaaucaugacuuaccugcuaauaaaaacucauuggaaaagugagaagaucuaaaaaaaaaaaaaaaaaaaaaaaaaaaaaaaaaaaaaaaaaaaaaaaaaaaaaaaaaaaaaaaaugcaucccccccccccccccccccccccccccccccaaaggcucuuuucagagccaccagaauu

SEQ ID NO: 8149 - RNA, 1904 nt, Artificial Sequence
  mRNA product Design f-3 comprising derived and/or modified sequence from HRSV(A2)__F-del_DSCav1_mut8 (opt11)
gggagagucccgcagucggcguccagcggcucugcuuguucgugugugugucguugcaggccuuauucaagcuuaccauggaacuccucauccucaaagccaacgccaucaccaccauacucaccgcaguaaccuucugcuucgcauccggccaaaacaucacagaagaguucuaccagaguaccugcuccgccgucuccaaaggcuaccuuggcgcccuccguaccgggugguacacauccgucaucacaaucgaacucuccaacaucaaagaaauaaagugcaacggcacagacgccaaaguaaaacugauaaagcaagaacucgacaaauacaaaaacgccguaaccgaccuccagcuacuaaugcaauccacucccgccaccggcagcggauccgccaucgccuccggaguagccgucuguaaagucuuacaccucgaaggcgaagugaacaaaaucaaauccgcccuacucucaaccaacaaagccguaguaucacucuccgggugcggcguuucagugcuaacguucaaaguccuugaccucaaaaacuacaucgacaaacaacuccuccccauccuaaauaaacaauccugcuccauacccaacaucgagacugucaucgaguuccagcagaaaaacaaccgacuccucgaaaucacacgcgaguucucugucaacgccggcgucacaacccccgucuccacauacaugcucaccaacagcgaacuccucucccuaaucaaugacaugcccaucaccaacgaccaaaagaaacucaugucaaacaacguccaaaucguccgccaacaauccuacagcaucaugugcaucaucaaagaagaaguucucgcauacguaguacaacucccccucuacggagugaucgacacccccugcuggaaacuacacaccagcccgcuuugcaccacaaacaccaaggaaggcuccaacaucugccucacucgaaccgaccgcggcugguacugcgacaacgcaggcuccgucaguuucuuuccccaagcagaaacaugcaaaguccaauccaaccgaguauucugcgacaccaugaacucccucacccuaccauccgaaguuaaccuaugcaacguggacaucuucaaccccaaguacgacugcaaaauuaugaccuccaaaaccgacguauccuccagcgucaucaccagccucggagcaauagucuccugcuacggcaagaccaagugcaccgcuuccaacaagugucgcggaaucaucaaaaccuucucaaacggcugcgacuacgucuccaacaaaggcgucgacaccguauccguaggaaacacccuauacuacgucaacaaacaagaaggacaaucccucuaugucaaaggcgaacccaucaucaauuucuacgacccccuagucuucccuuccgacgaguucgacgcguccaucagccaagucaaugaaaagaucaaccagagccuggcauucauccgcaaauccgacgaacuccuccacaacgucaacgcgggaaaauccacgacaaacaucaugaucaccaccaucaucaucgucaucauagucauucuccuuucucucaucgccgugggacuacuucucuacugcaaagcccgauaaggacuaguacuggcugcaucucccuuuccucuguccuccauccuucucccaggauggugaagggggaccugguacccagugauccccaccccaggauccuaaaucaugacuuaccugcuaauaaaaacucauuggaaaagugagaagaucuaaaaaaaaaaaaaaaaaaaaaaaaaaaaaaaaaaaaaaaaaaaaaaaaaaaaaaaaaaaaaaaaugcaucccccccccccccccccccccccccccccccaaaggcucuuuucagagccaccagaauu

SEQ ID NO: 8150 - RNA, 2120 nt, Artificial Sequence
  mRNA product Design f-4 comprising derived and/or modified sequence from HRSV(A2)__F-del_DSCav1_mut8 (opt1)
gggagagucccgcagucggcguccagcggcucugcuuguucgugugugugucguugcaggccuuauucaagcuuaccauggagcugcucauccugaaggccaacgccaucaccaccauccugacggcggugaccuucugcuucgccagcggccagaacaucaccgaggaguucuaccaguccacgugcagcgccgucuccaagggguaccucggcgcccugcggaccggcugguacaccuccgugaucaccaucgagcugagcaacaucaaggagaucaagugcaacgggaccgacgccaaggugaagcucaucaagcaggagcuggacaaguacaagaacgcggucacggaccugcagcuccugaugcaguccaccccggcaaccggcuccggcuccgccaucgcgagcggcgucgccgugugcaaggugcugcaccucgagggggaggucaacaagaucaagagcgcccugcuguccaccaacaaggccguggugagccucuccggcugcggcgucagcgugcugaccuucaaggugcuggaccucaagaacuacaucgacaagcagcugcugcccauccugaacaagcagagcugcuccauccccaacaucgagacggugaucgaguuccagcagaagaacaaccggcuccuggagaucacccgcgaguucagcgugaacgccggggucaccacccccguguccacguacaugcugaccaacagcgagcuccugucccugaucaacgacaugccgaucaccaacgaccagaagaagcucaugagcaacaacgugcagaucguccggcagcaguccuacagcaucaugugcaucaucaaggaggaggugcuggcguacgugguccagcugccccucuacggcgugaucgacacccccugcuggaagcugcacacgagcccccugugcaccaccaacaccaaggagggguccaacaucugccucacgcgcaccgaccggggcugguacugcgacaacgccggcagcgucuccuucuucccgcaggccgagaccugcaaggugcagagcaaccgcguguucugcgacaccaugaacucccugacgcugcccagcgagguaaaccucugcaacgucgacaucuucaaccccaaguacgacugcaagaucaugaccuccaagaccgacgugagcuccagcgugaucaccucccugggggccaucgucagcugcuacggcaagacgaagugcaccgccagcaacaagugccgggggaucaucaagaccuucuccaacggcugcgacuacgugagcaacaagggcguggacaccguguccgucgggaacacccuguacuacgugaacaagcaggagggccagagccucuacgugaagggggagcccaucaucaacuucuacgacccgcuggucuuccccuccgacgaguucgacgcgagcaucucccaggugaacgagaagaucaaccagagccuggccuucauccgcaaguccgacgagcugcuccacaacgugaacgccggcaagagcacgaccaacaucaugaucaccaccaucaucaucgucaucaucgugauccugcugucccucaucgccguggggcugcugcucuacugcaaggcccggugaggacuagugaagggaacacccaaauuuaauucagccuuaagcacaauuaauuaagagugaaacguaauuguacaagcaguuggucacccaccauagggcaugaucaacaccgcaaccuuuccuuuuucccccagugauucugaaaaaccccucuucccuucagcuugcuuagauguuccaaauuuaguaagcuuaaggcggccuacagaagaaaaagaaaaaaaaggccacaaaaguucccucucacuuucaguaaauaaaauaaaagcagcaacagaaauaaagaaauaaaugaaauucaaaaugaaauaaauauuguguugugcagcauuaaaaaaucaauaaaaauuaaaaaugagcaagaucuaaaaaaaaaaaaaaaaaaaaaaaaaaaaaaaaaaaaaaaaaaaaaaaaaaaaaaaaaaaaaaaaugcaucccccccccccccccccccccccccccccccaaaggcucuuuucagagccaccagaauu

SEQ ID NO: 8151 - RNA, 2120 nt, Artificial Sequence
  mRNA product Design f-4 comprising derived and/or modified sequence from HRSV(A2)__F-del_DSCav1_mut8 (opt1)
gggagagucccgcagucggcguccagcggcucugcuuguucgugugugugucguugcaggccuuauucaagcuuaccauggagcugcucauccugaaggccaacgccaucaccaccauccugacggcggugaccuucugcuucgccagcggccagaacaucaccgaggaguucuaccaguccacgugcagcgccgucuccaagggguaccucggcgcccugcgcaccgggugguacaccagcgugaucaccaucgagcuguccaacaucaaggagaucaagugcaacggcaccgacgccaaggugaagcucaucaagcaggagcuggacaaguacaagaacgcggucacggaccugcagcuccugaugcagagcacccccgccaccggguccggcagcgccaucgccuccggcguggcggugugcaagguccugcaccucgagggggaggugaacaagaucaagagcgcccugcuguccaccaacaaggccguggucagccucuccggcugcggggugagcgugcugacguucaagguccuggaccucaagaacuacaucgacaagcagcugcugccgauccucaacaagcaguccugcagcauccccaacaucgagaccgugaucgaguuccagcagaagaacaaccggcugcuggagaucacccgcgaguucuccgugaacgccggcgucaccacgcccgugagcaccuacaugcucaccaacuccgagcugcugagccucaucaacgacaugcccaucaccaacgaccagaagaagcugaugagcaacaacgugcagaucguccggcagcaguccuacagcaucaugugcaucaucaaggaggaggugcuggccuacgugguccagcucccgcuguacggggugaucgacacgcccugcuggaagcugcacaccagcccccucugcaccaccaacacgaaggagggcuccaacaucugccugacccgcaccgaccggggcugguacugcgacaacgcgggguccgugagcuucuucccccaggccgagaccugcaagguccaguccaaccgcguguucugcgacacgaugaacagccugacccucccguccgaggucaaccugugcaacguggacaucuucaaccccaaguacgacugcaagaucaugaccagcaagaccgacguguccagcuccgucaucacgagccugggcgccaucguguccugcuacgggaagaccaagugcaccgccagcaacaagugccggggcaucaucaagaccuucuccaacggcugcgacuacgugagcaacaagggggucgacacgguguccgugggcaacacccucuacuacgucaacaagcaggaggggcagagccuguacgugaagggcgagcccaucaucaacuucuacgacccccugguguucccgagcgacgaguucgacgccuccaucagccaggucaacgagaagaucaaccagucccucgcguucauccgcaagagcgacgagcugcugcacaacgugaacgccgggaaguccaccaccaacaucaugaucaccacgaucaucaucgugaucaucgucauccuccugagccugaucgccgugggccuccugcuguacugcaaggcccggugaggacuagugaagggaacacccaaauuuaauucagccuuaagcacaauuaauuaagagugaaacguaauuguacaagcaguuggucacccaccauagggcaugaucaacaccgcaaccuuuccuuuuucccccagugauucugaaaaaccccucuucccuucagcuugcuuagauguuccaaauuuaguaagcuuaaggcggccuacagaagaaaaagaaaaaaaaggccacaaaaguucccucucacuuucaguaaauaaaauaaaagcagcaacagaaauaaagaaauaaaugaaauucaaaaugaaauaaauauuguguugugcagcauuaaaaaaucaauaaaaauuaaaaaugagcaagaucuaaaaaaaaaaaaaaaaaaaaaaaaaaaaaaaaaaaaaaaaaaaaaaaaaaaaaaaaaaaaaaaaugcaucccccccccccccccccccccccccccccccaaaggcucuuuucagagccaccagaauu

SEQ ID NO: 8152 - RNA, 2120 nt, Artificial Sequence
  mRNA product Design f-4 comprising derived and/or modified sequence from HRSV(A2)__F-del_DSCav1_mut8 (opt2)
gggagagucccgcagucggcguccagcggcucugcuuguucgugugugugucguugcaggccuuauucaagcuuaccauggagcuccucauccucaaggccaacgccaucaccaccauccucaccgccgucaccuucugcuucgccuccggccagaacaucaccgaggaguucuaccaguccaccugcuccgccgucuccaagggcuaccucggcgcccuccgcaccggcugguacaccuccgucaucaccaucgagcucuccaacaucaaggagaucaagugcaacggcaccgacgccaaggucaagcucaucaagcaggagcucgacaaguacaagaacgccgucaccgaccuccagcuccucaugcaguccacccccgccaccggcuccggcuccgccaucgccuccggcgucgccgucugcaagguccuccaccucgagggcgaggucaacaagaucaaguccgcccuccucuccaccaacaaggccgucgucucccucuccggcugcggcgucuccguccucaccuucaagguccucgaccucaagaacuacaucgacaagcagcuccuccccauccucaacaagcaguccugcuccauccccaacaucgagaccgucaucgaguuccagcagaagaacaaccgccuccucgagaucacccgcgaguucuccgucaacgccggcgucaccacccccgucuccaccuacaugcucaccaacuccgagcuccucucccucaucaacgacaugcccaucaccaacgaccagaagaagcucauguccaacaacguccagaucguccgccagcaguccuacuccaucaugugcaucaucaaggaggagguccucgccuacgucguccagcucccccucuacggcgucaucgacacccccugcuggaagcuccacaccuccccccucugcaccaccaacaccaaggagggcuccaacaucugccucacccgcaccgaccgcggcugguacugcgacaacgccggcuccgucuccuucuucccccaggccgagaccugcaagguccaguccaaccgcgucuucugcgacaccaugaacucccucacccuccccuccgaggucaaccucugcaacgucgacaucuucaaccccaaguacgacugcaagaucaugaccuccaagaccgacgucuccuccuccgucaucaccucccucggcgccaucgucuccugcuacggcaagaccaagugcaccgccuccaacaagugccgcggcaucaucaagaccuucuccaacggcugcgacuacgucuccaacaagggcgucgacaccgucuccgucggcaacacccucuacuacgucaacaagcaggagggccagucccucuacgucaagggcgagcccaucaucaacuucuacgacccccucgucuuccccuccgacgaguucgacgccuccaucucccaggucaacgagaagaucaaccagucccucgccuucauccgcaaguccgacgagcuccuccacaacgucaacgccggcaaguccaccaccaacaucaugaucaccaccaucaucaucgucaucaucgucauccuccucucccucaucgccgucggccuccuccucuacugcaaggcccgcugaggacuagugaagggaacacccaaauuuaauucagccuuaagcacaauuaauuaagagugaaacguaauuguacaagcaguuggucacccaccauagggcaugaucaacaccgcaaccuuuccuuuuucccccagugauucugaaaaaccccucuucccuucagcuugcuuagauguuccaaauuuaguaagcuuaaggcggccuacagaagaaaaagaaaaaaaaggccacaaaaguucccucucacuuucaguaaauaaaauaaaagcagcaacagaaauaaagaaauaaaugaaauucaaaaugaaauaaauauuguguugugcagcauuaaaaaaucaauaaaaauuaaaaaugagcaagaucuaaaaaaaaaaaaaaaaaaaaaaaaaaaaaaaaaaaaaaaaaaaaaaaaaaaaaaaaaaaaaaaaugcaucccccccccccccccccccccccccccccccaaaggcucuuuucagagccaccagaauu

SEQ ID NO: 8153 - RNA, 2120 nt, Artificial Sequence
  mRNA product Design f-4 comprising derived and/or modified sequence from HRSV(A2)__F-del_DSCav1_mut8 (opt3)
gggagagucccgcagucggcguccagcggcucugcuuguucgugugugugucguugcaggccuuauucaagcuuaccauggagcugcucauccuuaaggccaacgcuauuaccacaauacugacugcagugacguucugcuuugccagcggccagaauaucaccgaagaguucuaccaauccacauguucugcggucucaaaaggguauuugggagcuuuaagaacugguugguacaccaguguuauuacaaucgaacugagcaacauuaaggagaucaaaugcaauggcaccgacgccaaggugaaacuaauaaagcaggaacucgauaaguauaaaaacgcaguaacugaccugcagcuucugaugcaguccacacccgccaccgggucuggaucggcuaucgcaucaggcguggccgucuguaagguguugcaccucgagggugagguuaauaaaauuaagagcgcucugcugaguacgaacaaagccguggucucccucucugggugcggagugagcguauuaacuuuuaagguucuggaucuuaagaauuacaucgacaaacaauugcugccuauucuaaacaagcaguccuguucaaucccaaauauagaaaccgugauugaguuccagcagaaaaacaauaggcuccuggaaaucacacgggaguuuagugucaacgcgggcgugacuaccccggugagcacauauaugcuuaccaauucugagcuguugucccucauuaacgauaugcccaucacgaaugaccaaaagaaacugaugucaaacaacguccagaucguucgccagcagagcuacaguauuaugugcauaaucaaggaagagguguuagcauauguagugcaacugccucucuacggcgucauugauacuccauguuggaaacuucauacaucuccccugugcaccacuaauacaaaggaaggguccaacaucuguuugacccgaacggaccguggaugguacugcgauaaugccgguagcgugucguucuuuccucaggcugagaccuguaagguucagucuaacagaguguucugcgacacaaugaacucccuaacucugccaucagaagucaaucucugcaauguggauauauuuaaccccaaauaugacuguaagauuaugaccaguaaaacagauguaagcuccucuguuaucacuagccugggcgccaucgugucaugcuacgggaagaccaaauguacagcaaguaauaagugcaggggaauuaucaagaccuucuccaacggcugugacuaugucagcaauaaagguguggacacugucucuguggggaacacgcuuuacuauguuaauaagcaagagggacagucacuguacgugaaaggcgagccuauuauaaacuuuuaugauccauugguauucccgagugacgaauuugaugcuagcaucucccaggucaaugagaagauuaaccagucucucgccuucauccggaaaucggacgaacuguuacacaacgugaaugcgggcaagagcacaaccaacaucaugauuacuaccauaaucauuguuaucauugugauccugcuaucccucauagccgucgggcugcuuuuguacugcaaggcacgcugaggacuagugaagggaacacccaaauuuaauucagccuuaagcacaauuaauuaagagugaaacguaauuguacaagcaguuggucacccaccauagggcaugaucaacaccgcaaccuuuccuuuuucccccagugauucugaaaaaccccucuucccuucagcuugcuuagauguuccaaauuuaguaagcuuaaggcggccuacagaagaaaaagaaaaaaaaggccacaaaaguucccucucacuuucaguaaauaaaauaaaagcagcaacagaaauaaagaaauaaaugaaauucaaaaugaaauaaauauuguguugugcagcauuaaaaaaucaauaaaaauuaaaaaugagcaagaucuaaaaaaaaaaaaaaaaaaaaaaaaaaaaaaaaaaaaaaaaaaaaaaaaaaaaaaaaaaaaaaaaugcaucccccccccccccccccccccccccccccccaaaggcucuuuucagagccaccagaauu

SEQ ID NO: 8154 - RNA, 2120 nt, Artificial Sequence
  mRNA product Design f-4 comprising derived and/or modified sequence from HRSV(A2)__F-del_DSCav1_mut8 (opt4)
gggagagucccgcagucggcguccagcggcucugcuuguucgugugugugucguugcaggccuuauucaagcuuaccauggagcugcugauccugaaggccaacgccaucaccaccauccugaccgccgugaccuucugcuucgccagcggccagaacaucaccgaggaguucuaccagagcaccugcagcgccgugagcaagggcuaccugggcgcccugagaaccggcugguacaccagcgugaucaccaucgagcugagcaacaucaaggagaucaagugcaacggcaccgacgccaaggugaagcugaucaagcaggagcuggacaaguacaagaacgccgugaccgaccugcagcugcugaugcagagcacccccgccaccggcagcggcagcgccaucgccagcggcguggccgugugcaaggugcugcaccuggagggcgaggugaacaagaucaagagcgcccugcugagcaccaacaaggccguggugagccugagcggcugcggcgugagcgugcugaccuucaaggugcuggaccugaagaacuacaucgacaagcagcugcugcccauccugaacaagcagagcugcagcauccccaacaucgagaccgugaucgaguuccagcagaagaacaacagacugcuggagaucaccagagaguucagcgugaacgccggcgugaccacccccgugagcaccuacaugcugaccaacagcgagcugcugagccugaucaacgacaugcccaucaccaacgaccagaagaagcugaugagcaacaacgugcagaucgugagacagcagagcuacagcaucaugugcaucaucaaggaggaggugcuggccuacguggugcagcugccccuguacggcgugaucgacacccccugcuggaagcugcacaccagcccccugugcaccaccaacaccaaggagggcagcaacaucugccugaccagaaccgacagaggcugguacugcgacaacgccggcagcgugagcuucuucccccaggccgagaccugcaaggugcagagcaacagaguguucugcgacaccaugaacagccugacccugcccagcgaggugaaccugugcaacguggacaucuucaaccccaaguacgacugcaagaucaugaccagcaagaccgacgugagcagcagcgugaucaccagccugggcgccaucgugagcugcuacggcaagaccaagugcaccgccagcaacaagugcagaggcaucaucaagaccuucagcaacggcugcgacuacgugagcaacaagggcguggacaccgugagcgugggcaacacccuguacuacgugaacaagcaggagggccagagccuguacgugaagggcgagcccaucaucaacuucuacgacccccugguguuccccagcgacgaguucgacgccagcaucagccaggugaacgagaagaucaaccagagccuggccuucaucagaaagagcgacgagcugcugcacaacgugaacgccggcaagagcaccaccaacaucaugaucaccaccaucaucaucgugaucaucgugauccugcugagccugaucgccgugggccugcugcuguacugcaaggccagaugaggacuagugaagggaacacccaaauuuaauucagccuuaagcacaauuaauuaagagugaaacguaauuguacaagcaguuggucacccaccauagggcaugaucaacaccgcaaccuuuccuuuuucccccagugauucugaaaaaccccucuucccuucagcuugcuuagauguuccaaauuuaguaagcuuaaggcggccuacagaagaaaaagaaaaaaaaggccacaaaaguucccucucacuuucaguaaauaaaauaaaagcagcaacagaaauaaagaaauaaaugaaauucaaaaugaaauaaauauuguguugugcagcauuaaaaaaucaauaaaaauuaaaaaugagcaagaucuaaaaaaaaaaaaaaaaaaaaaaaaaaaaaaaaaaaaaaaaaaaaaaaaaaaaaaaaaaaaaaaaugcaucccccccccccccccccccccccccccccccaaaggcucuuuucagagccaccagaauu

SEQ ID NO: 8155 - RNA, 2120 nt, Artificial Sequence
  mRNA product Design f-4 comprising derived and/or modified sequence from HRSV(A2)__F-del_DSCav1_mut8 (opt5)
gggagagucccgcagucggcguccagcggcucugcuuguucgugugugugucguugcaggccuuauucaagcuuaccauggagcugcucauccugaaggccaacgcuauuaccacaauccuuacggccgugaccuucugcuuugcgagcggccagaauauuacagaagaguucuaccaauccaccuguucugcugucagcaaaggguaucugggagcccucagaacaggcugguacaccuccguuaucacaauugaacugucuaacaucaaggagaucaaaugcaaugggaccgacgccaaggugaaacuuauuaagcaggaacuggauaaguauaaaaacgcugugacggaccuccagcugcugaugcagagcacccccgccacaggauccggcucugcuaucgccagcggggucgcgguguguaagguucuccaccuggagggagaggugaauaaaauuaaguccgcccuucugagcaccaacaaagcugucgugucucucuccggcugcggcguuagcgugcugacauuuaagguccuugaucugaagaauuacaucgacaaacaacuccugccuauucugaacaagcagucuuguuccaucccgaauauugaaaccgugaucgaguuccagcagaaaaacaaucggcuccuggaaaucacgcgcgaguuuagcgugaacgccggggucacaacccccguuucuacauauaugcuuaccaauuccgagcugcucagccugauuaacgauaugccuaucaccaaugaccaaaagaaacuuauguccaacaacgugcagauugugagacagcagucuuacagcaucaugugcauuaucaaggaagagguccuggcuuaugugguucaacucccccuguacggagugaucgauacaccuuguuggaaacugcauacgagcccccucugcaccacaaauaccaaggaaggcagcaacauuugucugacacggaccgaccgcgggugguacugcgauaaugccggaucugucuccuucuuuccucaggcggagacguguaaggugcagagcaacagaguuuucugcgacacaaugaacucucuuacccugccgagcgaagugaaucucugcaaugucgauaucuuuaaccccaaauaugacuguaagauuaugaccuccaaaacagaugugucuagcuccgucaucaccagccugggcgccauugugucuugcuacgggaagacaaaauguacggcuuccaauaagugccggggaaucaucaagaccuucagcaacggcugugacuauguuucuaauaaaggcguggacacagucuccguggggaacacccuuuacuauguuaauaagcaagagggacagagccuguacgugaaaggcgagccuauuaucaacuuuuaugauccccucgucuucccuuccgacgaauuugaugccucuauuagccaggugaaugagaagaucaaccagucccuggcuuucauucgcaaaucugacgaacugcuccacaacgugaaugccgggaaguccacaaccaacaucaugauuacgaccaucaucauuguuaucauugucauccugcuuucccugauugccgugggacuccugcuguacugcaaggcuagaugaggacuagugaagggaacacccaaauuuaauucagccuuaagcacaauuaauuaagagugaaacguaauuguacaagcaguuggucacccaccauagggcaugaucaacaccgcaaccuuuccuuuuucccccagugauucugaaaaaccccucuucccuucagcuugcuuagauguuccaaauuuaguaagcuuaaggcggccuacagaagaaaaagaaaaaaaaggccacaaaaguucccucucacuuucaguaaauaaaauaaaagcagcaacagaaauaaagaaauaaaugaaauucaaaaugaaauaaauauuguguugugcagcauuaaaaaaucaauaaaaauuaaaaaugagcaagaucuaaaaaaaaaaaaaaaaaaaaaaaaaaaaaaaaaaaaaaaaaaaaaaaaaaaaaaaaaaaaaaaaugcaucccccccccccccccccccccccccccccccaaaggcucuuuucagagccaccagaauu

SEQ ID NO: 8156 - RNA, 2120 nt, Artificial Sequence
  mRNA product Design f-4 comprising derived and/or modified sequence from HRSV(A2)__F-del_DSCav1_mut8 (opt6)
gggagagucccgcagucggcguccagcggcucugcuuguucgugugugugucguugcaggccuuauucaagcuuaccauggaacuacucauauugaaagccaacgcaaucacaacaauacuaaccgccguaacauuuugcuucgcgucaggccaaaauauaacagaagaauuuuaccaaucaacaugcuccgccguaucaaaaggauaccuaggugcauuacgaaccgguugguacacaucaguaaucacaauagaacuuuccaacauuaaagaaauaaaaugcaauggcacagacgcaaaagucaaacuaauaaaacaagaacuagacaaauauaaaaacgccgucacagacuuacaacuauuaaugcaaagcacaccagcaacaggauccggaucagcaauagcaucaggaguagccgucuguaaaguacuacaccuagaaggcgaaguuaauaaaauuaaaucagcuuuauuaucaaccaacaaagcaguaguaucacuauccggaugcggagucuccguccuaacauucaaaguacuagaccucaagaauuacauagauaaacaacuacuaccaauacucaacaaacaaucauguucaauaccaaacaucgaaaccgucauagaauuucaacaaaaaaauaauagacucuuagaaauaacacgagaauuuagcguaaacgcaggagucacaaccccugucucaacauacaugcuaaccaauuccgaauuauuaucacucauaaaugacaugccaauaacuaaugaccaaaaaaaacuuaugucaaacaacguacaaauaguaagacaacaaucauauucaauaaugugcauaaucaaagaagaaguuuuagcauauguaguacaacuaccacuauauggcgucauagacacaccaugcuggaaauuacacacaucaccucuaugcacaacaaacacaaaagaaggaagcaacauuugccuaaccagaaccgauagaggaugguacugcgauaacgcaggcucaguaucauucuucccucaagccgaaacuugcaaaguccaaucaaauagagucuucugcgauacaaugaacuccuuaacuuuaccaucagaaguaaaucuaugcaacguagauaucuuuaauccaaaauacgauugcaaaaucaugacaucaaaaacagauguaucaucuaguguaauuaccucccuaggagcaauaguaagcugcuacggaaaaacaaaaugcaccgccucuaacaaaugucguggaauaauaaaaacauucucaaacggaugcgauuauguaucaaauaaaggugucgacaccguaucaguaggcaauacacuauacuauguaaauaaacaagaaggacaaucacucuacgucaaaggugaaccaauaauaaacuucuacgacccacuuguauucccaagcgacgaauuugacgcaucaauaagccaaguaaacgaaaaaauaaaccaaucacuagcauucaucagaaaaucagacgaacuacuccacaauguaaaugcaggaaaaucaacaaccaauaucaugauaacaaccauaauaauagucauaauaguaauacuauuaucccucauagccguuggacuacuccuauauuguaaagcacgauaaggacuagugaagggaacacccaaauuuaauucagccuuaagcacaauuaauuaagagugaaacguaauuguacaagcaguuggucacccaccauagggcaugaucaacaccgcaaccuuuccuuuuucccccagugauucugaaaaaccccucuucccuucagcuugcuuagauguuccaaauuuaguaagcuuaaggcggccuacagaagaaaaagaaaaaaaaggccacaaaaguucccucucacuuucaguaaauaaaauaaaagcagcaacagaaauaaagaaauaaaugaaauucaaaaugaaauaaauauuguguugugcagcauuaaaaaaucaauaaaaauuaaaaaugagcaagaucuaaaaaaaaaaaaaaaaaaaaaaaaaaaaaaaaaaaaaaaaaaaaaaaaaaaaaaaaaaaaaaaaugcaucccccccccccccccccccccccccccccccaaaggcucuuuucagagccaccagaauu

SEQ ID NO: 8157 - RNA, 2120 nt, Artificial Sequence
  mRNA product Design f-4 comprising derived and/or modified sequence from HRSV(A2)__F-del_DSCav1_mut8 (opt11)
gggagagucccgcagucggcguccagcggcucugcuuguucgugugugugucguugcaggccuuauucaagcuuaccauggaacuccucauccucaaagccaacgccaucaccaccauacucaccgcaguaaccuucugcuucgcauccggccaaaacaucacagaagaguucuaccagaguaccugcuccgccgucuccaaaggcuaccuuggcgcccuccguaccgggugguacacauccgucaucacaaucgaacucuccaacaucaaagaaauaaagugcaacggcacagacgccaaaguaaaacugauaaagcaagaacucgacaaauacaaaaacgccguaaccgaccuccagcuacuaaugcaauccacucccgccaccggcagcggauccgccaucgccuccggaguagccgucuguaaagucuuacaccucgaaggcgaagugaacaaaaucaaauccgcccuacucucaaccaacaaagccguaguaucacucuccgggugcggcguuucagugcuaacguucaaaguccuugaccucaaaaacuacaucgacaaacaacuccuccccauccuaaauaaacaauccugcuccauacccaacaucgagacugucaucgaguuccagcagaaaaacaaccgacuccucgaaaucacacgcgaguucucugucaacgccggcgucacaacccccgucuccacauacaugcucaccaacagcgaacuccucucccuaaucaaugacaugcccaucaccaacgaccaaaagaaacucaugucaaacaacguccaaaucguccgccaacaauccuacagcaucaugugcaucaucaaagaagaaguucucgcauacguaguacaacucccccucuacggagugaucgacacccccugcuggaaacuacacaccagcccgcuuugcaccacaaacaccaaggaaggcuccaacaucugccucacucgaaccgaccgcggcugguacugcgacaacgcaggcuccgucaguuucuuuccccaagcagaaacaugcaaaguccaauccaaccgaguauucugcgacaccaugaacucccucacccuaccauccgaaguuaaccuaugcaacguggacaucuucaaccccaaguacgacugcaaaauuaugaccuccaaaaccgacguauccuccagcgucaucaccagccucggagcaauagucuccugcuacggcaagaccaagugcaccgcuuccaacaagugucgcggaaucaucaaaaccuucucaaacggcugcgacuacgucuccaacaaaggcgucgacaccguauccguaggaaacacccuauacuacgucaacaaacaagaaggacaaucccucuaugucaaaggcgaacccaucaucaauuucuacgacccccuagucuucccuuccgacgaguucgacgcguccaucagccaagucaaugaaaagaucaaccagagccuggcauucauccgcaaauccgacgaacuccuccacaacgucaacgcgggaaaauccacgacaaacaucaugaucaccaccaucaucaucgucaucauagucauucuccuuucucucaucgccgugggacuacuucucuacugcaaagcccgauaaggacuagugaagggaacacccaaauuuaauucagccuuaagcacaauuaauuaagagugaaacguaauuguacaagcaguuggucacccaccauagggcaugaucaacaccgcaaccuuuccuuuuucccccagugauucugaaaaaccccucuucccuucagcuugcuuagauguuccaaauuuaguaagcuuaaggcggccuacagaagaaaaagaaaaaaaaggccacaaaaguucccucucacuuucaguaaauaaaauaaaagcagcaacagaaauaaagaaauaaaugaaauucaaaaugaaauaaauauuguguugugcagcauuaaaaaaucaauaaaaauuaaaaaugagcaagaucuaaaaaaaaaaaaaaaaaaaaaaaaaaaaaaaaaaaaaaaaaaaaaaaaaaaaaaaaaaaaaaaaugcaucccccccccccccccccccccccccccccccaaaggcucuuuucagagccaccagaauu

SEQ ID NO: 8158 - RNA, 1896 nt, Artificial Sequence
  mRNA product Design f-5 comprising derived and/or modified sequence from HRSV(A2)__F-del_DSCav1_mut8 (opt1)
gggagacuuucccauucuguagcagaauuugguguugccuguggucuuggucccgcggagaagcuuaccauggagcugcucauccugaaggccaacgccaucaccaccauccugacggcggugaccuucugcuucgccagcggccagaacaucaccgaggaguucuaccaguccacgugcagcgccgucuccaagggguaccucggcgcccugcggaccggcugguacaccuccgugaucaccaucgagcugagcaacaucaaggagaucaagugcaacgggaccgacgccaaggugaagcucaucaagcaggagcuggacaaguacaagaacgcggucacggaccugcagcuccugaugcaguccaccccggcaaccggcuccggcuccgccaucgcgagcggcgucgccgugugcaaggugcugcaccucgagggggaggucaacaagaucaagagcgcccugcuguccaccaacaaggccguggugagccucuccggcugcggcgucagcgugcugaccuucaaggugcuggaccucaagaacuacaucgacaagcagcugcugcccauccugaacaagcagagcugcuccauccccaacaucgagacggugaucgaguuccagcagaagaacaaccggcuccuggagaucacccgcgaguucagcgugaacgccggggucaccacccccguguccacguacaugcugaccaacagcgagcuccugucccugaucaacgacaugccgaucaccaacgaccagaagaagcucaugagcaacaacgugcagaucguccggcagcaguccuacagcaucaugugcaucaucaaggaggaggugcuggcguacgugguccagcugccccucuacggcgugaucgacacccccugcuggaagcugcacacgagcccccugugcaccaccaacaccaaggagggguccaacaucugccucacgcgcaccgaccggggcugguacugcgacaacgccggcagcgucuccuucuucccgcaggccgagaccugcaaggugcagagcaaccgcguguucugcgacaccaugaacucccugacgcugcccagcgagguaaaccucugcaacgucgacaucuucaaccccaaguacgacugcaagaucaugaccuccaagaccgacgugagcuccagcgugaucaccucccugggggccaucgucagcugcuacggcaagacgaagugcaccgccagcaacaagugccgggggaucaucaagaccuucuccaacggcugcgacuacgugagcaacaagggcguggacaccguguccgucgggaacacccuguacuacgugaacaagcaggagggccagagccucuacgugaagggggagcccaucaucaacuucuacgacccgcuggucuuccccuccgacgaguucgacgcgagcaucucccaggugaacgagaagaucaaccagagccuggccuucauccgcaaguccgacgagcugcuccacaacgugaacgccggcaagagcacgaccaacaucaugaucaccaccaucaucaucgucaucaucgugauccugcugucccucaucgccguggggcugcugcucuacugcaaggcccggugaggacuaguacuggcugcaucucccuuuccucuguccuccauccuucucccaggauggugaagggggaccugguacccagugauccccaccccaggauccuaaaucaugacuuaccugcuaauaaaaacucauuggaaaagugagaagaucuaaaaaaaaaaaaaaaaaaaaaaaaaaaaaaaaaaaaaaaaaaaaaaaaaaaaaaaaaaaaaaaaugcaucccccccccccccccccccccccccccccccaaaggcucuuuucagagccaccagaauu

SEQ ID NO: 8159 - RNA, 1896 nt, Artificial Sequence
  mRNA product Design f-5 comprising derived and/or modified sequence from HRSV(A2)__F-del_DSCav1_mut8 (opt1)
gggagacuuucccauucuguagcagaauuugguguugccuguggucuuggucccgcggagaagcuuaccauggagcugcucauccugaaggccaacgccaucaccaccauccugacggcggugaccuucugcuucgccagcggccagaacaucaccgaggaguucuaccaguccacgugcagcgccgucuccaagggguaccucggcgcccugcgcaccgggugguacaccagcgugaucaccaucgagcuguccaacaucaaggagaucaagugcaacggcaccgacgccaaggugaagcucaucaagcaggagcuggacaaguacaagaacgcggucacggaccugcagcuccugaugcagagcacccccgccaccggguccggcagcgccaucgccuccggcguggcggugugcaagguccugcaccucgagggggaggugaacaagaucaagagcgcccugcuguccaccaacaaggccguggucagccucuccggcugcggggugagcgugcugacguucaagguccuggaccucaagaacuacaucgacaagcagcugcugccgauccucaacaagcaguccugcagcauccccaacaucgagaccgugaucgaguuccagcagaagaacaaccggcugcuggagaucacccgcgaguucuccgugaacgccggcgucaccacgcccgugagcaccuacaugcucaccaacuccgagcugcugagccucaucaacgacaugcccaucaccaacgaccagaagaagcugaugagcaacaacgugcagaucguccggcagcaguccuacagcaucaugugcaucaucaaggaggaggugcuggccuacgugguccagcucccgcuguacggggugaucgacacgcccugcuggaagcugcacaccagcccccucugcaccaccaacacgaaggagggcuccaacaucugccugacccgcaccgaccggggcugguacugcgacaacgcgggguccgugagcuucuucccccaggccgagaccugcaagguccaguccaaccgcguguucugcgacacgaugaacagccugacccucccguccgaggucaaccugugcaacguggacaucuucaaccccaaguacgacugcaagaucaugaccagcaagaccgacguguccagcuccgucaucacgagccugggcgccaucguguccugcuacgggaagaccaagugcaccgccagcaacaagugccggggcaucaucaagaccuucuccaacggcugcgacuacgugagcaacaagggggucgacacgguguccgugggcaacacccucuacuacgucaacaagcaggaggggcagagccuguacgugaagggcgagcccaucaucaacuucuacgacccccugguguucccgagcgacgaguucgacgccuccaucagccaggucaacgagaagaucaaccagucccucgcguucauccgcaagagcgacgagcugcugcacaacgugaacgccgggaaguccaccaccaacaucaugaucaccacgaucaucaucgugaucaucgucauccuccugagccugaucgccgugggccuccugcuguacugcaaggcccggugaggacuaguacuggcugcaucucccuuuccucuguccuccauccuucucccaggauggugaagggggaccugguacccagugauccccaccccaggauccuaaaucaugacuuaccugcuaauaaaaacucauuggaaaagugagaagaucuaaaaaaaaaaaaaaaaaaaaaaaaaaaaaaaaaaaaaaaaaaaaaaaaaaaaaaaaaaaaaaaaugcaucccccccccccccccccccccccccccccccaaaggcucuuuucagagccaccagaauu

SEQ ID NO: 8160 - RNA, 1896 nt, Artificial Sequence
  mRNA product Design f-5 comprising derived and/or modified sequence from HRSV(A2)__F-del_DSCav1_mut8 (opt2)
gggagacuuucccauucuguagcagaauuugguguugccuguggucuuggucccgcggagaagcuuaccauggagcuccucauccucaaggccaacgccaucaccaccauccucaccgccgucaccuucugcuucgccuccggccagaacaucaccgaggaguucuaccaguccaccugcuccgccgucuccaagggcuaccucggcgcccuccgcaccggcugguacaccuccgucaucaccaucgagcucuccaacaucaaggagaucaagugcaacggcaccgacgccaaggucaagcucaucaagcaggagcucgacaaguacaagaacgccgucaccgaccuccagcuccucaugcaguccacccccgccaccggcuccggcuccgccaucgccuccggcgucgccgucugcaagguccuccaccucgagggcgaggucaacaagaucaaguccgcccuccucuccaccaacaaggccgucgucucccucuccggcugcggcgucuccguccucaccuucaagguccucgaccucaagaacuacaucgacaagcagcuccuccccauccucaacaagcaguccugcuccauccccaacaucgagaccgucaucgaguuccagcagaagaacaaccgccuccucgagaucacccgcgaguucuccgucaacgccggcgucaccacccccgucuccaccuacaugcucaccaacuccgagcuccucucccucaucaacgacaugcccaucaccaacgaccagaagaagcucauguccaacaacguccagaucguccgccagcaguccuacuccaucaugugcaucaucaaggaggagguccucgccuacgucguccagcucccccucuacggcgucaucgacacccccugcuggaagcuccacaccuccccccucugcaccaccaacaccaaggagggcuccaacaucugccucacccgcaccgaccgcggcugguacugcgacaacgccggcuccgucuccuucuucccccaggccgagaccugcaagguccaguccaaccgcgucuucugcgacaccaugaacucccucacccuccccuccgaggucaaccucugcaacgucgacaucuucaaccccaaguacgacugcaagaucaugaccuccaagaccgacgucuccuccuccgucaucaccucccucggcgccaucgucuccugcuacggcaagaccaagugcaccgccuccaacaagugccgcggcaucaucaagaccuucuccaacggcugcgacuacgucuccaacaagggcgucgacaccgucuccgucggcaacacccucuacuacgucaacaagcaggagggccagucccucuacgucaagggcgagcccaucaucaacuucuacgacccccucgucuuccccuccgacgaguucgacgccuccaucucccaggucaacgagaagaucaaccagucccucgccuucauccgcaaguccgacgagcuccuccacaacgucaacgccggcaaguccaccaccaacaucaugaucaccaccaucaucaucgucaucaucgucauccuccucucccucaucgccgucggccuccuccucuacugcaaggcccgcugaggacuaguacuggcugcaucucccuuuccucuguccuccauccuucucccaggauggugaagggggaccugguacccagugauccccaccccaggauccuaaaucaugacuuaccugcuaauaaaaacucauuggaaaagugagaagaucuaaaaaaaaaaaaaaaaaaaaaaaaaaaaaaaaaaaaaaaaaaaaaaaaaaaaaaaaaaaaaaaaugcaucccccccccccccccccccccccccccccccaaaggcucuuuucagagccaccagaauu

SEQ ID NO: 8161 - RNA, 1896 nt, Artificial Sequence
  mRNA product Design f-5 comprising derived and/or modified sequence from HRSV(A2)__F-del_DSCav1_mut8 (opt3)
gggagacuuucccauucuguagcagaauuugguguugccuguggucuuggucccgcggagaagcuuaccauggagcugcucauccuuaaggccaacgcuauuaccacaauacugacugcagugacguucugcuuugccagcggccagaauaucaccgaagaguucuaccaauccacauguucugcggucucaaaaggguauuugggagcuuuaagaacugguugguacaccaguguuauuacaaucgaacugagcaacauuaaggagaucaaaugcaauggcaccgacgccaaggugaaacuaauaaagcaggaacucgauaaguauaaaaacgcaguaacugaccugcagcuucugaugcaguccacacccgccaccgggucuggaucggcuaucgcaucaggcguggccgucuguaagguguugcaccucgagggugagguuaauaaaauuaagagcgcucugcugaguacgaacaaagccguggucucccucucugggugcggagugagcguauuaacuuuuaagguucuggaucuuaagaauuacaucgacaaacaauugcugccuauucuaaacaagcaguccuguucaaucccaaauauagaaaccgugauugaguuccagcagaaaaacaauaggcuccuggaaaucacacgggaguuuagugucaacgcgggcgugacuaccccggugagcacauauaugcuuaccaauucugagcuguugucccucauuaacgauaugcccaucacgaaugaccaaaagaaacugaugucaaacaacguccagaucguucgccagcagagcuacaguauuaugugcauaaucaaggaagagguguuagcauauguagugcaacugccucucuacggcgucauugauacuccauguuggaaacuucauacaucuccccugugcaccacuaauacaaaggaaggguccaacaucuguuugacccgaacggaccguggaugguacugcgauaaugccgguagcgugucguucuuuccucaggcugagaccuguaagguucagucuaacagaguguucugcgacacaaugaacucccuaacucugccaucagaagucaaucucugcaauguggauauauuuaaccccaaauaugacuguaagauuaugaccaguaaaacagauguaagcuccucuguuaucacuagccugggcgccaucgugucaugcuacgggaagaccaaauguacagcaaguaauaagugcaggggaauuaucaagaccuucuccaacggcugugacuaugucagcaauaaagguguggacacugucucuguggggaacacgcuuuacuauguuaauaagcaagagggacagucacuguacgugaaaggcgagccuauuauaaacuuuuaugauccauugguauucccgagugacgaauuugaugcuagcaucucccaggucaaugagaagauuaaccagucucucgccuucauccggaaaucggacgaacuguuacacaacgugaaugcgggcaagagcacaaccaacaucaugauuacuaccauaaucauuguuaucauugugauccugcuaucccucauagccgucgggcugcuuuuguacugcaaggcacgcugaggacuaguacuggcugcaucucccuuuccucuguccuccauccuucucccaggauggugaagggggaccugguacccagugauccccaccccaggauccuaaaucaugacuuaccugcuaauaaaaacucauuggaaaagugagaagaucuaaaaaaaaaaaaaaaaaaaaaaaaaaaaaaaaaaaaaaaaaaaaaaaaaaaaaaaaaaaaaaaaugcaucccccccccccccccccccccccccccccccaaaggcucuuuucagagccaccagaauu

SEQ ID NO: 8162 - RNA, 1896 nt, Artificial Sequence
  mRNA product Design f-5 comprising derived and/or modified sequence from HRSV(A2)__F-del_DSCav1_mut8 (opt4)
gggagacuuucccauucuguagcagaauuugguguugccuguggucuuggucccgcggagaagcuuaccauggagcugcugauccugaaggccaacgccaucaccaccauccugaccgccgugaccuucugcuucgccagcggccagaacaucaccgaggaguucuaccagagcaccugcagcgccgugagcaagggcuaccugggcgcccugagaaccggcugguacaccagcgugaucaccaucgagcugagcaacaucaaggagaucaagugcaacggcaccgacgccaaggugaagcugaucaagcaggagcuggacaaguacaagaacgccgugaccgaccugcagcugcugaugcagagcacccccgccaccggcagcggcagcgccaucgccagcggcguggccgugugcaaggugcugcaccuggagggcgaggugaacaagaucaagagcgcccugcugagcaccaacaaggccguggugagccugagcggcugcggcgugagcgugcugaccuucaaggugcuggaccugaagaacuacaucgacaagcagcugcugcccauccugaacaagcagagcugcagcauccccaacaucgagaccgugaucgaguuccagcagaagaacaacagacugcuggagaucaccagagaguucagcgugaacgccggcgugaccacccccgugagcaccuacaugcugaccaacagcgagcugcugagccugaucaacgacaugcccaucaccaacgaccagaagaagcugaugagcaacaacgugcagaucgugagacagcagagcuacagcaucaugugcaucaucaaggaggaggugcuggccuacguggugcagcugccccuguacggcgugaucgacacccccugcuggaagcugcacaccagcccccugugcaccaccaacaccaaggagggcagcaacaucugccugaccagaaccgacagaggcugguacugcgacaacgccggcagcgugagcuucuucccccaggccgagaccugcaaggugcagagcaacagaguguucugcgacaccaugaacagccugacccugcccagcgaggugaaccugugcaacguggacaucuucaaccccaaguacgacugcaagaucaugaccagcaagaccgacgugagcagcagcgugaucaccagccugggcgccaucgugagcugcuacggcaagaccaagugcaccgccagcaacaagugcagaggcaucaucaagaccuucagcaacggcugcgacuacgugagcaacaagggcguggacaccgugagcgugggcaacacccuguacuacgugaacaagcaggagggccagagccuguacgugaagggcgagcccaucaucaacuucuacgacccccugguguuccccagcgacgaguucgacgccagcaucagccaggugaacgagaagaucaaccagagccuggccuucaucagaaagagcgacgagcugcugcacaacgugaacgccggcaagagcaccaccaacaucaugaucaccaccaucaucaucgugaucaucgugauccugcugagccugaucgccgugggccugcugcuguacugcaaggccagaugaggacuaguacuggcugcaucucccuuuccucuguccuccauccuucucccaggauggugaagggggaccugguacccagugauccccaccccaggauccuaaaucaugacuuaccugcuaauaaaaacucauuggaaaagugagaagaucuaaaaaaaaaaaaaaaaaaaaaaaaaaaaaaaaaaaaaaaaaaaaaaaaaaaaaaaaaaaaaaaaugcaucccccccccccccccccccccccccccccccaaaggcucuuuucagagccaccagaauu

SEQ ID NO: 8163 - RNA, 1896 nt, Artificial Sequence
  mRNA product Design f-5 comprising derived and/or modified sequence from HRSV(A2)__F-del_DSCav1_mut8 (opt5)
gggagacuuucccauucuguagcagaauuugguguugccuguggucuuggucccgcggagaagcuuaccauggagcugcucauccugaaggccaacgcuauuaccacaauccuuacggccgugaccuucugcuuugcgagcggccagaauauuacagaagaguucuaccaauccaccuguucugcugucagcaaaggguaucugggagcccucagaacaggcugguacaccuccguuaucacaauugaacugucuaacaucaaggagaucaaaugcaaugggaccgacgccaaggugaaacuuauuaagcaggaacuggauaaguauaaaaacgcugugacggaccuccagcugcugaugcagagcacccccgccacaggauccggcucugcuaucgccagcggggucgcgguguguaagguucuccaccuggagggagaggugaauaaaauuaaguccgcccuucugagcaccaacaaagcugucgugucucucuccggcugcggcguuagcgugcugacauuuaagguccuugaucugaagaauuacaucgacaaacaacuccugccuauucugaacaagcagucuuguuccaucccgaauauugaaaccgugaucgaguuccagcagaaaaacaaucggcuccuggaaaucacgcgcgaguuuagcgugaacgccggggucacaacccccguuucuacauauaugcuuaccaauuccgagcugcucagccugauuaacgauaugccuaucaccaaugaccaaaagaaacuuauguccaacaacgugcagauugugagacagcagucuuacagcaucaugugcauuaucaaggaagagguccuggcuuaugugguucaacucccccuguacggagugaucgauacaccuuguuggaaacugcauacgagcccccucugcaccacaaauaccaaggaaggcagcaacauuugucugacacggaccgaccgcgggugguacugcgauaaugccggaucugucuccuucuuuccucaggcggagacguguaaggugcagagcaacagaguuuucugcgacacaaugaacucucuuacccugccgagcgaagugaaucucugcaaugucgauaucuuuaaccccaaauaugacuguaagauuaugaccuccaaaacagaugugucuagcuccgucaucaccagccugggcgccauugugucuugcuacgggaagacaaaauguacggcuuccaauaagugccggggaaucaucaagaccuucagcaacggcugugacuauguuucuaauaaaggcguggacacagucuccguggggaacacccuuuacuauguuaauaagcaagagggacagagccuguacgugaaaggcgagccuauuaucaacuuuuaugauccccucgucuucccuuccgacgaauuugaugccucuauuagccaggugaaugagaagaucaaccagucccuggcuuucauucgcaaaucugacgaacugcuccacaacgugaaugccgggaaguccacaaccaacaucaugauuacgaccaucaucauuguuaucauugucauccugcuuucccugauugccgugggacuccugcuguacugcaaggcuagaugaggacuaguacuggcugcaucucccuuuccucuguccuccauccuucucccaggauggugaagggggaccugguacccagugauccccaccccaggauccuaaaucaugacuuaccugcuaauaaaaacucauuggaaaagugagaagaucuaaaaaaaaaaaaaaaaaaaaaaaaaaaaaaaaaaaaaaaaaaaaaaaaaaaaaaaaaaaaaaaaugcaucccccccccccccccccccccccccccccccaaaggcucuuuucagagccaccagaauu

SEQ ID NO: 8164 - RNA, 1896 nt, Artificial Sequence
  mRNA product Design f-5 comprising derived and/or modified sequence from HRSV(A2)__F-del_DSCav1_mut8 (opt6)
gggagacuuucccauucuguagcagaauuugguguugccuguggucuuggucccgcggagaagcuuaccauggaacuacucauauugaaagccaacgcaaucacaacaauacuaaccgccguaacauuuugcuucgcgucaggccaaaauauaacagaagaauuuuaccaaucaacaugcuccgccguaucaaaaggauaccuaggugcauuacgaaccgguugguacacaucaguaaucacaauagaacuuuccaacauuaaagaaauaaaaugcaauggcacagacgcaaaagucaaacuaauaaaacaagaacuagacaaauauaaaaacgccgucacagacuuacaacuauuaaugcaaagcacaccagcaacaggauccggaucagcaauagcaucaggaguagccgucuguaaaguacuacaccuagaaggcgaaguuaauaaaauuaaaucagcuuuauuaucaaccaacaaagcaguaguaucacuauccggaugcggagucuccguccuaacauucaaaguacuagaccucaagaauuacauagauaaacaacuacuaccaauacucaacaaacaaucauguucaauaccaaacaucgaaaccgucauagaauuucaacaaaaaaauaauagacucuuagaaauaacacgagaauuuagcguaaacgcaggagucacaaccccugucucaacauacaugcuaaccaauuccgaauuauuaucacucauaaaugacaugccaauaacuaaugaccaaaaaaaacuuaugucaaacaacguacaaauaguaagacaacaaucauauucaauaaugugcauaaucaaagaagaaguuuuagcauauguaguacaacuaccacuauauggcgucauagacacaccaugcuggaaauuacacacaucaccucuaugcacaacaaacacaaaagaaggaagcaacauuugccuaaccagaaccgauagaggaugguacugcgauaacgcaggcucaguaucauucuucccucaagccgaaacuugcaaaguccaaucaaauagagucuucugcgauacaaugaacuccuuaacuuuaccaucagaaguaaaucuaugcaacguagauaucuuuaauccaaaauacgauugcaaaaucaugacaucaaaaacagauguaucaucuaguguaauuaccucccuaggagcaauaguaagcugcuacggaaaaacaaaaugcaccgccucuaacaaaugucguggaauaauaaaaacauucucaaacggaugcgauuauguaucaaauaaaggugucgacaccguaucaguaggcaauacacuauacuauguaaauaaacaagaaggacaaucacucuacgucaaaggugaaccaauaauaaacuucuacgacccacuuguauucccaagcgacgaauuugacgcaucaauaagccaaguaaacgaaaaaauaaaccaaucacuagcauucaucagaaaaucagacgaacuacuccacaauguaaaugcaggaaaaucaacaaccaauaucaugauaacaaccauaauaauagucauaauaguaauacuauuaucccucauagccguuggacuacuccuauauuguaaagcacgauaaggacuaguacuggcugcaucucccuuuccucuguccuccauccuucucccaggauggugaagggggaccugguacccagugauccccaccccaggauccuaaaucaugacuuaccugcuaauaaaaacucauuggaaaagugagaagaucuaaaaaaaaaaaaaaaaaaaaaaaaaaaaaaaaaaaaaaaaaaaaaaaaaaaaaaaaaaaaaaaaugcaucccccccccccccccccccccccccccccccaaaggcucuuuucagagccaccagaauu

SEQ ID NO: 8165 - RNA, 1896 nt, Artificial Sequence
  mRNA product Design f-5 comprising derived and/or modified sequence from HRSV(A2)__F-del_DSCav1_mut8 (opt11)
gggagacuuucccauucuguagcagaauuugguguugccuguggucuuggucccgcggagaagcuuaccauggaacuccucauccucaaagccaacgccaucaccaccauacucaccgcaguaaccuucugcuucgcauccggccaaaacaucacagaagaguucuaccagaguaccugcuccgccgucuccaaaggcuaccuuggcgcccuccguaccgggugguacacauccgucaucacaaucgaacucuccaacaucaaagaaauaaagugcaacggcacagacgccaaaguaaaacugauaaagcaagaacucgacaaauacaaaaacgccguaaccgaccuccagcuacuaaugcaauccacucccgccaccggcagcggauccgccaucgccuccggaguagccgucuguaaagucuuacaccucgaaggcgaagugaacaaaaucaaauccgcccuacucucaaccaacaaagccguaguaucacucuccgggugcggcguuucagugcuaacguucaaaguccuugaccucaaaaacuacaucgacaaacaacuccuccccauccuaaauaaacaauccugcuccauacccaacaucgagacugucaucgaguuccagcagaaaaacaaccgacuccucgaaaucacacgcgaguucucugucaacgccggcgucacaacccccgucuccacauacaugcucaccaacagcgaacuccucucccuaaucaaugacaugcccaucaccaacgaccaaaagaaacucaugucaaacaacguccaaaucguccgccaacaauccuacagcaucaugugcaucaucaaagaagaaguucucgcauacguaguacaacucccccucuacggagugaucgacacccccugcuggaaacuacacaccagcccgcuuugcaccacaaacaccaaggaaggcuccaacaucugccucacucgaaccgaccgcggcugguacugcgacaacgcaggcuccgucaguuucuuuccccaagcagaaacaugcaaaguccaauccaaccgaguauucugcgacaccaugaacucccucacccuaccauccgaaguuaaccuaugcaacguggacaucuucaaccccaaguacgacugcaaaauuaugaccuccaaaaccgacguauccuccagcgucaucaccagccucggagcaauagucuccugcuacggcaagaccaagugcaccgcuuccaacaagugucgcggaaucaucaaaaccuucucaaacggcugcgacuacgucuccaacaaaggcgucgacaccguauccguaggaaacacccuauacuacgucaacaaacaagaaggacaaucccucuaugucaaaggcgaacccaucaucaauuucuacgacccccuagucuucccuuccgacgaguucgacgcguccaucagccaagucaaugaaaagaucaaccagagccuggcauucauccgcaaauccgacgaacuccuccacaacgucaacgcgggaaaauccacgacaaacaucaugaucaccaccaucaucaucgucaucauagucauucuccuuucucucaucgccgugggacuacuucucuacugcaaagcccgauaaggacuaguacuggcugcaucucccuuuccucuguccuccauccuucucccaggauggugaagggggaccugguacccagugauccccaccccaggauccuaaaucaugacuuaccugcuaauaaaaacucauuggaaaagugagaagaucuaaaaaaaaaaaaaaaaaaaaaaaaaaaaaaaaaaaaaaaaaaaaaaaaaaaaaaaaaaaaaaaaugcaucccccccccccccccccccccccccccccccaaaggcucuuuucagagccaccagaauu

SEQ ID NO: 8166 - RNA, 1892 nt, Artificial Sequence
  mRNA product Design g-1 comprising derived and/or modified sequence from HRSV(A2)__F-del_DSCav1_mut8 (opt1)
gggagacuuucccauucuguagcagaauuugguguugccuguggucuuggucccgcggagaagcuuaccauggagcugcucauccugaaggccaacgccaucaccaccauccugacggcggugaccuucugcuucgccagcggccagaacaucaccgaggaguucuaccaguccacgugcagcgccgucuccaagggguaccucggcgcccugcggaccggcugguacaccuccgugaucaccaucgagcugagcaacaucaaggagaucaagugcaacgggaccgacgccaaggugaagcucaucaagcaggagcuggacaaguacaagaacgcggucacggaccugcagcuccugaugcaguccaccccggcaaccggcuccggcuccgccaucgcgagcggcgucgccgugugcaaggugcugcaccucgagggggaggucaacaagaucaagagcgcccugcuguccaccaacaaggccguggugagccucuccggcugcggcgucagcgugcugaccuucaaggugcuggaccucaagaacuacaucgacaagcagcugcugcccauccugaacaagcagagcugcuccauccccaacaucgagacggugaucgaguuccagcagaagaacaaccggcuccuggagaucacccgcgaguucagcgugaacgccggggucaccacccccguguccacguacaugcugaccaacagcgagcuccugucccugaucaacgacaugccgaucaccaacgaccagaagaagcucaugagcaacaacgugcagaucguccggcagcaguccuacagcaucaugugcaucaucaaggaggaggugcuggcguacgugguccagcugccccucuacggcgugaucgacacccccugcuggaagcugcacacgagcccccugugcaccaccaacaccaaggagggguccaacaucugccucacgcgcaccgaccggggcugguacugcgacaacgccggcagcgucuccuucuucccgcaggccgagaccugcaaggugcagagcaaccgcguguucugcgacaccaugaacucccugacgcugcccagcgagguaaaccucugcaacgucgacaucuucaaccccaaguacgacugcaagaucaugaccuccaagaccgacgugagcuccagcgugaucaccucccugggggccaucgucagcugcuacggcaagacgaagugcaccgccagcaacaagugccgggggaucaucaagaccuucuccaacggcugcgacuacgugagcaacaagggcguggacaccguguccgucgggaacacccuguacuacgugaacaagcaggagggccagagccucuacgugaagggggagcccaucaucaacuucuacgacccgcuggucuuccccuccgacgaguucgacgcgagcaucucccaggugaacgagaagaucaaccagagccuggccuucauccgcaaguccgacgagcugcuccacaacgugaacgccggcaagagcacgaccaacaucaugaucaccaccaucaucaucgucaucaucgugauccugcugucccucaucgccguggggcugcugcucuacugcaaggcccggugaggacuaguggaagcauuuuccuggcugauuaaaagaaauuacucagcuauggucaucuguuccuguuagaaggcuaugcagcauauuauauacuaugcgcauguuaugaaaugcauaauaaaaaauuuuaaaaaaucuaaaagaucuaaaaaaaaaaaaaaaaaaaaaaaaaaaaaaaaaaaaaaaaaaaaaaaaaaaaaaaaaaaaaaaaugcaucccccccccccccccccccccccccccccccaaaggcucuuuucagagccaccagaauu

SEQ ID NO: 8167 - RNA, 1892 nt, Artificial Sequence
  mRNA product Design g-1 comprising derived and/or modified sequence from HRSV(A2)__F-del_DSCav1_mut8 (opt1)
gggagacuuucccauucuguagcagaauuugguguugccuguggucuuggucccgcggagaagcuuaccauggagcugcucauccugaaggccaacgccaucaccaccauccugacggcggugaccuucugcuucgccagcggccagaacaucaccgaggaguucuaccaguccacgugcagcgccgucuccaagggguaccucggcgcccugcgcaccgggugguacaccagcgugaucaccaucgagcuguccaacaucaaggagaucaagugcaacggcaccgacgccaaggugaagcucaucaagcaggagcuggacaaguacaagaacgcggucacggaccugcagcuccugaugcagagcacccccgccaccggguccggcagcgccaucgccuccggcguggcggugugcaagguccugcaccucgagggggaggugaacaagaucaagagcgcccugcuguccaccaacaaggccguggucagccucuccggcugcggggugagcgugcugacguucaagguccuggaccucaagaacuacaucgacaagcagcugcugccgauccucaacaagcaguccugcagcauccccaacaucgagaccgugaucgaguuccagcagaagaacaaccggcugcuggagaucacccgcgaguucuccgugaacgccggcgucaccacgcccgugagcaccuacaugcucaccaacuccgagcugcugagccucaucaacgacaugcccaucaccaacgaccagaagaagcugaugagcaacaacgugcagaucguccggcagcaguccuacagcaucaugugcaucaucaaggaggaggugcuggccuacgugguccagcucccgcuguacggggugaucgacacgcccugcuggaagcugcacaccagcccccucugcaccaccaacacgaaggagggcuccaacaucugccugacccgcaccgaccggggcugguacugcgacaacgcgggguccgugagcuucuucccccaggccgagaccugcaagguccaguccaaccgcguguucugcgacacgaugaacagccugacccucccguccgaggucaaccugugcaacguggacaucuucaaccccaaguacgacugcaagaucaugaccagcaagaccgacguguccagcuccgucaucacgagccugggcgccaucguguccugcuacgggaagaccaagugcaccgccagcaacaagugccggggcaucaucaagaccuucuccaacggcugcgacuacgugagcaacaagggggucgacacgguguccgugggcaacacccucuacuacgucaacaagcaggaggggcagagccuguacgugaagggcgagcccaucaucaacuucuacgacccccugguguucccgagcgacgaguucgacgccuccaucagccaggucaacgagaagaucaaccagucccucgcguucauccgcaagagcgacgagcugcugcacaacgugaacgccgggaaguccaccaccaacaucaugaucaccacgaucaucaucgugaucaucgucauccuccugagccugaucgccgugggccuccugcuguacugcaaggcccggugaggacuaguggaagcauuuuccuggcugauuaaaagaaauuacucagcuauggucaucuguuccuguuagaaggcuaugcagcauauuauauacuaugcgcauguuaugaaaugcauaauaaaaaauuuuaaaaaaucuaaaagaucuaaaaaaaaaaaaaaaaaaaaaaaaaaaaaaaaaaaaaaaaaaaaaaaaaaaaaaaaaaaaaaaaugcaucccccccccccccccccccccccccccccccaaaggcucuuuucagagccaccagaauu

SEQ ID NO: 8168 - RNA, 1892 nt, Artificial Sequence
  mRNA product Design g-1 comprising derived and/or modified sequence from HRSV(A2)__F-del_DSCav1_mut8 (opt2)
gggagacuuucccauucuguagcagaauuugguguugccuguggucuuggucccgcggagaagcuuaccauggagcuccucauccucaaggccaacgccaucaccaccauccucaccgccgucaccuucugcuucgccuccggccagaacaucaccgaggaguucuaccaguccaccugcuccgccgucuccaagggcuaccucggcgcccuccgcaccggcugguacaccuccgucaucaccaucgagcucuccaacaucaaggagaucaagugcaacggcaccgacgccaaggucaagcucaucaagcaggagcucgacaaguacaagaacgccgucaccgaccuccagcuccucaugcaguccacccccgccaccggcuccggcuccgccaucgccuccggcgucgccgucugcaagguccuccaccucgagggcgaggucaacaagaucaaguccgcccuccucuccaccaacaaggccgucgucucccucuccggcugcggcgucuccguccucaccuucaagguccucgaccucaagaacuacaucgacaagcagcuccuccccauccucaacaagcaguccugcuccauccccaacaucgagaccgucaucgaguuccagcagaagaacaaccgccuccucgagaucacccgcgaguucuccgucaacgccggcgucaccacccccgucuccaccuacaugcucaccaacuccgagcuccucucccucaucaacgacaugcccaucaccaacgaccagaagaagcucauguccaacaacguccagaucguccgccagcaguccuacuccaucaugugcaucaucaaggaggagguccucgccuacgucguccagcucccccucuacggcgucaucgacacccccugcuggaagcuccacaccuccccccucugcaccaccaacaccaaggagggcuccaacaucugccucacccgcaccgaccgcggcugguacugcgacaacgccggcuccgucuccuucuucccccaggccgagaccugcaagguccaguccaaccgcgucuucugcgacaccaugaacucccucacccuccccuccgaggucaaccucugcaacgucgacaucuucaaccccaaguacgacugcaagaucaugaccuccaagaccgacgucuccuccuccgucaucaccucccucggcgccaucgucuccugcuacggcaagaccaagugcaccgccuccaacaagugccgcggcaucaucaagaccuucuccaacggcugcgacuacgucuccaacaagggcgucgacaccgucuccgucggcaacacccucuacuacgucaacaagcaggagggccagucccucuacgucaagggcgagcccaucaucaacuucuacgacccccucgucuuccccuccgacgaguucgacgccuccaucucccaggucaacgagaagaucaaccagucccucgccuucauccgcaaguccgacgagcuccuccacaacgucaacgccggcaaguccaccaccaacaucaugaucaccaccaucaucaucgucaucaucgucauccuccucucccucaucgccgucggccuccuccucuacugcaaggcccgcugaggacuaguggaagcauuuuccuggcugauuaaaagaaauuacucagcuauggucaucuguuccuguuagaaggcuaugcagcauauuauauacuaugcgcauguuaugaaaugcauaauaaaaaauuuuaaaaaaucuaaaagaucuaaaaaaaaaaaaaaaaaaaaaaaaaaaaaaaaaaaaaaaaaaaaaaaaaaaaaaaaaaaaaaaaugcaucccccccccccccccccccccccccccccccaaaggcucuuuucagagccaccagaauu

SEQ ID NO: 8169 - RNA, 1892 nt, Artificial Sequence
  mRNA product Design g-1 comprising derived and/or modified sequence from HRSV(A2)__F-del_DSCav1_mut8 (opt3)
gggagacuuucccauucuguagcagaauuugguguugccuguggucuuggucccgcggagaagcuuaccauggagcugcucauccuuaaggccaacgcuauuaccacaauacugacugcagugacguucugcuuugccagcggccagaauaucaccgaagaguucuaccaauccacauguucugcggucucaaaaggguauuugggagcuuuaagaacugguugguacaccaguguuauuacaaucgaacugagcaacauuaaggagaucaaaugcaauggcaccgacgccaaggugaaacuaauaaagcaggaacucgauaaguauaaaaacgcaguaacugaccugcagcuucugaugcaguccacacccgccaccgggucuggaucggcuaucgcaucaggcguggccgucuguaagguguugcaccucgagggugagguuaauaaaauuaagagcgcucugcugaguacgaacaaagccguggucucccucucugggugcggagugagcguauuaacuuuuaagguucuggaucuuaagaauuacaucgacaaacaauugcugccuauucuaaacaagcaguccuguucaaucccaaauauagaaaccgugauugaguuccagcagaaaaacaauaggcuccuggaaaucacacgggaguuuagugucaacgcgggcgugacuaccccggugagcacauauaugcuuaccaauucugagcuguugucccucauuaacgauaugcccaucacgaaugaccaaaagaaacugaugucaaacaacguccagaucguucgccagcagagcuacaguauuaugugcauaaucaaggaagagguguuagcauauguagugcaacugccucucuacggcgucauugauacuccauguuggaaacuucauacaucuccccugugcaccacuaauacaaaggaaggguccaacaucuguuugacccgaacggaccguggaugguacugcgauaaugccgguagcgugucguucuuuccucaggcugagaccuguaagguucagucuaacagaguguucugcgacacaaugaacucccuaacucugccaucagaagucaaucucugcaauguggauauauuuaaccccaaauaugacuguaagauuaugaccaguaaaacagauguaagcuccucuguuaucacuagccugggcgccaucgugucaugcuacgggaagaccaaauguacagcaaguaauaagugcaggggaauuaucaagaccuucuccaacggcugugacuaugucagcaauaaagguguggacacugucucuguggggaacacgcuuuacuauguuaauaagcaagagggacagucacuguacgugaaaggcgagccuauuauaaacuuuuaugauccauugguauucccgagugacgaauuugaugcuagcaucucccaggucaaugagaagauuaaccagucucucgccuucauccggaaaucggacgaacuguuacacaacgugaaugcgggcaagagcacaaccaacaucaugauuacuaccauaaucauuguuaucauugugauccugcuaucccucauagccgucgggcugcuuuuguacugcaaggcacgcugaggacuaguggaagcauuuuccuggcugauuaaaagaaauuacucagcuauggucaucuguuccuguuagaaggcuaugcagcauauuauauacuaugcgcauguuaugaaaugcauaauaaaaaauuuuaaaaaaucuaaaagaucuaaaaaaaaaaaaaaaaaaaaaaaaaaaaaaaaaaaaaaaaaaaaaaaaaaaaaaaaaaaaaaaaugcaucccccccccccccccccccccccccccccccaaaggcucuuuucagagccaccagaauu

SEQ ID NO: 8170 - RNA, 1892 nt, Artificial Sequence
  mRNA product Design g-1 comprising derived and/or modified sequence from HRSV(A2)__F-del_DSCav1_mut8 (opt4)
gggagacuuucccauucuguagcagaauuugguguugccuguggucuuggucccgcggagaagcuuaccauggagcugcugauccugaaggccaacgccaucaccaccauccugaccgccgugaccuucugcuucgccagcggccagaacaucaccgaggaguucuaccagagcaccugcagcgccgugagcaagggcuaccugggcgcccugagaaccggcugguacaccagcgugaucaccaucgagcugagcaacaucaaggagaucaagugcaacggcaccgacgccaaggugaagcugaucaagcaggagcuggacaaguacaagaacgccgugaccgaccugcagcugcugaugcagagcacccccgccaccggcagcggcagcgccaucgccagcggcguggccgugugcaaggugcugcaccuggagggcgaggugaacaagaucaagagcgcccugcugagcaccaacaaggccguggugagccugagcggcugcggcgugagcgugcugaccuucaaggugcuggaccugaagaacuacaucgacaagcagcugcugcccauccugaacaagcagagcugcagcauccccaacaucgagaccgugaucgaguuccagcagaagaacaacagacugcuggagaucaccagagaguucagcgugaacgccggcgugaccacccccgugagcaccuacaugcugaccaacagcgagcugcugagccugaucaacgacaugcccaucaccaacgaccagaagaagcugaugagcaacaacgugcagaucgugagacagcagagcuacagcaucaugugcaucaucaaggaggaggugcuggccuacguggugcagcugccccuguacggcgugaucgacacccccugcuggaagcugcacaccagcccccugugcaccaccaacaccaaggagggcagcaacaucugccugaccagaaccgacagaggcugguacugcgacaacgccggcagcgugagcuucuucccccaggccgagaccugcaaggugcagagcaacagaguguucugcgacaccaugaacagccugacccugcccagcgaggugaaccugugcaacguggacaucuucaaccccaaguacgacugcaagaucaugaccagcaagaccgacgugagcagcagcgugaucaccagccugggcgccaucgugagcugcuacggcaagaccaagugcaccgccagcaacaagugcagaggcaucaucaagaccuucagcaacggcugcgacuacgugagcaacaagggcguggacaccgugagcgugggcaacacccuguacuacgugaacaagcaggagggccagagccuguacgugaagggcgagcccaucaucaacuucuacgacccccugguguuccccagcgacgaguucgacgccagcaucagccaggugaacgagaagaucaaccagagccuggccuucaucagaaagagcgacgagcugcugcacaacgugaacgccggcaagagcaccaccaacaucaugaucaccaccaucaucaucgugaucaucgugauccugcugagccugaucgccgugggccugcugcuguacugcaaggccagaugaggacuaguggaagcauuuuccuggcugauuaaaagaaauuacucagcuauggucaucuguuccuguuagaaggcuaugcagcauauuauauacuaugcgcauguuaugaaaugcauaauaaaaaauuuuaaaaaaucuaaaagaucuaaaaaaaaaaaaaaaaaaaaaaaaaaaaaaaaaaaaaaaaaaaaaaaaaaaaaaaaaaaaaaaaugcaucccccccccccccccccccccccccccccccaaaggcucuuuucagagccaccagaauu

SEQ ID NO: 8171 - RNA, 1892 nt, Artificial Sequence
  mRNA product Design g-1 comprising derived and/or modified sequence from HRSV(A2)__F-del_DSCav1_mut8 (opt5)
gggagacuuucccauucuguagcagaauuugguguugccuguggucuuggucccgcggagaagcuuaccauggagcugcucauccugaaggccaacgcuauuaccacaauccuuacggccgugaccuucugcuuugcgagcggccagaauauuacagaagaguucuaccaauccaccuguucugcugucagcaaaggguaucugggagcccucagaacaggcugguacaccuccguuaucacaauugaacugucuaacaucaaggagaucaaaugcaaugggaccgacgccaaggugaaacuuauuaagcaggaacuggauaaguauaaaaacgcugugacggaccuccagcugcugaugcagagcacccccgccacaggauccggcucugcuaucgccagcggggucgcgguguguaagguucuccaccuggagggagaggugaauaaaauuaaguccgcccuucugagcaccaacaaagcugucgugucucucuccggcugcggcguuagcgugcugacauuuaagguccuugaucugaagaauuacaucgacaaacaacuccugccuauucugaacaagcagucuuguuccaucccgaauauugaaaccgugaucgaguuccagcagaaaaacaaucggcuccuggaaaucacgcgcgaguuuagcgugaacgccggggucacaacccccguuucuacauauaugcuuaccaauuccgagcugcucagccugauuaacgauaugccuaucaccaaugaccaaaagaaacuuauguccaacaacgugcagauugugagacagcagucuuacagcaucaugugcauuaucaaggaagagguccuggcuuaugugguucaacucccccuguacggagugaucgauacaccuuguuggaaacugcauacgagcccccucugcaccacaaauaccaaggaaggcagcaacauuugucugacacggaccgaccgcgggugguacugcgauaaugccggaucugucuccuucuuuccucaggcggagacguguaaggugcagagcaacagaguuuucugcgacacaaugaacucucuuacccugccgagcgaagugaaucucugcaaugucgauaucuuuaaccccaaauaugacuguaagauuaugaccuccaaaacagaugugucuagcuccgucaucaccagccugggcgccauugugucuugcuacgggaagacaaaauguacggcuuccaauaagugccggggaaucaucaagaccuucagcaacggcugugacuauguuucuaauaaaggcguggacacagucuccguggggaacacccuuuacuauguuaauaagcaagagggacagagccuguacgugaaaggcgagccuauuaucaacuuuuaugauccccucgucuucccuuccgacgaauuugaugccucuauuagccaggugaaugagaagaucaaccagucccuggcuuucauucgcaaaucugacgaacugcuccacaacgugaaugccgggaaguccacaaccaacaucaugauuacgaccaucaucauuguuaucauugucauccugcuuucccugauugccgugggacuccugcuguacugcaaggcuagaugaggacuaguggaagcauuuuccuggcugauuaaaagaaauuacucagcuauggucaucuguuccuguuagaaggcuaugcagcauauuauauacuaugcgcauguuaugaaaugcauaauaaaaaauuuuaaaaaaucuaaaagaucuaaaaaaaaaaaaaaaaaaaaaaaaaaaaaaaaaaaaaaaaaaaaaaaaaaaaaaaaaaaaaaaaugcaucccccccccccccccccccccccccccccccaaaggcucuuuucagagccaccagaauu

SEQ ID NO: 8172 - RNA, 1892 nt, Artificial Sequence
  mRNA product Design g-1 comprising derived and/or modified sequence from HRSV(A2)__F-del_DSCav1_mut8 (opt6)
gggagacuuucccauucuguagcagaauuugguguugccuguggucuuggucccgcggagaagcuuaccauggaacuacucauauugaaagccaacgcaaucacaacaauacuaaccgccguaacauuuugcuucgcgucaggccaaaauauaacagaagaauuuuaccaaucaacaugcuccgccguaucaaaaggauaccuaggugcauuacgaaccgguugguacacaucaguaaucacaauagaacuuuccaacauuaaagaaauaaaaugcaauggcacagacgcaaaagucaaacuaauaaaacaagaacuagacaaauauaaaaacgccgucacagacuuacaacuauuaaugcaaagcacaccagcaacaggauccggaucagcaauagcaucaggaguagccgucuguaaaguacuacaccuagaaggcgaaguuaauaaaauuaaaucagcuuuauuaucaaccaacaaagcaguaguaucacuauccggaugcggagucuccguccuaacauucaaaguacuagaccucaagaauuacauagauaaacaacuacuaccaauacucaacaaacaaucauguucaauaccaaacaucgaaaccgucauagaauuucaacaaaaaaauaauagacucuuagaaauaacacgagaauuuagcguaaacgcaggagucacaaccccugucucaacauacaugcuaaccaauuccgaauuauuaucacucauaaaugacaugccaauaacuaaugaccaaaaaaaacuuaugucaaacaacguacaaauaguaagacaacaaucauauucaauaaugugcauaaucaaagaagaaguuuuagcauauguaguacaacuaccacuauauggcgucauagacacaccaugcuggaaauuacacacaucaccucuaugcacaacaaacacaaaagaaggaagcaacauuugccuaaccagaaccgauagaggaugguacugcgauaacgcaggcucaguaucauucuucccucaagccgaaacuugcaaaguccaaucaaauagagucuucugcgauacaaugaacuccuuaacuuuaccaucagaaguaaaucuaugcaacguagauaucuuuaauccaaaauacgauugcaaaaucaugacaucaaaaacagauguaucaucuaguguaauuaccucccuaggagcaauaguaagcugcuacggaaaaacaaaaugcaccgccucuaacaaaugucguggaauaauaaaaacauucucaaacggaugcgauuauguaucaaauaaaggugucgacaccguaucaguaggcaauacacuauacuauguaaauaaacaagaaggacaaucacucuacgucaaaggugaaccaauaauaaacuucuacgacccacuuguauucccaagcgacgaauuugacgcaucaauaagccaaguaaacgaaaaaauaaaccaaucacuagcauucaucagaaaaucagacgaacuacuccacaauguaaaugcaggaaaaucaacaaccaauaucaugauaacaaccauaauaauagucauaauaguaauacuauuaucccucauagccguuggacuacuccuauauuguaaagcacgauaaggacuaguggaagcauuuuccuggcugauuaaaagaaauuacucagcuauggucaucuguuccuguuagaaggcuaugcagcauauuauauacuaugcgcauguuaugaaaugcauaauaaaaaauuuuaaaaaaucuaaaagaucuaaaaaaaaaaaaaaaaaaaaaaaaaaaaaaaaaaaaaaaaaaaaaaaaaaaaaaaaaaaaaaaaugcaucccccccccccccccccccccccccccccccaaaggcucuuuucagagccaccagaauu

SEQ ID NO: 8173 - RNA, 1892 nt, Artificial Sequence
  mRNA product Design g-1 comprising derived and/or modified sequence from HRSV(A2)__F-del_DSCav1_mut8 (opt11)
gggagacuuucccauucuguagcagaauuugguguugccuguggucuuggucccgcggagaagcuuaccauggaacuccucauccucaaagccaacgccaucaccaccauacucaccgcaguaaccuucugcuucgcauccggccaaaacaucacagaagaguucuaccagaguaccugcuccgccgucuccaaaggcuaccuuggcgcccuccguaccgggugguacacauccgucaucacaaucgaacucuccaacaucaaagaaauaaagugcaacggcacagacgccaaaguaaaacugauaaagcaagaacucgacaaauacaaaaacgccguaaccgaccuccagcuacuaaugcaauccacucccgccaccggcagcggauccgccaucgccuccggaguagccgucuguaaagucuuacaccucgaaggcgaagugaacaaaaucaaauccgcccuacucucaaccaacaaagccguaguaucacucuccgggugcggcguuucagugcuaacguucaaaguccuugaccucaaaaacuacaucgacaaacaacuccuccccauccuaaauaaacaauccugcuccauacccaacaucgagacugucaucgaguuccagcagaaaaacaaccgacuccucgaaaucacacgcgaguucucugucaacgccggcgucacaacccccgucuccacauacaugcucaccaacagcgaacuccucucccuaaucaaugacaugcccaucaccaacgaccaaaagaaacucaugucaaacaacguccaaaucguccgccaacaauccuacagcaucaugugcaucaucaaagaagaaguucucgcauacguaguacaacucccccucuacggagugaucgacacccccugcuggaaacuacacaccagcccgcuuugcaccacaaacaccaaggaaggcuccaacaucugccucacucgaaccgaccgcggcugguacugcgacaacgcaggcuccgucaguuucuuuccccaagcagaaacaugcaaaguccaauccaaccgaguauucugcgacaccaugaacucccucacccuaccauccgaaguuaaccuaugcaacguggacaucuucaaccccaaguacgacugcaaaauuaugaccuccaaaaccgacguauccuccagcgucaucaccagccucggagcaauagucuccugcuacggcaagaccaagugcaccgcuuccaacaagugucgcggaaucaucaaaaccuucucaaacggcugcgacuacgucuccaacaaaggcgucgacaccguauccguaggaaacacccuauacuacgucaacaaacaagaaggacaaucccucuaugucaaaggcgaacccaucaucaauuucuacgacccccuagucuucccuuccgacgaguucgacgcguccaucagccaagucaaugaaaagaucaaccagagccuggcauucauccgcaaauccgacgaacuccuccacaacgucaacgcgggaaaauccacgacaaacaucaugaucaccaccaucaucaucgucaucauagucauucuccuuucucucaucgccgugggacuacuucucuacugcaaagcccgauaaggacuaguggaagcauuuuccuggcugauuaaaagaaauuacucagcuauggucaucuguuccuguuagaaggcuaugcagcauauuauauacuaugcgcauguuaugaaaugcauaauaaaaaauuuuaaaaaaucuaaaagaucuaaaaaaaaaaaaaaaaaaaaaaaaaaaaaaaaaaaaaaaaaaaaaaaaaaaaaaaaaaaaaaaaugcaucccccccccccccccccccccccccccccccaaaggcucuuuucagagccaccagaauu

SEQ ID NO: 8174 - RNA, 1907 nt, Artificial Sequence
  mRNA product Design g-2 comprising derived and/or modified sequence from HRSV(A2)__F-del_DSCav1_mut8 (opt1)
gggagaguccgcucagccagguugcagaagcggcuuagcguguguccuaaucuucucucugcguguagguaggccugugccgcaaacaagcuuaccauggagcugcucauccugaaggccaacgccaucaccaccauccugacggcggugaccuucugcuucgccagcggccagaacaucaccgaggaguucuaccaguccacgugcagcgccgucuccaagggguaccucggcgcccugcggaccggcugguacaccuccgugaucaccaucgagcugagcaacaucaaggagaucaagugcaacgggaccgacgccaaggugaagcucaucaagcaggagcuggacaaguacaagaacgcggucacggaccugcagcuccugaugcaguccaccccggcaaccggcuccggcuccgccaucgcgagcggcgucgccgugugcaaggugcugcaccucgagggggaggucaacaagaucaagagcgcccugcuguccaccaacaaggccguggugagccucuccggcugcggcgucagcgugcugaccuucaaggugcuggaccucaagaacuacaucgacaagcagcugcugcccauccugaacaagcagagcugcuccauccccaacaucgagacggugaucgaguuccagcagaagaacaaccggcuccuggagaucacccgcgaguucagcgugaacgccggggucaccacccccguguccacguacaugcugaccaacagcgagcuccugucccugaucaacgacaugccgaucaccaacgaccagaagaagcucaugagcaacaacgugcagaucguccggcagcaguccuacagcaucaugugcaucaucaaggaggaggugcuggcguacgugguccagcugccccucuacggcgugaucgacacccccugcuggaagcugcacacgagcccccugugcaccaccaacaccaaggagggguccaacaucugccucacgcgcaccgaccggggcugguacugcgacaacgccggcagcgucuccuucuucccgcaggccgagaccugcaaggugcagagcaaccgcguguucugcgacaccaugaacucccugacgcugcccagcgagguaaaccucugcaacgucgacaucuucaaccccaaguacgacugcaagaucaugaccuccaagaccgacgugagcuccagcgugaucaccucccugggggccaucgucagcugcuacggcaagacgaagugcaccgccagcaacaagugccgggggaucaucaagaccuucuccaacggcugcgacuacgugagcaacaagggcguggacaccguguccgucgggaacacccuguacuacgugaacaagcaggagggccagagccucuacgugaagggggagcccaucaucaacuucuacgacccgcuggucuuccccuccgacgaguucgacgcgagcaucucccaggugaacgagaagaucaaccagagccuggccuucauccgcaaguccgacgagcugcuccacaacgugaacgccggcaagagcacgaccaacaucaugaucaccaccaucaucaucgucaucaucgugauccugcugucccucaucgccguggggcugcugcucuacugcaaggcccggugaggacuaguaauaaggaaacuguaugaaugucugugggcaggaagugaagagauccuucuguaaagguuuuuggaauuaugucugcugaauaauaaacuuuuuugaaauaauaaaucugguagaaaaaugagaucuaaaaaaaaaaaaaaaaaaaaaaaaaaaaaaaaaaaaaaaaaaaaaaaaaaaaaaaaaaaaaaaaugcaucccccccccccccccccccccccccccccccaaaggcucuuuucagagccaccagaauu

SEQ ID NO: 8175 - RNA, 1907 nt, Artificial Sequence
  mRNA product Design g-2 comprising derived and/or modified sequence from HRSV(A2)__F-del_DSCav1_mut8 (opt1)
gggagaguccgcucagccagguugcagaagcggcuuagcguguguccuaaucuucucucugcguguagguaggccugugccgcaaacaagcuuaccauggagcugcucauccugaaggccaacgccaucaccaccauccugacggcggugaccuucugcuucgccagcggccagaacaucaccgaggaguucuaccaguccacgugcagcgccgucuccaagggguaccucggcgcccugcgcaccgggugguacaccagcgugaucaccaucgagcuguccaacaucaaggagaucaagugcaacggcaccgacgccaaggugaagcucaucaagcaggagcuggacaaguacaagaacgcggucacggaccugcagcuccugaugcagagcacccccgccaccggguccggcagcgccaucgccuccggcguggcggugugcaagguccugcaccucgagggggaggugaacaagaucaagagcgcccugcuguccaccaacaaggccguggucagccucuccggcugcggggugagcgugcugacguucaagguccuggaccucaagaacuacaucgacaagcagcugcugccgauccucaacaagcaguccugcagcauccccaacaucgagaccgugaucgaguuccagcagaagaacaaccggcugcuggagaucacccgcgaguucuccgugaacgccggcgucaccacgcccgugagcaccuacaugcucaccaacuccgagcugcugagccucaucaacgacaugcccaucaccaacgaccagaagaagcugaugagcaacaacgugcagaucguccggcagcaguccuacagcaucaugugcaucaucaaggaggaggugcuggccuacgugguccagcucccgcuguacggggugaucgacacgcccugcuggaagcugcacaccagcccccucugcaccaccaacacgaaggagggcuccaacaucugccugacccgcaccgaccggggcugguacugcgacaacgcgggguccgugagcuucuucccccaggccgagaccugcaagguccaguccaaccgcguguucugcgacacgaugaacagccugacccucccguccgaggucaaccugugcaacguggacaucuucaaccccaaguacgacugcaagaucaugaccagcaagaccgacguguccagcuccgucaucacgagccugggcgccaucguguccugcuacgggaagaccaagugcaccgccagcaacaagugccggggcaucaucaagaccuucuccaacggcugcgacuacgugagcaacaagggggucgacacgguguccgugggcaacacccucuacuacgucaacaagcaggaggggcagagccuguacgugaagggcgagcccaucaucaacuucuacgacccccugguguucccgagcgacgaguucgacgccuccaucagccaggucaacgagaagaucaaccagucccucgcguucauccgcaagagcgacgagcugcugcacaacgugaacgccgggaaguccaccaccaacaucaugaucaccacgaucaucaucgugaucaucgucauccuccugagccugaucgccgugggccuccugcuguacugcaaggcccggugaggacuaguaauaaggaaacuguaugaaugucugugggcaggaagugaagagauccuucuguaaagguuuuuggaauuaugucugcugaauaauaaacuuuuuugaaauaauaaaucugguagaaaaaugagaucuaaaaaaaaaaaaaaaaaaaaaaaaaaaaaaaaaaaaaaaaaaaaaaaaaaaaaaaaaaaaaaaaugcaucccccccccccccccccccccccccccccccaaaggcucuuuucagagccaccagaauu

SEQ ID NO: 8176 - RNA, 1907 nt, Artificial Sequence
  mRNA product Design g-2 comprising derived and/or modified sequence from HRSV(A2)__F-del_DSCav1_mut8 (opt2)
gggagaguccgcucagccagguugcagaagcggcuuagcguguguccuaaucuucucucugcguguagguaggccugugccgcaaacaagcuuaccauggagcuccucauccucaaggccaacgccaucaccaccauccucaccgccgucaccuucugcuucgccuccggccagaacaucaccgaggaguucuaccaguccaccugcuccgccgucuccaagggcuaccucggcgcccuccgcaccggcugguacaccuccgucaucaccaucgagcucuccaacaucaaggagaucaagugcaacggcaccgacgccaaggucaagcucaucaagcaggagcucgacaaguacaagaacgccgucaccgaccuccagcuccucaugcaguccacccccgccaccggcuccggcuccgccaucgccuccggcgucgccgucugcaagguccuccaccucgagggcgaggucaacaagaucaaguccgcccuccucuccaccaacaaggccgucgucucccucuccggcugcggcgucuccguccucaccuucaagguccucgaccucaagaacuacaucgacaagcagcuccuccccauccucaacaagcaguccugcuccauccccaacaucgagaccgucaucgaguuccagcagaagaacaaccgccuccucgagaucacccgcgaguucuccgucaacgccggcgucaccacccccgucuccaccuacaugcucaccaacuccgagcuccucucccucaucaacgacaugcccaucaccaacgaccagaagaagcucauguccaacaacguccagaucguccgccagcaguccuacuccaucaugugcaucaucaaggaggagguccucgccuacgucguccagcucccccucuacggcgucaucgacacccccugcuggaagcuccacaccuccccccucugcaccaccaacaccaaggagggcuccaacaucugccucacccgcaccgaccgcggcugguacugcgacaacgccggcuccgucuccuucuucccccaggccgagaccugcaagguccaguccaaccgcgucuucugcgacaccaugaacucccucacccuccccuccgaggucaaccucugcaacgucgacaucuucaaccccaaguacgacugcaagaucaugaccuccaagaccgacgucuccuccuccgucaucaccucccucggcgccaucgucuccugcuacggcaagaccaagugcaccgccuccaacaagugccgcggcaucaucaagaccuucuccaacggcugcgacuacgucuccaacaagggcgucgacaccgucuccgucggcaacacccucuacuacgucaacaagcaggagggccagucccucuacgucaagggcgagcccaucaucaacuucuacgacccccucgucuuccccuccgacgaguucgacgccuccaucucccaggucaacgagaagaucaaccagucccucgccuucauccgcaaguccgacgagcuccuccacaacgucaacgccggcaaguccaccaccaacaucaugaucaccaccaucaucaucgucaucaucgucauccuccucucccucaucgccgucggccuccuccucuacugcaaggcccgcugaggacuaguaauaaggaaacuguaugaaugucugugggcaggaagugaagagauccuucuguaaagguuuuuggaauuaugucugcugaauaauaaacuuuuuugaaauaauaaaucugguagaaaaaugagaucuaaaaaaaaaaaaaaaaaaaaaaaaaaaaaaaaaaaaaaaaaaaaaaaaaaaaaaaaaaaaaaaaugcaucccccccccccccccccccccccccccccccaaaggcucuuuucagagccaccagaauu

SEQ ID NO: 8177 - RNA, 1907 nt, Artificial Sequence
  mRNA product Design g-2 comprising derived and/or modified sequence from HRSV(A2)__F-del_DSCav1_mut8 (opt3)
gggagaguccgcucagccagguugcagaagcggcuuagcguguguccuaaucuucucucugcguguagguaggccugugccgcaaacaagcuuaccauggagcugcucauccuuaaggccaacgcuauuaccacaauacugacugcagugacguucugcuuugccagcggccagaauaucaccgaagaguucuaccaauccacauguucugcggucucaaaaggguauuugggagcuuuaagaacugguugguacaccaguguuauuacaaucgaacugagcaacauuaaggagaucaaaugcaauggcaccgacgccaaggugaaacuaauaaagcaggaacucgauaaguauaaaaacgcaguaacugaccugcagcuucugaugcaguccacacccgccaccgggucuggaucggcuaucgcaucaggcguggccgucuguaagguguugcaccucgagggugagguuaauaaaauuaagagcgcucugcugaguacgaacaaagccguggucucccucucugggugcggagugagcguauuaacuuuuaagguucuggaucuuaagaauuacaucgacaaacaauugcugccuauucuaaacaagcaguccuguucaaucccaaauauagaaaccgugauugaguuccagcagaaaaacaauaggcuccuggaaaucacacgggaguuuagugucaacgcgggcgugacuaccccggugagcacauauaugcuuaccaauucugagcuguugucccucauuaacgauaugcccaucacgaaugaccaaaagaaacugaugucaaacaacguccagaucguucgccagcagagcuacaguauuaugugcauaaucaaggaagagguguuagcauauguagugcaacugccucucuacggcgucauugauacuccauguuggaaacuucauacaucuccccugugcaccacuaauacaaaggaaggguccaacaucuguuugacccgaacggaccguggaugguacugcgauaaugccgguagcgugucguucuuuccucaggcugagaccuguaagguucagucuaacagaguguucugcgacacaaugaacucccuaacucugccaucagaagucaaucucugcaauguggauauauuuaaccccaaauaugacuguaagauuaugaccaguaaaacagauguaagcuccucuguuaucacuagccugggcgccaucgugucaugcuacgggaagaccaaauguacagcaaguaauaagugcaggggaauuaucaagaccuucuccaacggcugugacuaugucagcaauaaagguguggacacugucucuguggggaacacgcuuuacuauguuaauaagcaagagggacagucacuguacgugaaaggcgagccuauuauaaacuuuuaugauccauugguauucccgagugacgaauuugaugcuagcaucucccaggucaaugagaagauuaaccagucucucgccuucauccggaaaucggacgaacuguuacacaacgugaaugcgggcaagagcacaaccaacaucaugauuacuaccauaaucauuguuaucauugugauccugcuaucccucauagccgucgggcugcuuuuguacugcaaggcacgcugaggacuaguaauaaggaaacuguaugaaugucugugggcaggaagugaagagauccuucuguaaagguuuuuggaauuaugucugcugaauaauaaacuuuuuugaaauaauaaaucugguagaaaaaugagaucuaaaaaaaaaaaaaaaaaaaaaaaaaaaaaaaaaaaaaaaaaaaaaaaaaaaaaaaaaaaaaaaaugcaucccccccccccccccccccccccccccccccaaaggcucuuuucagagccaccagaauu

SEQ ID NO: 8178 - RNA, 1907 nt, Artificial Sequence
  mRNA product Design g-2 comprising derived and/or modified sequence from HRSV(A2)__F-del_DSCav1_mut8 (opt4)
gggagaguccgcucagccagguugcagaagcggcuuagcguguguccuaaucuucucucugcguguagguaggccugugccgcaaacaagcuuaccauggagcugcugauccugaaggccaacgccaucaccaccauccugaccgccgugaccuucugcuucgccagcggccagaacaucaccgaggaguucuaccagagcaccugcagcgccgugagcaagggcuaccugggcgcccugagaaccggcugguacaccagcgugaucaccaucgagcugagcaacaucaaggagaucaagugcaacggcaccgacgccaaggugaagcugaucaagcaggagcuggacaaguacaagaacgccgugaccgaccugcagcugcugaugcagagcacccccgccaccggcagcggcagcgccaucgccagcggcguggccgugugcaaggugcugcaccuggagggcgaggugaacaagaucaagagcgcccugcugagcaccaacaaggccguggugagccugagcggcugcggcgugagcgugcugaccuucaaggugcuggaccugaagaacuacaucgacaagcagcugcugcccauccugaacaagcagagcugcagcauccccaacaucgagaccgugaucgaguuccagcagaagaacaacagacugcuggagaucaccagagaguucagcgugaacgccggcgugaccacccccgugagcaccuacaugcugaccaacagcgagcugcugagccugaucaacgacaugcccaucaccaacgaccagaagaagcugaugagcaacaacgugcagaucgugagacagcagagcuacagcaucaugugcaucaucaaggaggaggugcuggccuacguggugcagcugccccuguacggcgugaucgacacccccugcuggaagcugcacaccagcccccugugcaccaccaacaccaaggagggcagcaacaucugccugaccagaaccgacagaggcugguacugcgacaacgccggcagcgugagcuucuucccccaggccgagaccugcaaggugcagagcaacagaguguucugcgacaccaugaacagccugacccugcccagcgaggugaaccugugcaacguggacaucuucaaccccaaguacgacugcaagaucaugaccagcaagaccgacgugagcagcagcgugaucaccagccugggcgccaucgugagcugcuacggcaagaccaagugcaccgccagcaacaagugcagaggcaucaucaagaccuucagcaacggcugcgacuacgugagcaacaagggcguggacaccgugagcgugggcaacacccuguacuacgugaacaagcaggagggccagagccuguacgugaagggcgagcccaucaucaacuucuacgacccccugguguuccccagcgacgaguucgacgccagcaucagccaggugaacgagaagaucaaccagagccuggccuucaucagaaagagcgacgagcugcugcacaacgugaacgccggcaagagcaccaccaacaucaugaucaccaccaucaucaucgugaucaucgugauccugcugagccugaucgccgugggccugcugcuguacugcaaggccagaugaggacuaguaauaaggaaacuguaugaaugucugugggcaggaagugaagagauccuucuguaaagguuuuuggaauuaugucugcugaauaauaaacuuuuuugaaauaauaaaucugguagaaaaaugagaucuaaaaaaaaaaaaaaaaaaaaaaaaaaaaaaaaaaaaaaaaaaaaaaaaaaaaaaaaaaaaaaaaugcaucccccccccccccccccccccccccccccccaaaggcucuuuucagagccaccagaauu

SEQ ID NO: 8179 - RNA, 1907 nt, Artificial Sequence
  mRNA product Design g-2 comprising derived and/or modified sequence from HRSV(A2)__F-del_DSCav1_mut8 (opt5)
gggagaguccgcucagccagguugcagaagcggcuuagcguguguccuaaucuucucucugcguguagguaggccugugccgcaaacaagcuuaccauggagcugcucauccugaaggccaacgcuauuaccacaauccuuacggccgugaccuucugcuuugcgagcggccagaauauuacagaagaguucuaccaauccaccuguucugcugucagcaaaggguaucugggagcccucagaacaggcugguacaccuccguuaucacaauugaacugucuaacaucaaggagaucaaaugcaaugggaccgacgccaaggugaaacuuauuaagcaggaacuggauaaguauaaaaacgcugugacggaccuccagcugcugaugcagagcacccccgccacaggauccggcucugcuaucgccagcggggucgcgguguguaagguucuccaccuggagggagaggugaauaaaauuaaguccgcccuucugagcaccaacaaagcugucgugucucucuccggcugcggcguuagcgugcugacauuuaagguccuugaucugaagaauuacaucgacaaacaacuccugccuauucugaacaagcagucuuguuccaucccgaauauugaaaccgugaucgaguuccagcagaaaaacaaucggcuccuggaaaucacgcgcgaguuuagcgugaacgccggggucacaacccccguuucuacauauaugcuuaccaauuccgagcugcucagccugauuaacgauaugccuaucaccaaugaccaaaagaaacuuauguccaacaacgugcagauugugagacagcagucuuacagcaucaugugcauuaucaaggaagagguccuggcuuaugugguucaacucccccuguacggagugaucgauacaccuuguuggaaacugcauacgagcccccucugcaccacaaauaccaaggaaggcagcaacauuugucugacacggaccgaccgcgggugguacugcgauaaugccggaucugucuccuucuuuccucaggcggagacguguaaggugcagagcaacagaguuuucugcgacacaaugaacucucuuacccugccgagcgaagugaaucucugcaaugucgauaucuuuaaccccaaauaugacuguaagauuaugaccuccaaaacagaugugucuagcuccgucaucaccagccugggcgccauugugucuugcuacgggaagacaaaauguacggcuuccaauaagugccggggaaucaucaagaccuucagcaacggcugugacuauguuucuaauaaaggcguggacacagucuccguggggaacacccuuuacuauguuaauaagcaagagggacagagccuguacgugaaaggcgagccuauuaucaacuuuuaugauccccucgucuucccuuccgacgaauuugaugccucuauuagccaggugaaugagaagaucaaccagucccuggcuuucauucgcaaaucugacgaacugcuccacaacgugaaugccgggaaguccacaaccaacaucaugauuacgaccaucaucauuguuaucauugucauccugcuuucccugauugccgugggacuccugcuguacugcaaggcuagaugaggacuaguaauaaggaaacuguaugaaugucugugggcaggaagugaagagauccuucuguaaagguuuuuggaauuaugucugcugaauaauaaacuuuuuugaaauaauaaaucugguagaaaaaugagaucuaaaaaaaaaaaaaaaaaaaaaaaaaaaaaaaaaaaaaaaaaaaaaaaaaaaaaaaaaaaaaaaaugcaucccccccccccccccccccccccccccccccaaaggcucuuuucagagccaccagaauu

SEQ ID NO: 8180 - RNA, 1907 nt, Artificial Sequence
  mRNA product Design g-2 comprising derived and/or modified sequence from HRSV(A2)__F-del_DSCav1_mut8 (opt6)
gggagaguccgcucagccagguugcagaagcggcuuagcguguguccuaaucuucucucugcguguagguaggccugugccgcaaacaagcuuaccauggaacuacucauauugaaagccaacgcaaucacaacaauacuaaccgccguaacauuuugcuucgcgucaggccaaaauauaacagaagaauuuuaccaaucaacaugcuccgccguaucaaaaggauaccuaggugcauuacgaaccgguugguacacaucaguaaucacaauagaacuuuccaacauuaaagaaauaaaaugcaauggcacagacgcaaaagucaaacuaauaaaacaagaacuagacaaauauaaaaacgccgucacagacuuacaacuauuaaugcaaagcacaccagcaacaggauccggaucagcaauagcaucaggaguagccgucuguaaaguacuacaccuagaaggcgaaguuaauaaaauuaaaucagcuuuauuaucaaccaacaaagcaguaguaucacuauccggaugcggagucuccguccuaacauucaaaguacuagaccucaagaauuacauagauaaacaacuacuaccaauacucaacaaacaaucauguucaauaccaaacaucgaaaccgucauagaauuucaacaaaaaaauaauagacucuuagaaauaacacgagaauuuagcguaaacgcaggagucacaaccccugucucaacauacaugcuaaccaauuccgaauuauuaucacucauaaaugacaugccaauaacuaaugaccaaaaaaaacuuaugucaaacaacguacaaauaguaagacaacaaucauauucaauaaugugcauaaucaaagaagaaguuuuagcauauguaguacaacuaccacuauauggcgucauagacacaccaugcuggaaauuacacacaucaccucuaugcacaacaaacacaaaagaaggaagcaacauuugccuaaccagaaccgauagaggaugguacugcgauaacgcaggcucaguaucauucuucccucaagccgaaacuugcaaaguccaaucaaauagagucuucugcgauacaaugaacuccuuaacuuuaccaucagaaguaaaucuaugcaacguagauaucuuuaauccaaaauacgauugcaaaaucaugacaucaaaaacagauguaucaucuaguguaauuaccucccuaggagcaauaguaagcugcuacggaaaaacaaaaugcaccgccucuaacaaaugucguggaauaauaaaaacauucucaaacggaugcgauuauguaucaaauaaaggugucgacaccguaucaguaggcaauacacuauacuauguaaauaaacaagaaggacaaucacucuacgucaaaggugaaccaauaauaaacuucuacgacccacuuguauucccaagcgacgaauuugacgcaucaauaagccaaguaaacgaaaaaauaaaccaaucacuagcauucaucagaaaaucagacgaacuacuccacaauguaaaugcaggaaaaucaacaaccaauaucaugauaacaaccauaauaauagucauaauaguaauacuauuaucccucauagccguuggacuacuccuauauuguaaagcacgauaaggacuaguaauaaggaaacuguaugaaugucugugggcaggaagugaagagauccuucuguaaagguuuuuggaauuaugucugcugaauaauaaacuuuuuugaaauaauaaaucugguagaaaaaugagaucuaaaaaaaaaaaaaaaaaaaaaaaaaaaaaaaaaaaaaaaaaaaaaaaaaaaaaaaaaaaaaaaaugcaucccccccccccccccccccccccccccccccaaaggcucuuuucagagccaccagaauu

SEQ ID NO: 8181 - RNA, 1907 nt, Artificial Sequence
  mRNA product Design g-2 comprising derived and/or modified sequence from HRSV(A2)__F-del_DSCav1_mut8 (opt11)
gggagaguccgcucagccagguugcagaagcggcuuagcguguguccuaaucuucucucugcguguagguaggccugugccgcaaacaagcuuaccauggaacuccucauccucaaagccaacgccaucaccaccauacucaccgcaguaaccuucugcuucgcauccggccaaaacaucacagaagaguucuaccagaguaccugcuccgccgucuccaaaggcuaccuuggcgcccuccguaccgggugguacacauccgucaucacaaucgaacucuccaacaucaaagaaauaaagugcaacggcacagacgccaaaguaaaacugauaaagcaagaacucgacaaauacaaaaacgccguaaccgaccuccagcuacuaaugcaauccacucccgccaccggcagcggauccgccaucgccuccggaguagccgucuguaaagucuuacaccucgaaggcgaagugaacaaaaucaaauccgcccuacucucaaccaacaaagccguaguaucacucuccgggugcggcguuucagugcuaacguucaaaguccuugaccucaaaaacuacaucgacaaacaacuccuccccauccuaaauaaacaauccugcuccauacccaacaucgagacugucaucgaguuccagcagaaaaacaaccgacuccucgaaaucacacgcgaguucucugucaacgccggcgucacaacccccgucuccacauacaugcucaccaacagcgaacuccucucccuaaucaaugacaugcccaucaccaacgaccaaaagaaacucaugucaaacaacguccaaaucguccgccaacaauccuacagcaucaugugcaucaucaaagaagaaguucucgcauacguaguacaacucccccucuacggagugaucgacacccccugcuggaaacuacacaccagcccgcuuugcaccacaaacaccaaggaaggcuccaacaucugccucacucgaaccgaccgcggcugguacugcgacaacgcaggcuccgucaguuucuuuccccaagcagaaacaugcaaaguccaauccaaccgaguauucugcgacaccaugaacucccucacccuaccauccgaaguuaaccuaugcaacguggacaucuucaaccccaaguacgacugcaaaauuaugaccuccaaaaccgacguauccuccagcgucaucaccagccucggagcaauagucuccugcuacggcaagaccaagugcaccgcuuccaacaagugucgcggaaucaucaaaaccuucucaaacggcugcgacuacgucuccaacaaaggcgucgacaccguauccguaggaaacacccuauacuacgucaacaaacaagaaggacaaucccucuaugucaaaggcgaacccaucaucaauuucuacgacccccuagucuucccuuccgacgaguucgacgcguccaucagccaagucaaugaaaagaucaaccagagccuggcauucauccgcaaauccgacgaacuccuccacaacgucaacgcgggaaaauccacgacaaacaucaugaucaccaccaucaucaucgucaucauagucauucuccuuucucucaucgccgugggacuacuucucuacugcaaagcccgauaaggacuaguaauaaggaaacuguaugaaugucugugggcaggaagugaagagauccuucuguaaagguuuuuggaauuaugucugcugaauaauaaacuuuuuugaaauaauaaaucugguagaaaaaugagaucuaaaaaaaaaaaaaaaaaaaaaaaaaaaaaaaaaaaaaaaaaaaaaaaaaaaaaaaaaaaaaaaaugcaucccccccccccccccccccccccccccccccaaaggcucuuuucagagccaccagaauu

SEQ ID NO: 8182 - RNA, 2139 nt, Artificial Sequence
  mRNA product Design g-3 comprising derived and/or modified sequence from HRSV(A2)__F-del_DSCav1_mut8 (opt1)
gggagaguccgcucagccagguugcagaagcggcuuagcguguguccuaaucuucucucugcguguagguaggccugugccgcaaacaagcuuaccauggagcugcucauccugaaggccaacgccaucaccaccauccugacggcggugaccuucugcuucgccagcggccagaacaucaccgaggaguucuaccaguccacgugcagcgccgucuccaagggguaccucggcgcccugcggaccggcugguacaccuccgugaucaccaucgagcugagcaacaucaaggagaucaagugcaacgggaccgacgccaaggugaagcucaucaagcaggagcuggacaaguacaagaacgcggucacggaccugcagcuccugaugcaguccaccccggcaaccggcuccggcuccgccaucgcgagcggcgucgccgugugcaaggugcugcaccucgagggggaggucaacaagaucaagagcgcccugcuguccaccaacaaggccguggugagccucuccggcugcggcgucagcgugcugaccuucaaggugcuggaccucaagaacuacaucgacaagcagcugcugcccauccugaacaagcagagcugcuccauccccaacaucgagacggugaucgaguuccagcagaagaacaaccggcuccuggagaucacccgcgaguucagcgugaacgccggggucaccacccccguguccacguacaugcugaccaacagcgagcuccugucccugaucaacgacaugccgaucaccaacgaccagaagaagcucaugagcaacaacgugcagaucguccggcagcaguccuacagcaucaugugcaucaucaaggaggaggugcuggcguacgugguccagcugccccucuacggcgugaucgacacccccugcuggaagcugcacacgagcccccugugcaccaccaacaccaaggagggguccaacaucugccucacgcgcaccgaccggggcugguacugcgacaacgccggcagcgucuccuucuucccgcaggccgagaccugcaaggugcagagcaaccgcguguucugcgacaccaugaacucccugacgcugcccagcgagguaaaccucugcaacgucgacaucuucaaccccaaguacgacugcaagaucaugaccuccaagaccgacgugagcuccagcgugaucaccucccugggggccaucgucagcugcuacggcaagacgaagugcaccgccagcaacaagugccgggggaucaucaagaccuucuccaacggcugcgacuacgugagcaacaagggcguggacaccguguccgucgggaacacccuguacuacgugaacaagcaggagggccagagccucuacgugaagggggagcccaucaucaacuucuacgacccgcuggucuuccccuccgacgaguucgacgcgagcaucucccaggugaacgagaagaucaaccagagccuggccuucauccgcaaguccgacgagcugcuccacaacgugaacgccggcaagagcacgaccaacaucaugaucaccaccaucaucaucgucaucaucgugauccugcugucccucaucgccguggggcugcugcucuacugcaaggcccggugaggacuagugaagggaacacccaaauuuaauucagccuuaagcacaauuaauuaagagugaaacguaauuguacaagcaguuggucacccaccauagggcaugaucaacaccgcaaccuuuccuuuuucccccagugauucugaaaaaccccucuucccuucagcuugcuuagauguuccaaauuuaguaagcuuaaggcggccuacagaagaaaaagaaaaaaaaggccacaaaaguucccucucacuuucaguaaauaaaauaaaagcagcaacagaaauaaagaaauaaaugaaauucaaaaugaaauaaauauuguguugugcagcauuaaaaaaucaauaaaaauuaaaaaugagcaagaucuaaaaaaaaaaaaaaaaaaaaaaaaaaaaaaaaaaaaaaaaaaaaaaaaaaaaaaaaaaaaaaaaugcaucccccccccccccccccccccccccccccccaaaggcucuuuucagagccaccagaauu

SEQ ID NO: 8183 - RNA, 2139 nt, Artificial Sequence
  mRNA product Design g-3 comprising derived and/or modified sequence from HRSV(A2)__F-del_DSCav1_mut8 (opt1)
gggagaguccgcucagccagguugcagaagcggcuuagcguguguccuaaucuucucucugcguguagguaggccugugccgcaaacaagcuuaccauggagcugcucauccugaaggccaacgccaucaccaccauccugacggcggugaccuucugcuucgccagcggccagaacaucaccgaggaguucuaccaguccacgugcagcgccgucuccaagggguaccucggcgcccugcgcaccgggugguacaccagcgugaucaccaucgagcuguccaacaucaaggagaucaagugcaacggcaccgacgccaaggugaagcucaucaagcaggagcuggacaaguacaagaacgcggucacggaccugcagcuccugaugcagagcacccccgccaccggguccggcagcgccaucgccuccggcguggcggugugcaagguccugcaccucgagggggaggugaacaagaucaagagcgcccugcuguccaccaacaaggccguggucagccucuccggcugcggggugagcgugcugacguucaagguccuggaccucaagaacuacaucgacaagcagcugcugccgauccucaacaagcaguccugcagcauccccaacaucgagaccgugaucgaguuccagcagaagaacaaccggcugcuggagaucacccgcgaguucuccgugaacgccggcgucaccacgcccgugagcaccuacaugcucaccaacuccgagcugcugagccucaucaacgacaugcccaucaccaacgaccagaagaagcugaugagcaacaacgugcagaucguccggcagcaguccuacagcaucaugugcaucaucaaggaggaggugcuggccuacgugguccagcucccgcuguacggggugaucgacacgcccugcuggaagcugcacaccagcccccucugcaccaccaacacgaaggagggcuccaacaucugccugacccgcaccgaccggggcugguacugcgacaacgcgggguccgugagcuucuucccccaggccgagaccugcaagguccaguccaaccgcguguucugcgacacgaugaacagccugacccucccguccgaggucaaccugugcaacguggacaucuucaaccccaaguacgacugcaagaucaugaccagcaagaccgacguguccagcuccgucaucacgagccugggcgccaucguguccugcuacgggaagaccaagugcaccgccagcaacaagugccggggcaucaucaagaccuucuccaacggcugcgacuacgugagcaacaagggggucgacacgguguccgugggcaacacccucuacuacgucaacaagcaggaggggcagagccuguacgugaagggcgagcccaucaucaacuucuacgacccccugguguucccgagcgacgaguucgacgccuccaucagccaggucaacgagaagaucaaccagucccucgcguucauccgcaagagcgacgagcugcugcacaacgugaacgccgggaaguccaccaccaacaucaugaucaccacgaucaucaucgugaucaucgucauccuccugagccugaucgccgugggccuccugcuguacugcaaggcccggugaggacuagugaagggaacacccaaauuuaauucagccuuaagcacaauuaauuaagagugaaacguaauuguacaagcaguuggucacccaccauagggcaugaucaacaccgcaaccuuuccuuuuucccccagugauucugaaaaaccccucuucccuucagcuugcuuagauguuccaaauuuaguaagcuuaaggcggccuacagaagaaaaagaaaaaaaaggccacaaaaguucccucucacuuucaguaaauaaaauaaaagcagcaacagaaauaaagaaauaaaugaaauucaaaaugaaauaaauauuguguugugcagcauuaaaaaaucaauaaaaauuaaaaaugagcaagaucuaaaaaaaaaaaaaaaaaaaaaaaaaaaaaaaaaaaaaaaaaaaaaaaaaaaaaaaaaaaaaaaaugcaucccccccccccccccccccccccccccccccaaaggcucuuuucagagccaccagaauu

SEQ ID NO: 8184 - RNA, 2139 nt, Artificial Sequence
  mRNA product Design g-3 comprising derived and/or modified sequence from HRSV(A2)__F-del_DSCav1_mut8 (opt2)
gggagaguccgcucagccagguugcagaagcggcuuagcguguguccuaaucuucucucugcguguagguaggccugugccgcaaacaagcuuaccauggagcuccucauccucaaggccaacgccaucaccaccauccucaccgccgucaccuucugcuucgccuccggccagaacaucaccgaggaguucuaccaguccaccugcuccgccgucuccaagggcuaccucggcgcccuccgcaccggcugguacaccuccgucaucaccaucgagcucuccaacaucaaggagaucaagugcaacggcaccgacgccaaggucaagcucaucaagcaggagcucgacaaguacaagaacgccgucaccgaccuccagcuccucaugcaguccacccccgccaccggcuccggcuccgccaucgccuccggcgucgccgucugcaagguccuccaccucgagggcgaggucaacaagaucaaguccgcccuccucuccaccaacaaggccgucgucucccucuccggcugcggcgucuccguccucaccuucaagguccucgaccucaagaacuacaucgacaagcagcuccuccccauccucaacaagcaguccugcuccauccccaacaucgagaccgucaucgaguuccagcagaagaacaaccgccuccucgagaucacccgcgaguucuccgucaacgccggcgucaccacccccgucuccaccuacaugcucaccaacuccgagcuccucucccucaucaacgacaugcccaucaccaacgaccagaagaagcucauguccaacaacguccagaucguccgccagcaguccuacuccaucaugugcaucaucaaggaggagguccucgccuacgucguccagcucccccucuacggcgucaucgacacccccugcuggaagcuccacaccuccccccucugcaccaccaacaccaaggagggcuccaacaucugccucacccgcaccgaccgcggcugguacugcgacaacgccggcuccgucuccuucuucccccaggccgagaccugcaagguccaguccaaccgcgucuucugcgacaccaugaacucccucacccuccccuccgaggucaaccucugcaacgucgacaucuucaaccccaaguacgacugcaagaucaugaccuccaagaccgacgucuccuccuccgucaucaccucccucggcgccaucgucuccugcuacggcaagaccaagugcaccgccuccaacaagugccgcggcaucaucaagaccuucuccaacggcugcgacuacgucuccaacaagggcgucgacaccgucuccgucggcaacacccucuacuacgucaacaagcaggagggccagucccucuacgucaagggcgagcccaucaucaacuucuacgacccccucgucuuccccuccgacgaguucgacgccuccaucucccaggucaacgagaagaucaaccagucccucgccuucauccgcaaguccgacgagcuccuccacaacgucaacgccggcaaguccaccaccaacaucaugaucaccaccaucaucaucgucaucaucgucauccuccucucccucaucgccgucggccuccuccucuacugcaaggcccgcugaggacuagugaagggaacacccaaauuuaauucagccuuaagcacaauuaauuaagagugaaacguaauuguacaagcaguuggucacccaccauagggcaugaucaacaccgcaaccuuuccuuuuucccccagugauucugaaaaaccccucuucccuucagcuugcuuagauguuccaaauuuaguaagcuuaaggcggccuacagaagaaaaagaaaaaaaaggccacaaaaguucccucucacuuucaguaaauaaaauaaaagcagcaacagaaauaaagaaauaaaugaaauucaaaaugaaauaaauauuguguugugcagcauuaaaaaaucaauaaaaauuaaaaaugagcaagaucuaaaaaaaaaaaaaaaaaaaaaaaaaaaaaaaaaaaaaaaaaaaaaaaaaaaaaaaaaaaaaaaaugcaucccccccccccccccccccccccccccccccaaaggcucuuuucagagccaccagaauu

SEQ ID NO: 8185 - RNA, 2139 nt, Artificial Sequence
  mRNA product Design g-3 comprising derived and/or modified sequence from HRSV(A2)__F-del_DSCav1_mut8 (opt3)
gggagaguccgcucagccagguugcagaagcggcuuagcguguguccuaaucuucucucugcguguagguaggccugugccgcaaacaagcuuaccauggagcugcucauccuuaaggccaacgcuauuaccacaauacugacugcagugacguucugcuuugccagcggccagaauaucaccgaagaguucuaccaauccacauguucugcggucucaaaaggguauuugggagcuuuaagaacugguugguacaccaguguuauuacaaucgaacugagcaacauuaaggagaucaaaugcaauggcaccgacgccaaggugaaacuaauaaagcaggaacucgauaaguauaaaaacgcaguaacugaccugcagcuucugaugcaguccacacccgccaccgggucuggaucggcuaucgcaucaggcguggccgucuguaagguguugcaccucgagggugagguuaauaaaauuaagagcgcucugcugaguacgaacaaagccguggucucccucucugggugcggagugagcguauuaacuuuuaagguucuggaucuuaagaauuacaucgacaaacaauugcugccuauucuaaacaagcaguccuguucaaucccaaauauagaaaccgugauugaguuccagcagaaaaacaauaggcuccuggaaaucacacgggaguuuagugucaacgcgggcgugacuaccccggugagcacauauaugcuuaccaauucugagcuguugucccucauuaacgauaugcccaucacgaaugaccaaaagaaacugaugucaaacaacguccagaucguucgccagcagagcuacaguauuaugugcauaaucaaggaagagguguuagcauauguagugcaacugccucucuacggcgucauugauacuccauguuggaaacuucauacaucuccccugugcaccacuaauacaaaggaaggguccaacaucuguuugacccgaacggaccguggaugguacugcgauaaugccgguagcgugucguucuuuccucaggcugagaccuguaagguucagucuaacagaguguucugcgacacaaugaacucccuaacucugccaucagaagucaaucucugcaauguggauauauuuaaccccaaauaugacuguaagauuaugaccaguaaaacagauguaagcuccucuguuaucacuagccugggcgccaucgugucaugcuacgggaagaccaaauguacagcaaguaauaagugcaggggaauuaucaagaccuucuccaacggcugugacuaugucagcaauaaagguguggacacugucucuguggggaacacgcuuuacuauguuaauaagcaagagggacagucacuguacgugaaaggcgagccuauuauaaacuuuuaugauccauugguauucccgagugacgaauuugaugcuagcaucucccaggucaaugagaagauuaaccagucucucgccuucauccggaaaucggacgaacuguuacacaacgugaaugcgggcaagagcacaaccaacaucaugauuacuaccauaaucauuguuaucauugugauccugcuaucccucauagccgucgggcugcuuuuguacugcaaggcacgcugaggacuagugaagggaacacccaaauuuaauucagccuuaagcacaauuaauuaagagugaaacguaauuguacaagcaguuggucacccaccauagggcaugaucaacaccgcaaccuuuccuuuuucccccagugauucugaaaaaccccucuucccuucagcuugcuuagauguuccaaauuuaguaagcuuaaggcggccuacagaagaaaaagaaaaaaaaggccacaaaaguucccucucacuuucaguaaauaaaauaaaagcagcaacagaaauaaagaaauaaaugaaauucaaaaugaaauaaauauuguguugugcagcauuaaaaaaucaauaaaaauuaaaaaugagcaagaucuaaaaaaaaaaaaaaaaaaaaaaaaaaaaaaaaaaaaaaaaaaaaaaaaaaaaaaaaaaaaaaaaugcaucccccccccccccccccccccccccccccccaaaggcucuuuucagagccaccagaauu

SEQ ID NO: 8186 - RNA, 2139 nt, Artificial Sequence
  mRNA product Design g-3 comprising derived and/or modified sequence from HRSV(A2)__F-del_DSCav1_mut8 (opt4)
gggagaguccgcucagccagguugcagaagcggcuuagcguguguccuaaucuucucucugcguguagguaggccugugccgcaaacaagcuuaccauggagcugcugauccugaaggccaacgccaucaccaccauccugaccgccgugaccuucugcuucgccagcggccagaacaucaccgaggaguucuaccagagcaccugcagcgccgugagcaagggcuaccugggcgcccugagaaccggcugguacaccagcgugaucaccaucgagcugagcaacaucaaggagaucaagugcaacggcaccgacgccaaggugaagcugaucaagcaggagcuggacaaguacaagaacgccgugaccgaccugcagcugcugaugcagagcacccccgccaccggcagcggcagcgccaucgccagcggcguggccgugugcaaggugcugcaccuggagggcgaggugaacaagaucaagagcgcccugcugagcaccaacaaggccguggugagccugagcggcugcggcgugagcgugcugaccuucaaggugcuggaccugaagaacuacaucgacaagcagcugcugcccauccugaacaagcagagcugcagcauccccaacaucgagaccgugaucgaguuccagcagaagaacaacagacugcuggagaucaccagagaguucagcgugaacgccggcgugaccacccccgugagcaccuacaugcugaccaacagcgagcugcugagccugaucaacgacaugcccaucaccaacgaccagaagaagcugaugagcaacaacgugcagaucgugagacagcagagcuacagcaucaugugcaucaucaaggaggaggugcuggccuacguggugcagcugccccuguacggcgugaucgacacccccugcuggaagcugcacaccagcccccugugcaccaccaacaccaaggagggcagcaacaucugccugaccagaaccgacagaggcugguacugcgacaacgccggcagcgugagcuucuucccccaggccgagaccugcaaggugcagagcaacagaguguucugcgacaccaugaacagccugacccugcccagcgaggugaaccugugcaacguggacaucuucaaccccaaguacgacugcaagaucaugaccagcaagaccgacgugagcagcagcgugaucaccagccugggcgccaucgugagcugcuacggcaagaccaagugcaccgccagcaacaagugcagaggcaucaucaagaccuucagcaacggcugcgacuacgugagcaacaagggcguggacaccgugagcgugggcaacacccuguacuacgugaacaagcaggagggccagagccuguacgugaagggcgagcccaucaucaacuucuacgacccccugguguuccccagcgacgaguucgacgccagcaucagccaggugaacgagaagaucaaccagagccuggccuucaucagaaagagcgacgagcugcugcacaacgugaacgccggcaagagcaccaccaacaucaugaucaccaccaucaucaucgugaucaucgugauccugcugagccugaucgccgugggccugcugcuguacugcaaggccagaugaggacuagugaagggaacacccaaauuuaauucagccuuaagcacaauuaauuaagagugaaacguaauuguacaagcaguuggucacccaccauagggcaugaucaacaccgcaaccuuuccuuuuucccccagugauucugaaaaaccccucuucccuucagcuugcuuagauguuccaaauuuaguaagcuuaaggcggccuacagaagaaaaagaaaaaaaaggccacaaaaguucccucucacuuucaguaaauaaaauaaaagcagcaacagaaauaaagaaauaaaugaaauucaaaaugaaauaaauauuguguugugcagcauuaaaaaaucaauaaaaauuaaaaaugagcaagaucuaaaaaaaaaaaaaaaaaaaaaaaaaaaaaaaaaaaaaaaaaaaaaaaaaaaaaaaaaaaaaaaaugcaucccccccccccccccccccccccccccccccaaaggcucuuuucagagccaccagaauu

SEQ ID NO: 8187 - RNA, 2139 nt, Artificial Sequence
  mRNA product Design g-3 comprising derived and/or modified sequence from HRSV(A2)__F-del_DSCav1_mut8 (opt5)
gggagaguccgcucagccagguugcagaagcggcuuagcguguguccuaaucuucucucugcguguagguaggccugugccgcaaacaagcuuaccauggagcugcucauccugaaggccaacgcuauuaccacaauccuuacggccgugaccuucugcuuugcgagcggccagaauauuacagaagaguucuaccaauccaccuguucugcugucagcaaaggguaucugggagcccucagaacaggcugguacaccuccguuaucacaauugaacugucuaacaucaaggagaucaaaugcaaugggaccgacgccaaggugaaacuuauuaagcaggaacuggauaaguauaaaaacgcugugacggaccuccagcugcugaugcagagcacccccgccacaggauccggcucugcuaucgccagcggggucgcgguguguaagguucuccaccuggagggagaggugaauaaaauuaaguccgcccuucugagcaccaacaaagcugucgugucucucuccggcugcggcguuagcgugcugacauuuaagguccuugaucugaagaauuacaucgacaaacaacuccugccuauucugaacaagcagucuuguuccaucccgaauauugaaaccgugaucgaguuccagcagaaaaacaaucggcuccuggaaaucacgcgcgaguuuagcgugaacgccggggucacaacccccguuucuacauauaugcuuaccaauuccgagcugcucagccugauuaacgauaugccuaucaccaaugaccaaaagaaacuuauguccaacaacgugcagauugugagacagcagucuuacagcaucaugugcauuaucaaggaagagguccuggcuuaugugguucaacucccccuguacggagugaucgauacaccuuguuggaaacugcauacgagcccccucugcaccacaaauaccaaggaaggcagcaacauuugucugacacggaccgaccgcgggugguacugcgauaaugccggaucugucuccuucuuuccucaggcggagacguguaaggugcagagcaacagaguuuucugcgacacaaugaacucucuuacccugccgagcgaagugaaucucugcaaugucgauaucuuuaaccccaaauaugacuguaagauuaugaccuccaaaacagaugugucuagcuccgucaucaccagccugggcgccauugugucuugcuacgggaagacaaaauguacggcuuccaauaagugccggggaaucaucaagaccuucagcaacggcugugacuauguuucuaauaaaggcguggacacagucuccguggggaacacccuuuacuauguuaauaagcaagagggacagagccuguacgugaaaggcgagccuauuaucaacuuuuaugauccccucgucuucccuuccgacgaauuugaugccucuauuagccaggugaaugagaagaucaaccagucccuggcuuucauucgcaaaucugacgaacugcuccacaacgugaaugccgggaaguccacaaccaacaucaugauuacgaccaucaucauuguuaucauugucauccugcuuucccugauugccgugggacuccugcuguacugcaaggcuagaugaggacuagugaagggaacacccaaauuuaauucagccuuaagcacaauuaauuaagagugaaacguaauuguacaagcaguuggucacccaccauagggcaugaucaacaccgcaaccuuuccuuuuucccccagugauucugaaaaaccccucuucccuucagcuugcuuagauguuccaaauuuaguaagcuuaaggcggccuacagaagaaaaagaaaaaaaaggccacaaaaguucccucucacuuucaguaaauaaaauaaaagcagcaacagaaauaaagaaauaaaugaaauucaaaaugaaauaaauauuguguugugcagcauuaaaaaaucaauaaaaauuaaaaaugagcaagaucuaaaaaaaaaaaaaaaaaaaaaaaaaaaaaaaaaaaaaaaaaaaaaaaaaaaaaaaaaaaaaaaaugcaucccccccccccccccccccccccccccccccaaaggcucuuuucagagccaccagaauu

SEQ ID NO: 8188 - RNA, 2139 nt, Artificial Sequence
  mRNA product Design g-3 comprising derived and/or modified sequence from HRSV(A2)__F-del_DSCav1_mut8 (opt6)
gggagaguccgcucagccagguugcagaagcggcuuagcguguguccuaaucuucucucugcguguagguaggccugugccgcaaacaagcuuaccauggaacuacucauauugaaagccaacgcaaucacaacaauacuaaccgccguaacauuuugcuucgcgucaggccaaaauauaacagaagaauuuuaccaaucaacaugcuccgccguaucaaaaggauaccuaggugcauuacgaaccgguugguacacaucaguaaucacaauagaacuuuccaacauuaaagaaauaaaaugcaauggcacagacgcaaaagucaaacuaauaaaacaagaacuagacaaauauaaaaacgccgucacagacuuacaacuauuaaugcaaagcacaccagcaacaggauccggaucagcaauagcaucaggaguagccgucuguaaaguacuacaccuagaaggcgaaguuaauaaaauuaaaucagcuuuauuaucaaccaacaaagcaguaguaucacuauccggaugcggagucuccguccuaacauucaaaguacuagaccucaagaauuacauagauaaacaacuacuaccaauacucaacaaacaaucauguucaauaccaaacaucgaaaccgucauagaauuucaacaaaaaaauaauagacucuuagaaauaacacgagaauuuagcguaaacgcaggagucacaaccccugucucaacauacaugcuaaccaauuccgaauuauuaucacucauaaaugacaugccaauaacuaaugaccaaaaaaaacuuaugucaaacaacguacaaauaguaagacaacaaucauauucaauaaugugcauaaucaaagaagaaguuuuagcauauguaguacaacuaccacuauauggcgucauagacacaccaugcuggaaauuacacacaucaccucuaugcacaacaaacacaaaagaaggaagcaacauuugccuaaccagaaccgauagaggaugguacugcgauaacgcaggcucaguaucauucuucccucaagccgaaacuugcaaaguccaaucaaauagagucuucugcgauacaaugaacuccuuaacuuuaccaucagaaguaaaucuaugcaacguagauaucuuuaauccaaaauacgauugcaaaaucaugacaucaaaaacagauguaucaucuaguguaauuaccucccuaggagcaauaguaagcugcuacggaaaaacaaaaugcaccgccucuaacaaaugucguggaauaauaaaaacauucucaaacggaugcgauuauguaucaaauaaaggugucgacaccguaucaguaggcaauacacuauacuauguaaauaaacaagaaggacaaucacucuacgucaaaggugaaccaauaauaaacuucuacgacccacuuguauucccaagcgacgaauuugacgcaucaauaagccaaguaaacgaaaaaauaaaccaaucacuagcauucaucagaaaaucagacgaacuacuccacaauguaaaugcaggaaaaucaacaaccaauaucaugauaacaaccauaauaauagucauaauaguaauacuauuaucccucauagccguuggacuacuccuauauuguaaagcacgauaaggacuagugaagggaacacccaaauuuaauucagccuuaagcacaauuaauuaagagugaaacguaauuguacaagcaguuggucacccaccauagggcaugaucaacaccgcaaccuuuccuuuuucccccagugauucugaaaaaccccucuucccuucagcuugcuuagauguuccaaauuuaguaagcuuaaggcggccuacagaagaaaaagaaaaaaaaggccacaaaaguucccucucacuuucaguaaauaaaauaaaagcagcaacagaaauaaagaaauaaaugaaauucaaaaugaaauaaauauuguguugugcagcauuaaaaaaucaauaaaaauuaaaaaugagcaagaucuaaaaaaaaaaaaaaaaaaaaaaaaaaaaaaaaaaaaaaaaaaaaaaaaaaaaaaaaaaaaaaaaugcaucccccccccccccccccccccccccccccccaaaggcucuuuucagagccaccagaauu

SEQ ID NO: 8189 - RNA, 2139 nt, Artificial Sequence
  mRNA product Design g-3 comprising derived and/or modified sequence from HRSV(A2)__F-del_DSCav1_mut8 (opt11)
gggagaguccgcucagccagguugcagaagcggcuuagcguguguccuaaucuucucucugcguguagguaggccugugccgcaaacaagcuuaccauggaacuccucauccucaaagccaacgccaucaccaccauacucaccgcaguaaccuucugcuucgcauccggccaaaacaucacagaagaguucuaccagaguaccugcuccgccgucuccaaaggcuaccuuggcgcccuccguaccgggugguacacauccgucaucacaaucgaacucuccaacaucaaagaaauaaagugcaacggcacagacgccaaaguaaaacugauaaagcaagaacucgacaaauacaaaaacgccguaaccgaccuccagcuacuaaugcaauccacucccgccaccggcagcggauccgccaucgccuccggaguagccgucuguaaagucuuacaccucgaaggcgaagugaacaaaaucaaauccgcccuacucucaaccaacaaagccguaguaucacucuccgggugcggcguuucagugcuaacguucaaaguccuugaccucaaaaacuacaucgacaaacaacuccuccccauccuaaauaaacaauccugcuccauacccaacaucgagacugucaucgaguuccagcagaaaaacaaccgacuccucgaaaucacacgcgaguucucugucaacgccggcgucacaacccccgucuccacauacaugcucaccaacagcgaacuccucucccuaaucaaugacaugcccaucaccaacgaccaaaagaaacucaugucaaacaacguccaaaucguccgccaacaauccuacagcaucaugugcaucaucaaagaagaaguucucgcauacguaguacaacucccccucuacggagugaucgacacccccugcuggaaacuacacaccagcccgcuuugcaccacaaacaccaaggaaggcuccaacaucugccucacucgaaccgaccgcggcugguacugcgacaacgcaggcuccgucaguuucuuuccccaagcagaaacaugcaaaguccaauccaaccgaguauucugcgacaccaugaacucccucacccuaccauccgaaguuaaccuaugcaacguggacaucuucaaccccaaguacgacugcaaaauuaugaccuccaaaaccgacguauccuccagcgucaucaccagccucggagcaauagucuccugcuacggcaagaccaagugcaccgcuuccaacaagugucgcggaaucaucaaaaccuucucaaacggcugcgacuacgucuccaacaaaggcgucgacaccguauccguaggaaacacccuauacuacgucaacaaacaagaaggacaaucccucuaugucaaaggcgaacccaucaucaauuucuacgacccccuagucuucccuuccgacgaguucgacgcguccaucagccaagucaaugaaaagaucaaccagagccuggcauucauccgcaaauccgacgaacuccuccacaacgucaacgcgggaaaauccacgacaaacaucaugaucaccaccaucaucaucgucaucauagucauucuccuuucucucaucgccgugggacuacuucucuacugcaaagcccgauaaggacuagugaagggaacacccaaauuuaauucagccuuaagcacaauuaauuaagagugaaacguaauuguacaagcaguuggucacccaccauagggcaugaucaacaccgcaaccuuuccuuuuucccccagugauucugaaaaaccccucuucccuucagcuugcuuagauguuccaaauuuaguaagcuuaaggcggccuacagaagaaaaagaaaaaaaaggccacaaaaguucccucucacuuucaguaaauaaaauaaaagcagcaacagaaauaaagaaauaaaugaaauucaaaaugaaauaaauauuguguugugcagcauuaaaaaaucaauaaaaauuaaaaaugagcaagaucuaaaaaaaaaaaaaaaaaaaaaaaaaaaaaaaaaaaaaaaaaaaaaaaaaaaaaaaaaaaaaaaaugcaucccccccccccccccccccccccccccccccaaaggcucuuuucagagccaccagaauu

SEQ ID NO: 8190 - RNA, 1934 nt, Artificial Sequence
  mRNA product Design g-4 comprising derived and/or modified sequence from HRSV(A2)__F-del_DSCav1_mut8 (opt1)
gggagacuccugucgggcggaaguaggaggaguagaguuuaaaaacaguacucuuuuuccgguucgggacguaguugaagcaacgacaagccggauaaccgcucuugagacaggaagcuuaccauggagcugcucauccugaaggccaacgccaucaccaccauccugacggcggugaccuucugcuucgccagcggccagaacaucaccgaggaguucuaccaguccacgugcagcgccgucuccaagggguaccucggcgcccugcggaccggcugguacaccuccgugaucaccaucgagcugagcaacaucaaggagaucaagugcaacgggaccgacgccaaggugaagcucaucaagcaggagcuggacaaguacaagaacgcggucacggaccugcagcuccugaugcaguccaccccggcaaccggcuccggcuccgccaucgcgagcggcgucgccgugugcaaggugcugcaccucgagggggaggucaacaagaucaagagcgcccugcuguccaccaacaaggccguggugagccucuccggcugcggcgucagcgugcugaccuucaaggugcuggaccucaagaacuacaucgacaagcagcugcugcccauccugaacaagcagagcugcuccauccccaacaucgagacggugaucgaguuccagcagaagaacaaccggcuccuggagaucacccgcgaguucagcgugaacgccggggucaccacccccguguccacguacaugcugaccaacagcgagcuccugucccugaucaacgacaugccgaucaccaacgaccagaagaagcucaugagcaacaacgugcagaucguccggcagcaguccuacagcaucaugugcaucaucaaggaggaggugcuggcguacgugguccagcugccccucuacggcgugaucgacacccccugcuggaagcugcacacgagcccccugugcaccaccaacaccaaggagggguccaacaucugccucacgcgcaccgaccggggcugguacugcgacaacgccggcagcgucuccuucuucccgcaggccgagaccugcaaggugcagagcaaccgcguguucugcgacaccaugaacucccugacgcugcccagcgagguaaaccucugcaacgucgacaucuucaaccccaaguacgacugcaagaucaugaccuccaagaccgacgugagcuccagcgugaucaccucccugggggccaucgucagcugcuacggcaagacgaagugcaccgccagcaacaagugccgggggaucaucaagaccuucuccaacggcugcgacuacgugagcaacaagggcguggacaccguguccgucgggaacacccuguacuacgugaacaagcaggagggccagagccucuacgugaagggggagcccaucaucaacuucuacgacccgcuggucuuccccuccgacgaguucgacgcgagcaucucccaggugaacgagaagaucaaccagagccuggccuucauccgcaaguccgacgagcugcuccacaacgugaacgccggcaagagcacgaccaacaucaugaucaccaccaucaucaucgucaucaucgugauccugcugucccucaucgccguggggcugcugcucuacugcaaggcccggugaggacuaguaauaaggaaacuguaugaaugucugugggcaggaagugaagagauccuucuguaaagguuuuuggaauuaugucugcugaauaauaaacuuuuuugaaauaauaaaucugguagaaaaaugagaucuaaaaaaaaaaaaaaaaaaaaaaaaaaaaaaaaaaaaaaaaaaaaaaaaaaaaaaaaaaaaaaaaugcaucccccccccccccccccccccccccccccccaaaggcucuuuucagagccaccagaauu

SEQ ID NO: 8191 - RNA, 1934 nt, Artificial Sequence
  mRNA product Design g-4 comprising derived and/or modified sequence from HRSV(A2)__F-del_DSCav1_mut8 (opt1)
gggagacuccugucgggcggaaguaggaggaguagaguuuaaaaacaguacucuuuuuccgguucgggacguaguugaagcaacgacaagccggauaaccgcucuugagacaggaagcuuaccauggagcugcucauccugaaggccaacgccaucaccaccauccugacggcggugaccuucugcuucgccagcggccagaacaucaccgaggaguucuaccaguccacgugcagcgccgucuccaagggguaccucggcgcccugcgcaccgggugguacaccagcgugaucaccaucgagcuguccaacaucaaggagaucaagugcaacggcaccgacgccaaggugaagcucaucaagcaggagcuggacaaguacaagaacgcggucacggaccugcagcuccugaugcagagcacccccgccaccggguccggcagcgccaucgccuccggcguggcggugugcaagguccugcaccucgagggggaggugaacaagaucaagagcgcccugcuguccaccaacaaggccguggucagccucuccggcugcggggugagcgugcugacguucaagguccuggaccucaagaacuacaucgacaagcagcugcugccgauccucaacaagcaguccugcagcauccccaacaucgagaccgugaucgaguuccagcagaagaacaaccggcugcuggagaucacccgcgaguucuccgugaacgccggcgucaccacgcccgugagcaccuacaugcucaccaacuccgagcugcugagccucaucaacgacaugcccaucaccaacgaccagaagaagcugaugagcaacaacgugcagaucguccggcagcaguccuacagcaucaugugcaucaucaaggaggaggugcuggccuacgugguccagcucccgcuguacggggugaucgacacgcccugcuggaagcugcacaccagcccccucugcaccaccaacacgaaggagggcuccaacaucugccugacccgcaccgaccggggcugguacugcgacaacgcgggguccgugagcuucuucccccaggccgagaccugcaagguccaguccaaccgcguguucugcgacacgaugaacagccugacccucccguccgaggucaaccugugcaacguggacaucuucaaccccaaguacgacugcaagaucaugaccagcaagaccgacguguccagcuccgucaucacgagccugggcgccaucguguccugcuacgggaagaccaagugcaccgccagcaacaagugccggggcaucaucaagaccuucuccaacggcugcgacuacgugagcaacaagggggucgacacgguguccgugggcaacacccucuacuacgucaacaagcaggaggggcagagccuguacgugaagggcgagcccaucaucaacuucuacgacccccugguguucccgagcgacgaguucgacgccuccaucagccaggucaacgagaagaucaaccagucccucgcguucauccgcaagagcgacgagcugcugcacaacgugaacgccgggaaguccaccaccaacaucaugaucaccacgaucaucaucgugaucaucgucauccuccugagccugaucgccgugggccuccugcuguacugcaaggcccggugaggacuaguaauaaggaaacuguaugaaugucugugggcaggaagugaagagauccuucuguaaagguuuuuggaauuaugucugcugaauaauaaacuuuuuugaaauaauaaaucugguagaaaaaugagaucuaaaaaaaaaaaaaaaaaaaaaaaaaaaaaaaaaaaaaaaaaaaaaaaaaaaaaaaaaaaaaaaaugcaucccccccccccccccccccccccccccccccaaaggcucuuuucagagccaccagaauu

SEQ ID NO: 8192 - RNA, 1934 nt, Artificial Sequence
  mRNA product Design g-4 comprising derived and/or modified sequence from HRSV(A2)__F-del_DSCav1_mut8 (opt2)
gggagacuccugucgggcggaaguaggaggaguagaguuuaaaaacaguacucuuuuuccgguucgggacguaguugaagcaacgacaagccggauaaccgcucuugagacaggaagcuuaccauggagcuccucauccucaaggccaacgccaucaccaccauccucaccgccgucaccuucugcuucgccuccggccagaacaucaccgaggaguucuaccaguccaccugcuccgccgucuccaagggcuaccucggcgcccuccgcaccggcugguacaccuccgucaucaccaucgagcucuccaacaucaaggagaucaagugcaacggcaccgacgccaaggucaagcucaucaagcaggagcucgacaaguacaagaacgccgucaccgaccuccagcuccucaugcaguccacccccgccaccggcuccggcuccgccaucgccuccggcgucgccgucugcaagguccuccaccucgagggcgaggucaacaagaucaaguccgcccuccucuccaccaacaaggccgucgucucccucuccggcugcggcgucuccguccucaccuucaagguccucgaccucaagaacuacaucgacaagcagcuccuccccauccucaacaagcaguccugcuccauccccaacaucgagaccgucaucgaguuccagcagaagaacaaccgccuccucgagaucacccgcgaguucuccgucaacgccggcgucaccacccccgucuccaccuacaugcucaccaacuccgagcuccucucccucaucaacgacaugcccaucaccaacgaccagaagaagcucauguccaacaacguccagaucguccgccagcaguccuacuccaucaugugcaucaucaaggaggagguccucgccuacgucguccagcucccccucuacggcgucaucgacacccccugcuggaagcuccacaccuccccccucugcaccaccaacaccaaggagggcuccaacaucugccucacccgcaccgaccgcggcugguacugcgacaacgccggcuccgucuccuucuucccccaggccgagaccugcaagguccaguccaaccgcgucuucugcgacaccaugaacucccucacccuccccuccgaggucaaccucugcaacgucgacaucuucaaccccaaguacgacugcaagaucaugaccuccaagaccgacgucuccuccuccgucaucaccucccucggcgccaucgucuccugcuacggcaagaccaagugcaccgccuccaacaagugccgcggcaucaucaagaccuucuccaacggcugcgacuacgucuccaacaagggcgucgacaccgucuccgucggcaacacccucuacuacgucaacaagcaggagggccagucccucuacgucaagggcgagcccaucaucaacuucuacgacccccucgucuuccccuccgacgaguucgacgccuccaucucccaggucaacgagaagaucaaccagucccucgccuucauccgcaaguccgacgagcuccuccacaacgucaacgccggcaaguccaccaccaacaucaugaucaccaccaucaucaucgucaucaucgucauccuccucucccucaucgccgucggccuccuccucuacugcaaggcccgcugaggacuaguaauaaggaaacuguaugaaugucugugggcaggaagugaagagauccuucuguaaagguuuuuggaauuaugucugcugaauaauaaacuuuuuugaaauaauaaaucugguagaaaaaugagaucuaaaaaaaaaaaaaaaaaaaaaaaaaaaaaaaaaaaaaaaaaaaaaaaaaaaaaaaaaaaaaaaaugcaucccccccccccccccccccccccccccccccaaaggcucuuuucagagccaccagaauu

SEQ ID NO: 8193 - RNA, 1934 nt, Artificial Sequence
  mRNA product Design g-4 comprising derived and/or modified sequence from HRSV(A2)__F-del_DSCav1_mut8 (opt3)
gggagacuccugucgggcggaaguaggaggaguagaguuuaaaaacaguacucuuuuuccgguucgggacguaguugaagcaacgacaagccggauaaccgcucuugagacaggaagcuuaccauggagcugcucauccuuaaggccaacgcuauuaccacaauacugacugcagugacguucugcuuugccagcggccagaauaucaccgaagaguucuaccaauccacauguucugcggucucaaaaggguauuugggagcuuuaagaacugguugguacaccaguguuauuacaaucgaacugagcaacauuaaggagaucaaaugcaauggcaccgacgccaaggugaaacuaauaaagcaggaacucgauaaguauaaaaacgcaguaacugaccugcagcuucugaugcaguccacacccgccaccgggucuggaucggcuaucgcaucaggcguggccgucuguaagguguugcaccucgagggugagguuaauaaaauuaagagcgcucugcugaguacgaacaaagccguggucucccucucugggugcggagugagcguauuaacuuuuaagguucuggaucuuaagaauuacaucgacaaacaauugcugccuauucuaaacaagcaguccuguucaaucccaaauauagaaaccgugauugaguuccagcagaaaaacaauaggcuccuggaaaucacacgggaguuuagugucaacgcgggcgugacuaccccggugagcacauauaugcuuaccaauucugagcuguugucccucauuaacgauaugcccaucacgaaugaccaaaagaaacugaugucaaacaacguccagaucguucgccagcagagcuacaguauuaugugcauaaucaaggaagagguguuagcauauguagugcaacugccucucuacggcgucauugauacuccauguuggaaacuucauacaucuccccugugcaccacuaauacaaaggaaggguccaacaucuguuugacccgaacggaccguggaugguacugcgauaaugccgguagcgugucguucuuuccucaggcugagaccuguaagguucagucuaacagaguguucugcgacacaaugaacucccuaacucugccaucagaagucaaucucugcaauguggauauauuuaaccccaaauaugacuguaagauuaugaccaguaaaacagauguaagcuccucuguuaucacuagccugggcgccaucgugucaugcuacgggaagaccaaauguacagcaaguaauaagugcaggggaauuaucaagaccuucuccaacggcugugacuaugucagcaauaaagguguggacacugucucuguggggaacacgcuuuacuauguuaauaagcaagagggacagucacuguacgugaaaggcgagccuauuauaaacuuuuaugauccauugguauucccgagugacgaauuugaugcuagcaucucccaggucaaugagaagauuaaccagucucucgccuucauccggaaaucggacgaacuguuacacaacgugaaugcgggcaagagcacaaccaacaucaugauuacuaccauaaucauuguuaucauugugauccugcuaucccucauagccgucgggcugcuuuuguacugcaaggcacgcugaggacuaguaauaaggaaacuguaugaaugucugugggcaggaagugaagagauccuucuguaaagguuuuuggaauuaugucugcugaauaauaaacuuuuuugaaauaauaaaucugguagaaaaaugagaucuaaaaaaaaaaaaaaaaaaaaaaaaaaaaaaaaaaaaaaaaaaaaaaaaaaaaaaaaaaaaaaaaugcaucccccccccccccccccccccccccccccccaaaggcucuuuucagagccaccagaauu

SEQ ID NO: 8194 - RNA, 1934 nt, Artificial Sequence
  mRNA product Design g-4 comprising derived and/or modified sequence from HRSV(A2)__F-del_DSCav1_mut8 (opt4)
gggagacuccugucgggcggaaguaggaggaguagaguuuaaaaacaguacucuuuuuccgguucgggacguaguugaagcaacgacaagccggauaaccgcucuugagacaggaagcuuaccauggagcugcugauccugaaggccaacgccaucaccaccauccugaccgccgugaccuucugcuucgccagcggccagaacaucaccgaggaguucuaccagagcaccugcagcgccgugagcaagggcuaccugggcgcccugagaaccggcugguacaccagcgugaucaccaucgagcugagcaacaucaaggagaucaagugcaacggcaccgacgccaaggugaagcugaucaagcaggagcuggacaaguacaagaacgccgugaccgaccugcagcugcugaugcagagcacccccgccaccggcagcggcagcgccaucgccagcggcguggccgugugcaaggugcugcaccuggagggcgaggugaacaagaucaagagcgcccugcugagcaccaacaaggccguggugagccugagcggcugcggcgugagcgugcugaccuucaaggugcuggaccugaagaacuacaucgacaagcagcugcugcccauccugaacaagcagagcugcagcauccccaacaucgagaccgugaucgaguuccagcagaagaacaacagacugcuggagaucaccagagaguucagcgugaacgccggcgugaccacccccgugagcaccuacaugcugaccaacagcgagcugcugagccugaucaacgacaugcccaucaccaacgaccagaagaagcugaugagcaacaacgugcagaucgugagacagcagagcuacagcaucaugugcaucaucaaggaggaggugcuggccuacguggugcagcugccccuguacggcgugaucgacacccccugcuggaagcugcacaccagcccccugugcaccaccaacaccaaggagggcagcaacaucugccugaccagaaccgacagaggcugguacugcgacaacgccggcagcgugagcuucuucccccaggccgagaccugcaaggugcagagcaacagaguguucugcgacaccaugaacagccugacccugcccagcgaggugaaccugugcaacguggacaucuucaaccccaaguacgacugcaagaucaugaccagcaagaccgacgugagcagcagcgugaucaccagccugggcgccaucgugagcugcuacggcaagaccaagugcaccgccagcaacaagugcagaggcaucaucaagaccuucagcaacggcugcgacuacgugagcaacaagggcguggacaccgugagcgugggcaacacccuguacuacgugaacaagcaggagggccagagccuguacgugaagggcgagcccaucaucaacuucuacgacccccugguguuccccagcgacgaguucgacgccagcaucagccaggugaacgagaagaucaaccagagccuggccuucaucagaaagagcgacgagcugcugcacaacgugaacgccggcaagagcaccaccaacaucaugaucaccaccaucaucaucgugaucaucgugauccugcugagccugaucgccgugggccugcugcuguacugcaaggccagaugaggacuaguaauaaggaaacuguaugaaugucugugggcaggaagugaagagauccuucuguaaagguuuuuggaauuaugucugcugaauaauaaacuuuuuugaaauaauaaaucugguagaaaaaugagaucuaaaaaaaaaaaaaaaaaaaaaaaaaaaaaaaaaaaaaaaaaaaaaaaaaaaaaaaaaaaaaaaaugcaucccccccccccccccccccccccccccccccaaaggcucuuuucagagccaccagaauu

SEQ ID NO: 8195 - RNA, 1934 nt, Artificial Sequence
  mRNA product Design g-4 comprising derived and/or modified sequence from HRSV(A2)__F-del_DSCav1_mut8 (opt5)
gggagacuccugucgggcggaaguaggaggaguagaguuuaaaaacaguacucuuuuuccgguucgggacguaguugaagcaacgacaagccggauaaccgcucuugagacaggaagcuuaccauggagcugcucauccugaaggccaacgcuauuaccacaauccuuacggccgugaccuucugcuuugcgagcggccagaauauuacagaagaguucuaccaauccaccuguucugcugucagcaaaggguaucugggagcccucagaacaggcugguacaccuccguuaucacaauugaacugucuaacaucaaggagaucaaaugcaaugggaccgacgccaaggugaaacuuauuaagcaggaacuggauaaguauaaaaacgcugugacggaccuccagcugcugaugcagagcacccccgccacaggauccggcucugcuaucgccagcggggucgcgguguguaagguucuccaccuggagggagaggugaauaaaauuaaguccgcccuucugagcaccaacaaagcugucgugucucucuccggcugcggcguuagcgugcugacauuuaagguccuugaucugaagaauuacaucgacaaacaacuccugccuauucugaacaagcagucuuguuccaucccgaauauugaaaccgugaucgaguuccagcagaaaaacaaucggcuccuggaaaucacgcgcgaguuuagcgugaacgccggggucacaacccccguuucuacauauaugcuuaccaauuccgagcugcucagccugauuaacgauaugccuaucaccaaugaccaaaagaaacuuauguccaacaacgugcagauugugagacagcagucuuacagcaucaugugcauuaucaaggaagagguccuggcuuaugugguucaacucccccuguacggagugaucgauacaccuuguuggaaacugcauacgagcccccucugcaccacaaauaccaaggaaggcagcaacauuugucugacacggaccgaccgcgggugguacugcgauaaugccggaucugucuccuucuuuccucaggcggagacguguaaggugcagagcaacagaguuuucugcgacacaaugaacucucuuacccugccgagcgaagugaaucucugcaaugucgauaucuuuaaccccaaauaugacuguaagauuaugaccuccaaaacagaugugucuagcuccgucaucaccagccugggcgccauugugucuugcuacgggaagacaaaauguacggcuuccaauaagugccggggaaucaucaagaccuucagcaacggcugugacuauguuucuaauaaaggcguggacacagucuccguggggaacacccuuuacuauguuaauaagcaagagggacagagccuguacgugaaaggcgagccuauuaucaacuuuuaugauccccucgucuucccuuccgacgaauuugaugccucuauuagccaggugaaugagaagaucaaccagucccuggcuuucauucgcaaaucugacgaacugcuccacaacgugaaugccgggaaguccacaaccaacaucaugauuacgaccaucaucauuguuaucauugucauccugcuuucccugauugccgugggacuccugcuguacugcaaggcuagaugaggacuaguaauaaggaaacuguaugaaugucugugggcaggaagugaagagauccuucuguaaagguuuuuggaauuaugucugcugaauaauaaacuuuuuugaaauaauaaaucugguagaaaaaugagaucuaaaaaaaaaaaaaaaaaaaaaaaaaaaaaaaaaaaaaaaaaaaaaaaaaaaaaaaaaaaaaaaaugcaucccccccccccccccccccccccccccccccaaaggcucuuuucagagccaccagaauu

SEQ ID NO: 8196 - RNA, 1934 nt, Artificial Sequence
  mRNA product Design g-4 comprising derived and/or modified sequence from HRSV(A2)__F-del_DSCav1_mut8 (opt6)
gggagacuccugucgggcggaaguaggaggaguagaguuuaaaaacaguacucuuuuuccgguucgggacguaguugaagcaacgacaagccggauaaccgcucuugagacaggaagcuuaccauggaacuacucauauugaaagccaacgcaaucacaacaauacuaaccgccguaacauuuugcuucgcgucaggccaaaauauaacagaagaauuuuaccaaucaacaugcuccgccguaucaaaaggauaccuaggugcauuacgaaccgguugguacacaucaguaaucacaauagaacuuuccaacauuaaagaaauaaaaugcaauggcacagacgcaaaagucaaacuaauaaaacaagaacuagacaaauauaaaaacgccgucacagacuuacaacuauuaaugcaaagcacaccagcaacaggauccggaucagcaauagcaucaggaguagccgucuguaaaguacuacaccuagaaggcgaaguuaauaaaauuaaaucagcuuuauuaucaaccaacaaagcaguaguaucacuauccggaugcggagucuccguccuaacauucaaaguacuagaccucaagaauuacauagauaaacaacuacuaccaauacucaacaaacaaucauguucaauaccaaacaucgaaaccgucauagaauuucaacaaaaaaauaauagacucuuagaaauaacacgagaauuuagcguaaacgcaggagucacaaccccugucucaacauacaugcuaaccaauuccgaauuauuaucacucauaaaugacaugccaauaacuaaugaccaaaaaaaacuuaugucaaacaacguacaaauaguaagacaacaaucauauucaauaaugugcauaaucaaagaagaaguuuuagcauauguaguacaacuaccacuauauggcgucauagacacaccaugcuggaaauuacacacaucaccucuaugcacaacaaacacaaaagaaggaagcaacauuugccuaaccagaaccgauagaggaugguacugcgauaacgcaggcucaguaucauucuucccucaagccgaaacuugcaaaguccaaucaaauagagucuucugcgauacaaugaacuccuuaacuuuaccaucagaaguaaaucuaugcaacguagauaucuuuaauccaaaauacgauugcaaaaucaugacaucaaaaacagauguaucaucuaguguaauuaccucccuaggagcaauaguaagcugcuacggaaaaacaaaaugcaccgccucuaacaaaugucguggaauaauaaaaacauucucaaacggaugcgauuauguaucaaauaaaggugucgacaccguaucaguaggcaauacacuauacuauguaaauaaacaagaaggacaaucacucuacgucaaaggugaaccaauaauaaacuucuacgacccacuuguauucccaagcgacgaauuugacgcaucaauaagccaaguaaacgaaaaaauaaaccaaucacuagcauucaucagaaaaucagacgaacuacuccacaauguaaaugcaggaaaaucaacaaccaauaucaugauaacaaccauaauaauagucauaauaguaauacuauuaucccucauagccguuggacuacuccuauauuguaaagcacgauaaggacuaguaauaaggaaacuguaugaaugucugugggcaggaagugaagagauccuucuguaaagguuuuuggaauuaugucugcugaauaauaaacuuuuuugaaauaauaaaucugguagaaaaaugagaucuaaaaaaaaaaaaaaaaaaaaaaaaaaaaaaaaaaaaaaaaaaaaaaaaaaaaaaaaaaaaaaaaugcaucccccccccccccccccccccccccccccccaaaggcucuuuucagagccaccagaauu

SEQ ID NO: 8197 - RNA, 1934 nt, Artificial Sequence
  mRNA product Design g-4 comprising derived and/or modified sequence from HRSV(A2)__F-del_DSCav1_mut8 (opt11)
gggagacuccugucgggcggaaguaggaggaguagaguuuaaaaacaguacucuuuuuccgguucgggacguaguugaagcaacgacaagccggauaaccgcucuugagacaggaagcuuaccauggaacuccucauccucaaagccaacgccaucaccaccauacucaccgcaguaaccuucugcuucgcauccggccaaaacaucacagaagaguucuaccagaguaccugcuccgccgucuccaaaggcuaccuuggcgcccuccguaccgggugguacacauccgucaucacaaucgaacucuccaacaucaaagaaauaaagugcaacggcacagacgccaaaguaaaacugauaaagcaagaacucgacaaauacaaaaacgccguaaccgaccuccagcuacuaaugcaauccacucccgccaccggcagcggauccgccaucgccuccggaguagccgucuguaaagucuuacaccucgaaggcgaagugaacaaaaucaaauccgcccuacucucaaccaacaaagccguaguaucacucuccgggugcggcguuucagugcuaacguucaaaguccuugaccucaaaaacuacaucgacaaacaacuccuccccauccuaaauaaacaauccugcuccauacccaacaucgagacugucaucgaguuccagcagaaaaacaaccgacuccucgaaaucacacgcgaguucucugucaacgccggcgucacaacccccgucuccacauacaugcucaccaacagcgaacuccucucccuaaucaaugacaugcccaucaccaacgaccaaaagaaacucaugucaaacaacguccaaaucguccgccaacaauccuacagcaucaugugcaucaucaaagaagaaguucucgcauacguaguacaacucccccucuacggagugaucgacacccccugcuggaaacuacacaccagcccgcuuugcaccacaaacaccaaggaaggcuccaacaucugccucacucgaaccgaccgcggcugguacugcgacaacgcaggcuccgucaguuucuuuccccaagcagaaacaugcaaaguccaauccaaccgaguauucugcgacaccaugaacucccucacccuaccauccgaaguuaaccuaugcaacguggacaucuucaaccccaaguacgacugcaaaauuaugaccuccaaaaccgacguauccuccagcgucaucaccagccucggagcaauagucuccugcuacggcaagaccaagugcaccgcuuccaacaagugucgcggaaucaucaaaaccuucucaaacggcugcgacuacgucuccaacaaaggcgucgacaccguauccguaggaaacacccuauacuacgucaacaaacaagaaggacaaucccucuaugucaaaggcgaacccaucaucaauuucuacgacccccuagucuucccuuccgacgaguucgacgcguccaucagccaagucaaugaaaagaucaaccagagccuggcauucauccgcaaauccgacgaacuccuccacaacgucaacgcgggaaaauccacgacaaacaucaugaucaccaccaucaucaucgucaucauagucauucuccuuucucucaucgccgugggacuacuucucuacugcaaagcccgauaaggacuaguaauaaggaaacuguaugaaugucugugggcaggaagugaagagauccuucuguaaagguuuuuggaauuaugucugcugaauaauaaacuuuuuugaaauaauaaaucugguagaaaaaugagaucuaaaaaaaaaaaaaaaaaaaaaaaaaaaaaaaaaaaaaaaaaaaaaaaaaaaaaaaaaaaaaaaaugcaucccccccccccccccccccccccccccccccaaaggcucuuuucagagccaccagaauu

SEQ ID NO: 8198 - RNA, 1910 nt, Artificial Sequence
  mRNA product Design g-5 comprising derived and/or modified sequence from HRSV(A2)__F-del_DSCav1_mut8 (opt1)
gggagacccgugacccggaaguuguacggcuacgcgacuuucccucccacaaacccucgcgcccuuccuuuccuacuugggcccggcagaaagcuuaccauggagcugcucauccugaaggccaacgccaucaccaccauccugacggcggugaccuucugcuucgccagcggccagaacaucaccgaggaguucuaccaguccacgugcagcgccgucuccaagggguaccucggcgcccugcggaccggcugguacaccuccgugaucaccaucgagcugagcaacaucaaggagaucaagugcaacgggaccgacgccaaggugaagcucaucaagcaggagcuggacaaguacaagaacgcggucacggaccugcagcuccugaugcaguccaccccggcaaccggcuccggcuccgccaucgcgagcggcgucgccgugugcaaggugcugcaccucgagggggaggucaacaagaucaagagcgcccugcuguccaccaacaaggccguggugagccucuccggcugcggcgucagcgugcugaccuucaaggugcuggaccucaagaacuacaucgacaagcagcugcugcccauccugaacaagcagagcugcuccauccccaacaucgagacggugaucgaguuccagcagaagaacaaccggcuccuggagaucacccgcgaguucagcgugaacgccggggucaccacccccguguccacguacaugcugaccaacagcgagcuccugucccugaucaacgacaugccgaucaccaacgaccagaagaagcucaugagcaacaacgugcagaucguccggcagcaguccuacagcaucaugugcaucaucaaggaggaggugcuggcguacgugguccagcugccccucuacggcgugaucgacacccccugcuggaagcugcacacgagcccccugugcaccaccaacaccaaggagggguccaacaucugccucacgcgcaccgaccggggcugguacugcgacaacgccggcagcgucuccuucuucccgcaggccgagaccugcaaggugcagagcaaccgcguguucugcgacaccaugaacucccugacgcugcccagcgagguaaaccucugcaacgucgacaucuucaaccccaaguacgacugcaagaucaugaccuccaagaccgacgugagcuccagcgugaucaccucccugggggccaucgucagcugcuacggcaagacgaagugcaccgccagcaacaagugccgggggaucaucaagaccuucuccaacggcugcgacuacgugagcaacaagggcguggacaccguguccgucgggaacacccuguacuacgugaacaagcaggagggccagagccucuacgugaagggggagcccaucaucaacuucuacgacccgcuggucuuccccuccgacgaguucgacgcgagcaucucccaggugaacgagaagaucaaccagagccuggccuucauccgcaaguccgacgagcugcuccacaacgugaacgccggcaagagcacgaccaacaucaugaucaccaccaucaucaucgucaucaucgugauccugcugucccucaucgccguggggcugcugcucuacugcaaggcccggugaggacuaguaauaaggaaacuguaugaaugucugugggcaggaagugaagagauccuucuguaaagguuuuuggaauuaugucugcugaauaauaaacuuuuuugaaauaauaaaucugguagaaaaaugagaucuaaaaaaaaaaaaaaaaaaaaaaaaaaaaaaaaaaaaaaaaaaaaaaaaaaaaaaaaaaaaaaaaugcaucccccccccccccccccccccccccccccccaaaggcucuuuucagagccaccagaauu

SEQ ID NO: 8199 - RNA, 1910 nt, Artificial Sequence
  mRNA product Design g-5 comprising derived and/or modified sequence from HRSV(A2)__F-del_DSCav1_mut8 (opt1)
gggagacccgugacccggaaguuguacggcuacgcgacuuucccucccacaaacccucgcgcccuuccuuuccuacuugggcccggcagaaagcuuaccauggagcugcucauccugaaggccaacgccaucaccaccauccugacggcggugaccuucugcuucgccagcggccagaacaucaccgaggaguucuaccaguccacgugcagcgccgucuccaagggguaccucggcgcccugcgcaccgggugguacaccagcgugaucaccaucgagcuguccaacaucaaggagaucaagugcaacggcaccgacgccaaggugaagcucaucaagcaggagcuggacaaguacaagaacgcggucacggaccugcagcuccugaugcagagcacccccgccaccggguccggcagcgccaucgccuccggcguggcggugugcaagguccugcaccucgagggggaggugaacaagaucaagagcgcccugcuguccaccaacaaggccguggucagccucuccggcugcggggugagcgugcugacguucaagguccuggaccucaagaacuacaucgacaagcagcugcugccgauccucaacaagcaguccugcagcauccccaacaucgagaccgugaucgaguuccagcagaagaacaaccggcugcuggagaucacccgcgaguucuccgugaacgccggcgucaccacgcccgugagcaccuacaugcucaccaacuccgagcugcugagccucaucaacgacaugcccaucaccaacgaccagaagaagcugaugagcaacaacgugcagaucguccggcagcaguccuacagcaucaugugcaucaucaaggaggaggugcuggccuacgugguccagcucccgcuguacggggugaucgacacgcccugcuggaagcugcacaccagcccccucugcaccaccaacacgaaggagggcuccaacaucugccugacccgcaccgaccggggcugguacugcgacaacgcgggguccgugagcuucuucccccaggccgagaccugcaagguccaguccaaccgcguguucugcgacacgaugaacagccugacccucccguccgaggucaaccugugcaacguggacaucuucaaccccaaguacgacugcaagaucaugaccagcaagaccgacguguccagcuccgucaucacgagccugggcgccaucguguccugcuacgggaagaccaagugcaccgccagcaacaagugccggggcaucaucaagaccuucuccaacggcugcgacuacgugagcaacaagggggucgacacgguguccgugggcaacacccucuacuacgucaacaagcaggaggggcagagccuguacgugaagggcgagcccaucaucaacuucuacgacccccugguguucccgagcgacgaguucgacgccuccaucagccaggucaacgagaagaucaaccagucccucgcguucauccgcaagagcgacgagcugcugcacaacgugaacgccgggaaguccaccaccaacaucaugaucaccacgaucaucaucgugaucaucgucauccuccugagccugaucgccgugggccuccugcuguacugcaaggcccggugaggacuaguaauaaggaaacuguaugaaugucugugggcaggaagugaagagauccuucuguaaagguuuuuggaauuaugucugcugaauaauaaacuuuuuugaaauaauaaaucugguagaaaaaugagaucuaaaaaaaaaaaaaaaaaaaaaaaaaaaaaaaaaaaaaaaaaaaaaaaaaaaaaaaaaaaaaaaaugcaucccccccccccccccccccccccccccccccaaaggcucuuuucagagccaccagaauu

SEQ ID NO: 8200 - RNA, 1910 nt, Artificial Sequence
  mRNA product Design g-5 comprising derived and/or modified sequence from HRSV(A2)__F-del_DSCav1_mut8 (opt2)
gggagacccgugacccggaaguuguacggcuacgcgacuuucccucccacaaacccucgcgcccuuccuuuccuacuugggcccggcagaaagcuuaccauggagcuccucauccucaaggccaacgccaucaccaccauccucaccgccgucaccuucugcuucgccuccggccagaacaucaccgaggaguucuaccaguccaccugcuccgccgucuccaagggcuaccucggcgcccuccgcaccggcugguacaccuccgucaucaccaucgagcucuccaacaucaaggagaucaagugcaacggcaccgacgccaaggucaagcucaucaagcaggagcucgacaaguacaagaacgccgucaccgaccuccagcuccucaugcaguccacccccgccaccggcuccggcuccgccaucgccuccggcgucgccgucugcaagguccuccaccucgagggcgaggucaacaagaucaaguccgcccuccucuccaccaacaaggccgucgucucccucuccggcugcggcgucuccguccucaccuucaagguccucgaccucaagaacuacaucgacaagcagcuccuccccauccucaacaagcaguccugcuccauccccaacaucgagaccgucaucgaguuccagcagaagaacaaccgccuccucgagaucacccgcgaguucuccgucaacgccggcgucaccacccccgucuccaccuacaugcucaccaacuccgagcuccucucccucaucaacgacaugcccaucaccaacgaccagaagaagcucauguccaacaacguccagaucguccgccagcaguccuacuccaucaugugcaucaucaaggaggagguccucgccuacgucguccagcucccccucuacggcgucaucgacacccccugcuggaagcuccacaccuccccccucugcaccaccaacaccaaggagggcuccaacaucugccucacccgcaccgaccgcggcugguacugcgacaacgccggcuccgucuccuucuucccccaggccgagaccugcaagguccaguccaaccgcgucuucugcgacaccaugaacucccucacccuccccuccgaggucaaccucugcaacgucgacaucuucaaccccaaguacgacugcaagaucaugaccuccaagaccgacgucuccuccuccgucaucaccucccucggcgccaucgucuccugcuacggcaagaccaagugcaccgccuccaacaagugccgcggcaucaucaagaccuucuccaacggcugcgacuacgucuccaacaagggcgucgacaccgucuccgucggcaacacccucuacuacgucaacaagcaggagggccagucccucuacgucaagggcgagcccaucaucaacuucuacgacccccucgucuuccccuccgacgaguucgacgccuccaucucccaggucaacgagaagaucaaccagucccucgccuucauccgcaaguccgacgagcuccuccacaacgucaacgccggcaaguccaccaccaacaucaugaucaccaccaucaucaucgucaucaucgucauccuccucucccucaucgccgucggccuccuccucuacugcaaggcccgcugaggacuaguaauaaggaaacuguaugaaugucugugggcaggaagugaagagauccuucuguaaagguuuuuggaauuaugucugcugaauaauaaacuuuuuugaaauaauaaaucugguagaaaaaugagaucuaaaaaaaaaaaaaaaaaaaaaaaaaaaaaaaaaaaaaaaaaaaaaaaaaaaaaaaaaaaaaaaaugcaucccccccccccccccccccccccccccccccaaaggcucuuuucagagccaccagaauu

SEQ ID NO: 8201 - RNA, 1910 nt, Artificial Sequence
  mRNA product Design g-5 comprising derived and/or modified sequence from HRSV(A2)__F-del_DSCav1_mut8 (opt3)
gggagacccgugacccggaaguuguacggcuacgcgacuuucccucccacaaacccucgcgcccuuccuuuccuacuugggcccggcagaaagcuuaccauggagcugcucauccuuaaggccaacgcuauuaccacaauacugacugcagugacguucugcuuugccagcggccagaauaucaccgaagaguucuaccaauccacauguucugcggucucaaaaggguauuugggagcuuuaagaacugguugguacaccaguguuauuacaaucgaacugagcaacauuaaggagaucaaaugcaauggcaccgacgccaaggugaaacuaauaaagcaggaacucgauaaguauaaaaacgcaguaacugaccugcagcuucugaugcaguccacacccgccaccgggucuggaucggcuaucgcaucaggcguggccgucuguaagguguugcaccucgagggugagguuaauaaaauuaagagcgcucugcugaguacgaacaaagccguggucucccucucugggugcggagugagcguauuaacuuuuaagguucuggaucuuaagaauuacaucgacaaacaauugcugccuauucuaaacaagcaguccuguucaaucccaaauauagaaaccgugauugaguuccagcagaaaaacaauaggcuccuggaaaucacacgggaguuuagugucaacgcgggcgugacuaccccggugagcacauauaugcuuaccaauucugagcuguugucccucauuaacgauaugcccaucacgaaugaccaaaagaaacugaugucaaacaacguccagaucguucgccagcagagcuacaguauuaugugcauaaucaaggaagagguguuagcauauguagugcaacugccucucuacggcgucauugauacuccauguuggaaacuucauacaucuccccugugcaccacuaauacaaaggaaggguccaacaucuguuugacccgaacggaccguggaugguacugcgauaaugccgguagcgugucguucuuuccucaggcugagaccuguaagguucagucuaacagaguguucugcgacacaaugaacucccuaacucugccaucagaagucaaucucugcaauguggauauauuuaaccccaaauaugacuguaagauuaugaccaguaaaacagauguaagcuccucuguuaucacuagccugggcgccaucgugucaugcuacgggaagaccaaauguacagcaaguaauaagugcaggggaauuaucaagaccuucuccaacggcugugacuaugucagcaauaaagguguggacacugucucuguggggaacacgcuuuacuauguuaauaagcaagagggacagucacuguacgugaaaggcgagccuauuauaaacuuuuaugauccauugguauucccgagugacgaauuugaugcuagcaucucccaggucaaugagaagauuaaccagucucucgccuucauccggaaaucggacgaacuguuacacaacgugaaugcgggcaagagcacaaccaacaucaugauuacuaccauaaucauuguuaucauugugauccugcuaucccucauagccgucgggcugcuuuuguacugcaaggcacgcugaggacuaguaauaaggaaacuguaugaaugucugugggcaggaagugaagagauccuucuguaaagguuuuuggaauuaugucugcugaauaauaaacuuuuuugaaauaauaaaucugguagaaaaaugagaucuaaaaaaaaaaaaaaaaaaaaaaaaaaaaaaaaaaaaaaaaaaaaaaaaaaaaaaaaaaaaaaaaugcaucccccccccccccccccccccccccccccccaaaggcucuuuucagagccaccagaauu

SEQ ID NO: 8202 - RNA, 1910 nt, Artificial Sequence
  mRNA product Design g-5 comprising derived and/or modified sequence from HRSV(A2)__F-del_DSCav1_mut8 (opt4)
gggagacccgugacccggaaguuguacggcuacgcgacuuucccucccacaaacccucgcgcccuuccuuuccuacuugggcccggcagaaagcuuaccauggagcugcugauccugaaggccaacgccaucaccaccauccugaccgccgugaccuucugcuucgccagcggccagaacaucaccgaggaguucuaccagagcaccugcagcgccgugagcaagggcuaccugggcgcccugagaaccggcugguacaccagcgugaucaccaucgagcugagcaacaucaaggagaucaagugcaacggcaccgacgccaaggugaagcugaucaagcaggagcuggacaaguacaagaacgccgugaccgaccugcagcugcugaugcagagcacccccgccaccggcagcggcagcgccaucgccagcggcguggccgugugcaaggugcugcaccuggagggcgaggugaacaagaucaagagcgcccugcugagcaccaacaaggccguggugagccugagcggcugcggcgugagcgugcugaccuucaaggugcuggaccugaagaacuacaucgacaagcagcugcugcccauccugaacaagcagagcugcagcauccccaacaucgagaccgugaucgaguuccagcagaagaacaacagacugcuggagaucaccagagaguucagcgugaacgccggcgugaccacccccgugagcaccuacaugcugaccaacagcgagcugcugagccugaucaacgacaugcccaucaccaacgaccagaagaagcugaugagcaacaacgugcagaucgugagacagcagagcuacagcaucaugugcaucaucaaggaggaggugcuggccuacguggugcagcugccccuguacggcgugaucgacacccccugcuggaagcugcacaccagcccccugugcaccaccaacaccaaggagggcagcaacaucugccugaccagaaccgacagaggcugguacugcgacaacgccggcagcgugagcuucuucccccaggccgagaccugcaaggugcagagcaacagaguguucugcgacaccaugaacagccugacccugcccagcgaggugaaccugugcaacguggacaucuucaaccccaaguacgacugcaagaucaugaccagcaagaccgacgugagcagcagcgugaucaccagccugggcgccaucgugagcugcuacggcaagaccaagugcaccgccagcaacaagugcagaggcaucaucaagaccuucagcaacggcugcgacuacgugagcaacaagggcguggacaccgugagcgugggcaacacccuguacuacgugaacaagcaggagggccagagccuguacgugaagggcgagcccaucaucaacuucuacgacccccugguguuccccagcgacgaguucgacgccagcaucagccaggugaacgagaagaucaaccagagccuggccuucaucagaaagagcgacgagcugcugcacaacgugaacgccggcaagagcaccaccaacaucaugaucaccaccaucaucaucgugaucaucgugauccugcugagccugaucgccgugggccugcugcuguacugcaaggccagaugaggacuaguaauaaggaaacuguaugaaugucugugggcaggaagugaagagauccuucuguaaagguuuuuggaauuaugucugcugaauaauaaacuuuuuugaaauaauaaaucugguagaaaaaugagaucuaaaaaaaaaaaaaaaaaaaaaaaaaaaaaaaaaaaaaaaaaaaaaaaaaaaaaaaaaaaaaaaaugcaucccccccccccccccccccccccccccccccaaaggcucuuuucagagccaccagaauu

SEQ ID NO: 8203 - RNA, 1910 nt, Artificial Sequence
  mRNA product Design g-5 comprising derived and/or modified sequence from HRSV(A2)__F-del_DSCav1_mut8 (opt5)
gggagacccgugacccggaaguuguacggcuacgcgacuuucccucccacaaacccucgcgcccuuccuuuccuacuugggcccggcagaaagcuuaccauggagcugcucauccugaaggccaacgcuauuaccacaauccuuacggccgugaccuucugcuuugcgagcggccagaauauuacagaagaguucuaccaauccaccuguucugcugucagcaaaggguaucugggagcccucagaacaggcugguacaccuccguuaucacaauugaacugucuaacaucaaggagaucaaaugcaaugggaccgacgccaaggugaaacuuauuaagcaggaacuggauaaguauaaaaacgcugugacggaccuccagcugcugaugcagagcacccccgccacaggauccggcucugcuaucgccagcggggucgcgguguguaagguucuccaccuggagggagaggugaauaaaauuaaguccgcccuucugagcaccaacaaagcugucgugucucucuccggcugcggcguuagcgugcugacauuuaagguccuugaucugaagaauuacaucgacaaacaacuccugccuauucugaacaagcagucuuguuccaucccgaauauugaaaccgugaucgaguuccagcagaaaaacaaucggcuccuggaaaucacgcgcgaguuuagcgugaacgccggggucacaacccccguuucuacauauaugcuuaccaauuccgagcugcucagccugauuaacgauaugccuaucaccaaugaccaaaagaaacuuauguccaacaacgugcagauugugagacagcagucuuacagcaucaugugcauuaucaaggaagagguccuggcuuaugugguucaacucccccuguacggagugaucgauacaccuuguuggaaacugcauacgagcccccucugcaccacaaauaccaaggaaggcagcaacauuugucugacacggaccgaccgcgggugguacugcgauaaugccggaucugucuccuucuuuccucaggcggagacguguaaggugcagagcaacagaguuuucugcgacacaaugaacucucuuacccugccgagcgaagugaaucucugcaaugucgauaucuuuaaccccaaauaugacuguaagauuaugaccuccaaaacagaugugucuagcuccgucaucaccagccugggcgccauugugucuugcuacgggaagacaaaauguacggcuuccaauaagugccggggaaucaucaagaccuucagcaacggcugugacuauguuucuaauaaaggcguggacacagucuccguggggaacacccuuuacuauguuaauaagcaagagggacagagccuguacgugaaaggcgagccuauuaucaacuuuuaugauccccucgucuucccuuccgacgaauuugaugccucuauuagccaggugaaugagaagaucaaccagucccuggcuuucauucgcaaaucugacgaacugcuccacaacgugaaugccgggaaguccacaaccaacaucaugauuacgaccaucaucauuguuaucauugucauccugcuuucccugauugccgugggacuccugcuguacugcaaggcuagaugaggacuaguaauaaggaaacuguaugaaugucugugggcaggaagugaagagauccuucuguaaagguuuuuggaauuaugucugcugaauaauaaacuuuuuugaaauaauaaaucugguagaaaaaugagaucuaaaaaaaaaaaaaaaaaaaaaaaaaaaaaaaaaaaaaaaaaaaaaaaaaaaaaaaaaaaaaaaaugcaucccccccccccccccccccccccccccccccaaaggcucuuuucagagccaccagaauu

SEQ ID NO: 8204 - RNA, 1910 nt, Artificial Sequence
  mRNA product Design g-5 comprising derived and/or modified sequence from HRSV(A2)__F-del_DSCav1_mut8 (opt6)
gggagacccgugacccggaaguuguacggcuacgcgacuuucccucccacaaacccucgcgcccuuccuuuccuacuugggcccggcagaaagcuuaccauggaacuacucauauugaaagccaacgcaaucacaacaauacuaaccgccguaacauuuugcuucgcgucaggccaaaauauaacagaagaauuuuaccaaucaacaugcuccgccguaucaaaaggauaccuaggugcauuacgaaccgguugguacacaucaguaaucacaauagaacuuuccaacauuaaagaaauaaaaugcaauggcacagacgcaaaagucaaacuaauaaaacaagaacuagacaaauauaaaaacgccgucacagacuuacaacuauuaaugcaaagcacaccagcaacaggauccggaucagcaauagcaucaggaguagccgucuguaaaguacuacaccuagaaggcgaaguuaauaaaauuaaaucagcuuuauuaucaaccaacaaagcaguaguaucacuauccggaugcggagucuccguccuaacauucaaaguacuagaccucaagaauuacauagauaaacaacuacuaccaauacucaacaaacaaucauguucaauaccaaacaucgaaaccgucauagaauuucaacaaaaaaauaauagacucuuagaaauaacacgagaauuuagcguaaacgcaggagucacaaccccugucucaacauacaugcuaaccaauuccgaauuauuaucacucauaaaugacaugccaauaacuaaugaccaaaaaaaacuuaugucaaacaacguacaaauaguaagacaacaaucauauucaauaaugugcauaaucaaagaagaaguuuuagcauauguaguacaacuaccacuauauggcgucauagacacaccaugcuggaaauuacacacaucaccucuaugcacaacaaacacaaaagaaggaagcaacauuugccuaaccagaaccgauagaggaugguacugcgauaacgcaggcucaguaucauucuucccucaagccgaaacuugcaaaguccaaucaaauagagucuucugcgauacaaugaacuccuuaacuuuaccaucagaaguaaaucuaugcaacguagauaucuuuaauccaaaauacgauugcaaaaucaugacaucaaaaacagauguaucaucuaguguaauuaccucccuaggagcaauaguaagcugcuacggaaaaacaaaaugcaccgccucuaacaaaugucguggaauaauaaaaacauucucaaacggaugcgauuauguaucaaauaaaggugucgacaccguaucaguaggcaauacacuauacuauguaaauaaacaagaaggacaaucacucuacgucaaaggugaaccaauaauaaacuucuacgacccacuuguauucccaagcgacgaauuugacgcaucaauaagccaaguaaacgaaaaaauaaaccaaucacuagcauucaucagaaaaucagacgaacuacuccacaauguaaaugcaggaaaaucaacaaccaauaucaugauaacaaccauaauaauagucauaauaguaauacuauuaucccucauagccguuggacuacuccuauauuguaaagcacgauaaggacuaguaauaaggaaacuguaugaaugucugugggcaggaagugaagagauccuucuguaaagguuuuuggaauuaugucugcugaauaauaaacuuuuuugaaauaauaaaucugguagaaaaaugagaucuaaaaaaaaaaaaaaaaaaaaaaaaaaaaaaaaaaaaaaaaaaaaaaaaaaaaaaaaaaaaaaaaugcaucccccccccccccccccccccccccccccccaaaggcucuuuucagagccaccagaauu

SEQ ID NO: 8205 - RNA, 1910 nt, Artificial Sequence
  mRNA product Design g-5 comprising derived and/or modified sequence from HRSV(A2)__F-del_DSCav1_mut8 (opt11)
gggagacccgugacccggaaguuguacggcuacgcgacuuucccucccacaaacccucgcgcccuuccuuuccuacuugggcccggcagaaagcuuaccauggaacuccucauccucaaagccaacgccaucaccaccauacucaccgcaguaaccuucugcuucgcauccggccaaaacaucacagaagaguucuaccagaguaccugcuccgccgucuccaaaggcuaccuuggcgcccuccguaccgggugguacacauccgucaucacaaucgaacucuccaacaucaaagaaauaaagugcaacggcacagacgccaaaguaaaacugauaaagcaagaacucgacaaauacaaaaacgccguaaccgaccuccagcuacuaaugcaauccacucccgccaccggcagcggauccgccaucgccuccggaguagccgucuguaaagucuuacaccucgaaggcgaagugaacaaaaucaaauccgcccuacucucaaccaacaaagccguaguaucacucuccgggugcggcguuucagugcuaacguucaaaguccuugaccucaaaaacuacaucgacaaacaacuccuccccauccuaaauaaacaauccugcuccauacccaacaucgagacugucaucgaguuccagcagaaaaacaaccgacuccucgaaaucacacgcgaguucucugucaacgccggcgucacaacccccgucuccacauacaugcucaccaacagcgaacuccucucccuaaucaaugacaugcccaucaccaacgaccaaaagaaacucaugucaaacaacguccaaaucguccgccaacaauccuacagcaucaugugcaucaucaaagaagaaguucucgcauacguaguacaacucccccucuacggagugaucgacacccccugcuggaaacuacacaccagcccgcuuugcaccacaaacaccaaggaaggcuccaacaucugccucacucgaaccgaccgcggcugguacugcgacaacgcaggcuccgucaguuucuuuccccaagcagaaacaugcaaaguccaauccaaccgaguauucugcgacaccaugaacucccucacccuaccauccgaaguuaaccuaugcaacguggacaucuucaaccccaaguacgacugcaaaauuaugaccuccaaaaccgacguauccuccagcgucaucaccagccucggagcaauagucuccugcuacggcaagaccaagugcaccgcuuccaacaagugucgcggaaucaucaaaaccuucucaaacggcugcgacuacgucuccaacaaaggcgucgacaccguauccguaggaaacacccuauacuacgucaacaaacaagaaggacaaucccucuaugucaaaggcgaacccaucaucaauuucuacgacccccuagucuucccuuccgacgaguucgacgcguccaucagccaagucaaugaaaagaucaaccagagccuggcauucauccgcaaauccgacgaacuccuccacaacgucaacgcgggaaaauccacgacaaacaucaugaucaccaccaucaucaucgucaucauagucauucuccuuucucucaucgccgugggacuacuucucuacugcaaagcccgauaaggacuaguaauaaggaaacuguaugaaugucugugggcaggaagugaagagauccuucuguaaagguuuuuggaauuaugucugcugaauaauaaacuuuuuugaaauaauaaaucugguagaaaaaugagaucuaaaaaaaaaaaaaaaaaaaaaaaaaaaaaaaaaaaaaaaaaaaaaaaaaaaaaaaaaaaaaaaaugcaucccccccccccccccccccccccccccccccaaaggcucuuuucagagccaccagaauu
